United States Patent Application Publication US 2023/0026259 A1 - sequence listing, part 30

SEQ ID NO: 113545 - DNA, 2232 bp, Homo sapiens
  Payload ID: 2195
  Gene Symbol: CANX
  Gene Name: calnexin
  Uniprot ID: P27824
  ENST ID: ENST00000504734
  CDS Start-End: 191-1969
agtgcacgccaatccggccaggcgctcgcgctgggttctgctcacgcccgtaggggcccgcgttcgctgcaacgggcccttcctgatggccgatcgtcggactcctaccccttttgccggctgccgtttgccccgtcagcgaagggcgcgcgatgcgtcccaagtctcggctccaggaaccagacggatcatggaagggaagtggttgctgtgtatgttactggtgcttggaactgctattgttgaggctcatgatggacatgatgatgatgtgattgatattgaggatgaccttgacgatgtcattgaagaggtagaagactcaaaaccagataccactgctcctccttcatctcccaaggttacttacaaagctccagttccaacaggggaagtatattttgctgattcttttgacagaggaactctgtcagggtggattttatccaaagccaagaaagacgataccgatgatgaaattgccaaatatgatggaaagtgggaggtagaggaaatgaaggagtcaaagcttccaggtgataaaggacttgtgttgatgtctcgggccaagcatcatgccatctctgctaaactgaacaagcccttcctgtttgacaccaagcctctcattgttcagtatgaggttaatttccaaaatggaatagaatgtggtggtgcctatgtgaaactgctttctaaaacaccagaactcaacctggatcagttccatgacaagaccccttatacgattatgtttggtccagataaatgtggagaggactataaactgcacttcatcttccgacacaaaaaccccaaaacgggtatctatgaagaaaaacatgctaagaggccagatgcagatctgaagacctattttactgataagaaaacacatctttacacactaatcttgaatccagataatagttttgaaatactggttgaccaatctgtggtgaatagtggaaatctgctcaatgacatgactcctcctgtaaatccttcacgtgaaattgaggacccagaagaccggaagcccgaggattgggatgaaagaccaaaaatcccagatccagaagctgtcaagccagatgactgggatgaagatgcccctgctaagattccagatgaagaggccacaaaacccgaaggctggttagatgatgagcctgagtacgtacctgatccagacgcagagaaacctgaggattgggatgaagacatggatggagaatgggaggctcctcagattgccaaccctagatgtgagtcagctcctggatgtggtgtctggcagcgacctgtgattgacaaccccaattataaaggcaaatggaagcctcctatgattgacaatcccagttaccagggaatctggaaacccaggaaaataccaaatccagatttctttgaagatctggaacctttcagaatgactccttttagtgctattggtttggagctgtggtccatgacctctgacattttttttgacaactttatcatttgtgctgatcgaagaatagttgatgattgggccaatgatggatggggcctgaagaaagctgctgatggggctgctgagccaggcgttgtggggcagatgatcgaggcagctgaagagcgcccgtggctgtgggtagtctatattctaactgtagcccttcctgtgttcctggttatcctcttctgctgttctggaaagaaacagaccagtggtatggagtataagaaaactgatgcacctcaaccggatgtgaaggaagaggaagaagagaaggaagaggaaaaggacaagggagatgaggaggaggaaggagaagagaaacttgaagagaaacagaaaagtgatgctgaagaagatggtggcactgtcagtcaagaggaggaagacagaaaacctaaagcagaggaggatgaaattttgaacagatcaccaagaaacagaaagccacgaagagagtgaaacaatcttaagagcttgatctgtgatttcttctccctcctcccctgcaagagtggtcctaggagaggacctggcacaccttaggttgacattcagaaaacttcaagacatcaccatcagcaggctccagttgaacactagtctgtgtaactttaaacatctagcagtaaatacttgcagttgtgatataaaggaccctgtttctgtagaaaagaaaacatttaacataatggttgtgaaatgtaacatgaagcaaactaact

SEQ ID NO: 113546 - DNA, 568 bp, Homo sapiens
  Payload ID: 2195
  Gene Symbol: CANX
  Gene Name: calnexin
  ENST ID: ENST00000508787
  CDS Start-End: 1-568
aaggacttgtgttgatgtctcgggccaagcatcatgccatctctgctaaactgaacaagcccttcctgtttgacaccaagcctctcattgttcagtatgaggttaatttccaaaatggaatagaatgtggtggtgcctatgtgaaactgctttctaaaacaccagaactcaacctggatcagttccatgacaagaccccttatacgattatgtttggtccagataaatgtggagaggactataaactgcacttcatcttccgacacaaaaaccccaaaacgggtatctatgaagaaaaacatgctaagaggccagatgcagatctgaagacctattttactgataagaaaacacatctttacacactaaaaagccgagggactaatcatttatgtttcgtgcataaggaaatgggcgttagcttccccaagaccccaggagccaggcattgttcttaccccaaagcctcagtcttgaatccagataatagttttgaaatactggttgaccaatctgtggtgaatagtggaaatctgctcaatgacatgactcctcctgtaaatccttc

SEQ ID NO: 113547 - DNA, 585 bp, Homo sapiens
  Payload ID: 2195
  Gene Symbol: CANX
  Gene Name: calnexin
  ENST ID: ENST00000514383
  CDS Start-End: 154-585
gctggcgcctgcgcgcttgcgcatcttcctctgcccggcgcgcgccgcagccgtcgggatcacctcggggttgcgctgcttctccagcaagtgcatgcgcgccatggtctcagtcagcatgtctatgagcagttcctgctgcagcttcagatcatggaagggaagtggttgctgtgtatgttactggtgcttggaactgctattgttgaggctcatgatggacatgatgatgatgtgattgatattgaggatgaccttgacgatgtcattgaagaggtagaagactcaaaaccagataccactgctcctccttcatctcccaaggttacttacaaagctccagttccaacaggggaagtatattttgctgattcttttgacagaggaactctgtcagggtggattttatccaaagccaagaaagacgataccgatgatgaaattgccaaatatgatggaaagtgggaggtagaggaaatgaaggagtcaaagcttccaggtgataaaggacttgtgttgatgtctcgggccaagcatcatgccatctctgctaaactgaacaagcccttcctgtttgacaccaag

SEQ ID NO: 113548 - DNA, 511 bp, Homo sapiens
  Payload ID: 2195
  Gene Symbol: CANX
  Gene Name: calnexin
  ENST ID: ENST00000510810
  CDS Start-End: 1-511
ctctttactgcggcgcggggcaaggtgtgcgggcgggaaggggcacgggcacccccgcggtccccgggaggctagaggttacttacaaagctccagttccaacaggggaagtatattttgctgattcttttgacagaggaactctgtcagggtggattttatccaaagccaagaaagacgataccgatgatgaaattgccaaatatgatggaaagtgggaggtagaggaaatgaaggagtcaaagcttccaggtgataaaggacttgtgttgatgtctcgggccaagcatcatgccatctctgctaaactgaacaagcccttcctgtttgacaccaagcctctcattgttcagtatgaggttaatttccaaaatggaatagaatgtggtggtgcctatgtgaaactgctttctaaaacaccagaactcaacctggatcagttccatgacaagaccccttatacgattatgtttggtccagataaatgtggagaggactataaactgcactt

SEQ ID NO: 113549 - DNA, 825 bp, Homo sapiens
  Payload ID: 2195
  Gene Symbol: CANX
  Gene Name: calnexin
  ENST ID: ENST00000502296
  CDS Start-End: 424-825
cagcgcggagcagtgcacgccaatccggccaggcgctcgcgctgggttctgctcacgcccgtaggggcccgcgttcgctgcaacgggcccttcctgatggccgatcgtcggactcctaccccttttgccggctgccgtttgccccgtcagcgaagggcgcgcgatgcgtcccaagtctcggctccaggaaccagacgggtgagggctactgggggttgggttggaacgccccgaaggcaccacagcaaccgacgcgggaacgcctgttaaaccagccccgccccgagacgcgcgcgcccggcggtctcgatccagcgtggcccgcccctcacctcccgcccaaccaacagccacttcctgcctcactcccggccaatcttcacactccacgaagaatagccgtagggggcgtatgggacgatcatggaagggaagtggttgctgtgtatgttactggtgcttggaactgctattgttgaggctcatgatggacatgatgatgatgtgattgatattgaggatgaccttgacgatgtcattgaagaggtagaagactcaaaaccagataccactgctcctccttcatctcccaaggttacttacaaagctccagttccaacaggggaagtatattttgctgattcttttgacagaggaactctgtcagggtggattttatccaaagccaagaaagacgataccgatgatgaaattgccaaatatgatggaaagtgggaggtagaggaaatgaaggagtcaaagcttccaggtgataaaggacttgtgttgatgtctcgggccaagcatcatgccatctctgctaaa

SEQ ID NO: 113550 - DNA, 570 bp, Homo sapiens
  Payload ID: 2195
  Gene Symbol: CANX
  Gene Name: calnexin
  ENST ID: ENST00000502498
  CDS Start-End: 66-570
gcggtggggctcgctcgcgcggcagcggtggccgaggcctcttggttctgcggcacgtgacgatcatggaagggaagtggttgctgtgtatgttactggtgcttggaactgctattgttgaggctcatgatggacatgatgatgatgtgattgatattgaggatgaccttgacgatgtcattgaagaggtagaagactcaaaaccagataccactgctcctccttcatctcccaaggttacttacaaagctccagttccaacaggggaagtatattttgctgattcttttgacagaggaactctgtcagggtggattttatccaaagccaagaaagacgataccgatgatgaaattgccaaatatgatggaaagtgggaggtagaggaaatgaaggagtcaaagcttccaggtgataaaggacttgtgttgatgtctcgggccaagcatcatgccatctctgctaaactgaacaagcccttcctgtttgacaccaagcctctcattgttcagtatgaggttaatttccaaaatggaatagaatgtggtggtgcctatgtgaaactgcttt

SEQ ID NO: 113551 - DNA, 582 bp, Homo sapiens
  Payload ID: 2195
  Gene Symbol: CANX
  Gene Name: calnexin
  ENST ID: ENST00000507307
  CDS Start-End: 347-582
gctcgcgcggcagcggtggccgaggcctcttggttctgcggcacgtgacggtcgggccgcctccgcctctctctttactgcggcgcggggcaaggtgtgcgggcgggaaggggcacgggcacccccgcggtccccgggaggctagagcggagactggaccctagttccctgaagagaaaggggaatgtaccagaaggagaacacgcagtggttgagaaacttagcagttacagcacctattctggaggcgagtaatccagttggagagggacagggcgttaaaagcaggaaagcccccgaaagctcatctaagtgcatctctttccacaccggaggcctggagatcatggaagggaagtggttgctgtgtatgttactggtgcttggaactgctattgttgaggctcatgatggacatgatgatgatgtgattgatattgaggatgaccttgacgatgtcattgaagaggtagaagactcaaaaccagataccactgctcctccttcatctcccaaggttacttacaaagctccagttccaacaggggaagtatattttgctgattcttttgacagaggaac

SEQ ID NO: 113552 - DNA, 533 bp, Homo sapiens
  Payload ID: 2195
  Gene Symbol: CANX
  Gene Name: calnexin
  ENST ID: ENST00000504579
  CDS Start-End: 139-324
gcggtggccgaggcctcttggttctgcggcacgtgacggtcgggccgcctccgcctctctctttactgcggcgcggggcaaggtgtgcgggcgggaaggggcacgggcacccccgcggtccccgggaggctagagatcatggaagggaagtggttgctgtgtatgttactggtgcttggaactgctattgttgaggctcatgatggacatgatgatgatgtgattgatattgaggatgaccttgacgatgtcattgaagaggtagaagactcaaaaccagataccactgctcctccttcatctcccaaggaaagtgggaggtagaggaaatgaaggagtcaaagcttccaggtgataaaggacttgtgttgatgtctcgggccaagcatcatgccatctctgctaaactgaacaagcccttcctgtttgacaccaagcctctcattgttcagtatgaggttaatttccaaaatggaatagaatgtggtggtgcctatgtgaaactgctttctaaaacaccagaactcaacctg

SEQ ID NO: 113553 - DNA, 592 bp, Homo sapiens
  Payload ID: 2195
  Gene Symbol: CANX
  Gene Name: calnexin
  ENST ID: ENST00000506654
  CDS Start-End: 199-592
cttggttctgcggcacgtgacggtcgggccgcctccgcctctctctttactgcggcgcggggcaaggtgtgcgggcgggaaggggcacgggcacccccgcggtccccgggaggctagaggtggattttatccaaagccaagaaagacgataccgatgatgaaattgccaaatatgatggaaagtgggaggtagaggaaatgaaggagtcaaagcttccaggtgataaaggacttgtgttgatgtctcgggccaagcatcatgccatctctgctaaactgaacaagcccttcctgtttgacaccaagcctctcattgttcagtatgaggttaatttccaaaatggaatagaatgtggtggtgcctatgtgaaactgctttctaaaacaccagaactcaacctggatcagttccatgacaagaccccttatacgattatgtttggtccagataaatgtggagaggactataaactgcacttcatcttccgacacaaaaaccccaaaacgggtatctatgaagaaaaacatgctaagaggccagatgcagatctgaagacctattttactgataagaaaacacatctttacacac

SEQ ID NO: 113554 - DNA, 1876 bp, Homo sapiens
  Payload ID: 2195
  Gene Symbol: CANX
  Gene Name: calnexin
  ENST ID: ENST00000514032
  CDS Start-End: 119-409
gttctgcggcacgtgacggtcgggccgcctccgcctctctctttactgcggcgcggggcaaggtgtgcgggcgggaaggggcacgggcacccccgcggtccccgggaggctagagatcatggaagggaagtggttgctgtgtatgttactggtgcttggaactgctattgttgaggctcatgatggacatgatgatgatgtgattgatattgaggatgaccttgacgatgtcattgaagaggtagaagactcaaaaccagataccactgctcctccttcatctcccaaggttacttacaaagctccagttccaacaggggaagtatattttgctgattcttttgacagaggaactctgtcagggaaagtgggaggtagaggaaatgaaggagtcaaagcttccaggtgataaaggacttgtgttgatgtctcgggccaagcatcatgccatctctgctaaactgaacaagcccttcctgtttgacaccaagcctctcattgttcagtatgaggttaatttccaaaatggaatagaatgtggtggtgcctatgtgaaactgctttctaaaacaccagaactcaacctggatcagttccatgacaagaccccttatacgattatgtttggtccagataaatgtggagaggactataaactgcacttcatcttccgacacaaaaaccccaaaacgggtatctatgaagaaaaacatgctaagaggccagatgcagatctgaagacctattttactgataagaaaacacatctttacacactaatcttgaatccagataatagttttgaaatactggttgaccaatctgtggtgaatagtggaaatctgctcaatgacatgactcctcctgtaaatccttcacgtgaaattgaggacccagaagaccggaagcccgaggattgggatgaaagaccaaaaatcccagatccagaagctgtcaagccagatgactgggatgaagatgcccctgctaagattccagatgaagaggccacaaaacccgaaggctggttagatgatgagcctgagtacgtacctgatccagacgcagagaaacctgaggattgggatgaagacatggatggagaatgggaggctcctcagattgccaaccctagatgtgagtcagctcctggatgtggtgtctggcagcgacctgtgattgacaaccccaattataaaggcaaatggaagcctcctatgattgacaatcccagttaccagggaatctggaaacccaggaaaataccaaatccagatttctttgaagatctggaacctttcagaatgactccttttagtgctattggtttggagctgtggtccatgacctctgacattttttttgacaactttatcatttgtgctgatcgaagaatagttgatgattgggccaatgatggatggggcctgaagaaagctgctgatggggctgctgagccaggcgttgtggggcagatgatcgaggcagctgaagagcgcccgtggctgtgggtagtctatattctaactgtagcccttcctgtgttcctggttatcctcttctgctgttctggaaagaaacagaccagtggtatggagtataagaaaactgatgcacctcaaccggatgtgaaggaagaggaagaagagaaggaagaggaaaaggacaagggagatgaggaggaggaaggagaagagaaacttgaagagaaacagaaaagtgatgctgaagaagatggtggcactgtcagtcaagaggaggaagacagaaaacctaaagcagaggaggatgaaattttgaacagatcaccaagaaacagaaagccacgaagagagtgaaacaatcttaagagcttgatctgtgatttcttctccct

SEQ ID NO: 113555 - DNA, 3007 bp, Homo sapiens
  Payload ID: 2196
  Gene Symbol: CAPN1
  Gene Name: calpain 1, (mu/I) large subunit
  Uniprot ID: P07384
  ENST ID: ENST00000279247
  CDS Start-End: 144-2288
aaggagagagggagggcggagggcggaggggcggcgggaggagggcggggaggagcgctcttcctggttgggccctgccctgagctgccaccgggaagccagcctcagggactgcagcgacccccaaacacccctcccccaggatgtcggaggagatcatcacgccggtgtactgcactggggtgtcagcccaagtgcagaagcagcgggccagggagctgggcctgggccgccatgagaatgccatcaagtacctgggccaggattatgagcagctgcgggtgcgatgcctgcagagtgggaccctcttccgtgatgaggccttccccccggtaccccagagcctgggttacaaggacctgggtcccaattcctccaagacctatggcatcaagtggaagcgtcccacggaactgctgtcaaacccccagttcattgtggatggagctacccgcacagacatctgccagggagcactgggggactgctggctcttggcggccatcgcctccctcactctcaacgacaccctcctgcaccgagtggttccgcacggccagagcttccagaatggctatgccggcatcttccatttccagctgtggcaatttggggagtgggtggacgtggtcgtggatgacctgctgcccatcaaggacgggaagctagtgttcgtgcactctgccgaaggcaacgagttctggagcgccctgcttgagaaggcctatgccaaggtaaatggcagctacgaggccctgtcagggggcagcacctcagagggctttgaggacttcacaggcggggttaccgagtggtacgagttgcgcaaggctcccagtgacctctaccagatcatcctcaaggcgctggagcggggctccctgctgggctgctccatagacatctccagcgttctagacatggaggccatcactttcaagaagttggtgaagggccatgcctactctgtgaccggggccaagcaggtgaactaccgaggccaggtggtgagcctgatccggatgcggaacccctggggcgaggtggagtggacgggagcctggagcgacagctcctcagagtggaacaacgtggacccatatgaacgggaccagctccgggtcaagatggaggacggggagttctggatgtcattccgagacttcatgcgggagttcacccgcctggagatctgcaacctcacacccgacgccctcaagagccggaccatccgcaaatggaacaccacactctacgaaggcacctggcggcgggggagcaccgcggggggctgccgaaactacccagccaccttctgggtgaaccctcagttcaagatccggctggatgagacggatgacccggacgactacggggaccgcgagtcaggctgcagcttcgtgctcgcccttatgcagaagcaccgtcgccgcgagcgccgcttcggccgcgacatggagactattggcttcgcggtctacgaggtccctccggagctggtgggccagccggccgtacacttgaagcgtgacttcttcctggccaatgcgtctcgggcgcgctcagagcagttcatcaacctgcgagaggtcagcacccgcttccgcctgccacccggggagtatgtggtggtgccctccaccttcgagcccaacaaggagggcgacttcgtgctgcgcttcttctcagagaagagtgctgggactgtggagctggatgaccagatccaggccaatctccccgatgagcaagtgctctcagaagaggagattgacgagaacttcaaggccctcttcaggcagctggcaggggaggacatggagatcagcgtgaaggagttgcggacaatcctcaataggatcatcagcaaacacaaagacctgcggaccaagggcttcagcctagagtcgtgccgcagcatggtgaacctcatggatcgtgatggcaatgggaagctgggcctggtggagttcaacatcctgtggaaccgcatccggaattacctgtccatcttccggaagtttgacctggacaagtcgggcagcatgagtgcctacgagatgcggatggccattgagtcggcaggcttcaagctcaacaagaagctgtacgagctcatcatcacccgctactcggagcccgacctggcggtcgactttgacaatttcgtttgctgcctggtgcggctagagaccatgttccgatttttcaaaactctggacacagatctggatggagttgtgacctttgacttgtttaagtggttgcagctgaccatgtttgcatgaggcagggactcggtcccccttgccgtgctcccctccctcctcgtctgccaagcctcgcctcctaccacaccacaccaggccaccccagctgcaagtgccttccttggagcagagaggcagcctcgtcctcctgtcccctctcctcccagccaccatcgttcatctgctccgggcagaactgtgtggcccctgcctgtgccagccatgggctcgggatggactccctgggccccacccattgccaagccaggaaggcagctttcgcttgttcctgcctcgggacagccccgggtttccccagcatcctgatgtgtcccctctccccacttcagaggccacccactcagcaccaccggcctggccttgcctgcagactataaactataaccactagctcgacacagtctgcagtccaggcgtgtggagccgcctcccggctcggggaggccccggggctgggaacgcctgtgccttcctgcgccgaagccaacgccccctctgtccttccctggccctgctgccgaccaggagctgcccagcctgtgggcggtcggccttccctccttcgctccttttttatattagtgattttaaaggggactcttcagggacttgtgtactggttatgggggtgccagaggcactaggcttggggtggggaggtcccgtgttccatatagaggaaccccaaataataaaaggccccacatctgtctgtg

SEQ ID NO: 113556 - DNA, 564 bp, Homo sapiens
  Payload ID: 2196
  Gene Symbol: CAPN1
  Gene Name: calpain 1, (mu/I) large subunit
  ENST ID: ENST00000527699
  CDS Start-End: 109-564
actacagagctgcaagcccctgacaatgggatccgggaaaggagaggtggccggcacgcctgggaactgggaaatccctttcctggattcactgggagcaccgggaggatgtcggaggagatcatcacgccggtgtactgcactggggtgtcagcccaagtgcagaagcagcgggccagggagctgggcctgggccgccatgagaatgccatcaagtacctgggccaggattatgagcagctgcgggtgcgatgcctgcagagtgggaccctcttccgtgatgaggccttccccccggtaccccagagcctgggttacaaggacctgggtcccaattcctccaagacctatggcatcaagtggaagcgtcccacggaactgctgtcaaacccccagttcattgtggatggagctacccgcacagacatctgccagggagcactgggggactgctggctcttggcggccatcgcctccctcactctcaacgacaccctcctgcaccgagtggttccgcacggccagagcttccagaatggctatgccggcatcttccatttccag

SEQ ID NO: 113557 - DNA, 550 bp, Homo sapiens
  Payload ID: 2196
  Gene Symbol: CAPN1
  Gene Name: calpain 1, (mu/I) large subunit
  ENST ID: ENST00000526966
  CDS Start-End: 66-550
ctaatttgtcctctcgcggaattggcccccggcctgcggagggaggggcggggagacaccgtgagatgtcggaggagatcatcacgccggtgtactgcactggggtgtcagcccaagtgcagaagcagcgggccagggagctgggcctgggccgccatgagaatgccatcaagtacctgggccaggattatgagcagctgcgggtgcgatgcctgcagagtgggaccctcttccgtgatgaggccttccccccggtaccccagagcctgggttacaaggacctgggtcccaattcctccaagacctatggcatcaagtggaagcgtcccacggaactgctgtcaaacccccagttcattgtggatggagctacccgcacagacatctgccagggagcactgggggactgctggctcttggcggccatcgcctccctcactctcaacgacaccctcctgcaccgagtggttccgcacggccagagcttccagaatggctatgccggcatcttccatttccagctgtggcaatttggggagtgggtggacgt

SEQ ID NO: 113558 - DNA, 2792 bp, Homo sapiens
  Payload ID: 2196
  Gene Symbol: CAPN1
  Gene Name: calpain 1, (mu/I) large subunit
  Uniprot ID: P07384
  ENST ID: ENST00000533129
  CDS Start-End: 76-2220
ctctcgcggaattggcccccggcctgcggagggaggggcggggagacaccgtgagtaagagatagtcagagaccgatgtcggaggagatcatcacgccggtgtactgcactggggtgtcagcccaagtgcagaagcagcgggccagggagctgggcctgggccgccatgagaatgccatcaagtacctgggccaggattatgagcagctgcgggtgcgatgcctgcagagtgggaccctcttccgtgatgaggccttccccccggtaccccagagcctgggttacaaggacctgggtcccaattcctccaagacctatggcatcaagtggaagcgtcccacggaactgctgtcaaacccccagttcattgtggatggagctacccgcacagacatctgccagggagcactgggggactgctggctcttggcggccatcgcctccctcactctcaacgacaccctcctgcaccgagtggttccgcacggccagagcttccagaatggctatgccggcatcttccatttccagctgtggcaatttggggagtgggtggacgtggtcgtggatgacctgctgcccatcaaggacgggaagctagtgttcgtgcactctgccgaaggcaacgagttctggagcgccctgcttgagaaggcctatgccaaggtaaatggcagctacgaggccctgtcagggggcagcacctcagagggctttgaggacttcacaggcggggttaccgagtggtacgagttgcgcaaggctcccagtgacctctaccagatcatcctcaaggcgctggagcggggctccctgctgggctgctccatagacatctccagcgttctagacatggaggccatcactttcaagaagttggtgaagggccatgcctactctgtgaccggggccaagcaggtgaactaccgaggccaggtggtgagcctgatccggatgcggaacccctggggcgaggtggagtggacgggagcctggagcgacagctcctcagagtggaacaacgtggacccatatgaacgggaccagctccgggtcaagatggaggacggggagttctggatgtcattccgagacttcatgcgggagttcacccgcctggagatctgcaacctcacacccgacgccctcaagagccggaccatccgcaaatggaacaccacactctacgaaggcacctggcggcgggggagcaccgcggggggctgccgaaactacccagccaccttctgggtgaaccctcagttcaagatccggctggatgagacggatgacccggacgactacggggaccgcgagtcaggctgcagcttcgtgctcgcccttatgcagaagcaccgtcgccgcgagcgccgcttcggccgcgacatggagactattggcttcgcggtctacgaggtccctccggagctggtgggccagccggccgtacacttgaagcgtgacttcttcctggccaatgcgtctcgggcgcgctcagagcagttcatcaacctgcgagaggtcagcacccgcttccgcctgccacccggggagtatgtggtggtgccctccaccttcgagcccaacaaggagggcgacttcgtgctgcgcttcttctcagagaagagtgctgggactgtggagctggatgaccagatccaggccaatctccccgatgagcaagtgctctcagaagaggagattgacgagaacttcaaggccctcttcaggcagctggcaggggaggacatggagatcagcgtgaaggagttgcggacaatcctcaataggatcatcagcaaacacaaagacctgcggaccaagggcttcagcctagagtcgtgccgcagcatggtgaacctcatggatcgtgatggcaatgggaagctgggcctggtggagttcaacatcctgtggaaccgcatccggaattacctgtccatcttccggaagtttgacctggacaagtcgggcagcatgagtgcctacgagatgcggatggccattgagtcggcaggcttcaagctcaacaagaagctgtacgagctcatcatcacccgctactcggagcccgacctggcggtcgactttgacaatttcgtttgctgcctggtgcggctagagaccatgttccgatttttcaaaactctggacacagatctggatggagttgtgacctttgacttgtttaagtggttgcagctgaccatgtttgcatgaggcagggactcggtcccccttgccgtgctcccctccctcctcgtctgccaagcctcgcctcctaccacaccacaccaggccaccccagctgcaagtgccttccttggagcagagaggcagcctcgtcctcctgtcccctctcctcccagccaccatcgttcatctgctccgggcagaactgtgtggcccctgcctgtgccagccatgggctcgggatggactccctgggccccacccattgccaagccaggaaggcagctttcgcttgttcctgcctcgggacagccccgggtttccccagcatcctgatgtgtcccctctccccacttcagaggccacccactcagcaccaccggcctggccttgcctgcagactataaactataaccactagctcgacacagtctgcagtccaggcgtgtggagccgcctcccggctcggggaggccccggggctgggaacgcctgtgccttcctgcgccgaagccaacgccccctctgtccttccctggccctgctgccgaccaggagctgcccagcctgtgggcggtcggccttccctccttcgctcc

SEQ ID NO: 113559 - DNA, 581 bp, Homo sapiens
  Payload ID: 2196
  Gene Symbol: CAPN1
  Gene Name: calpain 1, (mu/I) large subunit
  ENST ID: ENST00000534373
  CDS Start-End: 175-581
gttgggccctgccctgagctgccaccgggaagccagcctcagggactgcagcgacccccaaacacccctcccccagttccttgtgctgtctggaggctccgccctgccccacctgacctgctggctcactacagagctgcaagcccctgacaatgggatccgggaaaggagaggatgtcggaggagatcatcacgccggtgtactgcactggggtgtcagcccaagtgcagaagcagcgggccagggagctgggcctgggccgccatgagaatgccatcaagtacctgggccaggattatgagcagctgcgggtgcgatgcctgcagagtgggaccctcttccgtgatgaggccttccccccggtaccccagagcctgggttacaaggacctgggtcccaattcctccaagacctatggcatcaagtggaagcgtcccacggaactgctgtcaaacccccagttcattgtggatggagctacccgcacagacatctgccagggagcactgggggactgctggctcttggcggccatcgcctccctcactctcaacgacaccctcctgcaccgagtggttcc

SEQ ID NO: 113560 - DNA, 3086 bp, Homo sapiens
  Payload ID: 2196
  Gene Symbol: CAPN1
  Gene Name: calpain 1, (mu/I) large subunit
  Uniprot ID: P07384
  ENST ID: ENST00000527323
  CDS Start-End: 241-2385
gggatccgggaaaggagaggtggccggcacgcctgggaactgggaaatccctttcctggattcactgggagcaccgggaggtggctgagaaccctacttctgtgaggggagcagtgaggcagggaaaccctaggtttggggatggataagcaggggcaggagagcagagcttgcaggcaggagcccaggttctagtcttgggaaggcctgggttctgagcaggcccatctgtccggcaggatgtcggaggagatcatcacgccggtgtactgcactggggtgtcagcccaagtgcagaagcagcgggccagggagctgggcctgggccgccatgagaatgccatcaagtacctgggccaggattatgagcagctgcgggtgcgatgcctgcagagtgggaccctcttccgtgatgaggccttccccccggtaccccagagcctgggttacaaggacctgggtcccaattcctccaagacctatggcatcaagtggaagcgtcccacggaactgctgtcaaacccccagttcattgtggatggagctacccgcacagacatctgccagggagcactgggggactgctggctcttggcggccatcgcctccctcactctcaacgacaccctcctgcaccgagtggttccgcacggccagagcttccagaatggctatgccggcatcttccatttccagctgtggcaatttggggagtgggtggacgtggtcgtggatgacctgctgcccatcaaggacgggaagctagtgttcgtgcactctgccgaaggcaacgagttctggagcgccctgcttgagaaggcctatgccaaggtaaatggcagctacgaggccctgtcagggggcagcacctcagagggctttgaggacttcacaggcggggttaccgagtggtacgagttgcgcaaggctcccagtgacctctaccagatcatcctcaaggcgctggagcggggctccctgctgggctgctccatagacatctccagcgttctagacatggaggccatcactttcaagaagttggtgaagggccatgcctactctgtgaccggggccaagcaggtgaactaccgaggccaggtggtgagcctgatccggatgcggaacccctggggcgaggtggagtggacgggagcctggagcgacagctcctcagagtggaacaacgtggacccatatgaacgggaccagctccgggtcaagatggaggacggggagttctggatgtcattccgagacttcatgcgggagttcacccgcctggagatctgcaacctcacacccgacgccctcaagagccggaccatccgcaaatggaacaccacactctacgaaggcacctggcggcgggggagcaccgcggggggctgccgaaactacccagccaccttctgggtgaaccctcagttcaagatccggctggatgagacggatgacccggacgactacggggaccgcgagtcaggctgcagcttcgtgctcgcccttatgcagaagcaccgtcgccgcgagcgccgcttcggccgcgacatggagactattggcttcgcggtctacgaggtccctccggagctggtgggccagccggccgtacacttgaagcgtgacttcttcctggccaatgcgtctcgggcgcgctcagagcagttcatcaacctgcgagaggtcagcacccgcttccgcctgccacccggggagtatgtggtggtgccctccaccttcgagcccaacaaggagggcgacttcgtgctgcgcttcttctcagagaagagtgctgggactgtggagctggatgaccagatccaggccaatctccccgatgagcaagtgctctcagaagaggagattgacgagaacttcaaggccctcttcaggcagctggcaggggaggacatggagatcagcgtgaaggagttgcggacaatcctcaataggatcatcagcaaacacaaagacctgcggaccaagggcttcagcctagagtcgtgccgcagcatggtgaacctcatggatcgtgatggcaatgggaagctgggcctggtggagttcaacatcctgtggaaccgcatccggaattacctgtccatcttccggaagtttgacctggacaagtcgggcagcatgagtgcctacgagatgcggatggccattgagtcggcaggcttcaagctcaacaagaagctgtacgagctcatcatcacccgctactcggagcccgacctggcggtcgactttgacaatttcgtttgctgcctggtgcggctagagaccatgttccgatttttcaaaactctggacacagatctggatggagttgtgacctttgacttgtttaagtggttgcagctgaccatgtttgcatgaggcagggactcggtcccccttgccgtgctcccctccctcctcgtctgccaagcctcgcctcctaccacaccacaccaggccaccccagctgcaagtgccttccttggagcagagaggcagcctcgtcctcctgtcccctctcctcccagccaccatcgttcatctgctccgggcagaactgtgtggcccctgcctgtgccagccatgggctcgggatggactccctgggccccacccattgccaagccaggaaggcagctttcgcttgttcctgcctcgggacagccccgggtttccccagcatcctgatgtgtcccctctccccacttcagaggccacccactcagcaccaccggcctggccttgcctgcagactataaactataaccactagctcgacacagtctgcagtccaggcgtgtggagccgcctcccggctcggggaggccccggggctgggaacgcctgtgccttcctgcgccgaagccaacgccccctctgtccttccctggccctgctgccgaccaggagctgcccagcctgtgggcggtcggccttccctccttcgctccttttttatattagtgattttaaaggggactcttcagggacttgtgtactggttatgggggtgccagaggcactaggcttggggtggggaggtcccgtgttccatatagaggaaccccaaataataaaag

SEQ ID NO: 113561 - DNA, 593 bp, Homo sapiens
  Payload ID: 2196
  Gene Symbol: CAPN1
  Gene Name: calpain 1, (mu/I) large subunit
  ENST ID: ENST00000529133
  CDS Start-End: 21-593
gacacatgggcgcttccaggatgtcggaggagatcatcacgccggtgtactgcactggggtgtcagcccaagtgcagaagcagcgggccagggagctgggcctgggccgccatgagaatgccatcaagtacctgggccaggattatgagcagctgcgggtgcgatgcctgcagagtgggaccctcttccgtgatgaggccttccccccggtaccccagagcctgggttacaaggacctgggtcccaattcctccaagacctatggcatcaagtggaagcgtcccacggaactgctgtcaaacccccagttcattgtggatggagctacccgcacagacatctgccagggagcactgggggactgctggctcttggcggccatcgcctccctcactctcaacgacaccctcctgcaccgagtggttccgcacggccagagcttccagaatggctatgccggcatcttccatttccagctgtggcaatttggggagtgggtggacgtggtcgtggatgacctgctgcccatcaaggacgggaagctagtgttcgtgcactctgccgaaggcaacgagttctggagcgccctgctt

SEQ ID NO: 113562 - DNA, 690 bp, Homo sapiens
  Payload ID: 2196
  Gene Symbol: CAPN1
  Gene Name: calpain 1, (mu/I) large subunit
  ENST ID: ENST00000526468
  CDS Start-End: 117-690
agattcctgggtcttttctgcaagctgaggggagttaagtggcaccctggccaaggaaccccagattctccctagcacccgcttccccccccggggcaggttggtagagcaggctaatgtgcatccctcctgccccaggggactgctggctcttggcggccatcgcctccctcactctcaacgacaccctcctgcaccgagtggttccgcacggccagagcttccagaatggctatgccggcatcttccatttccagctgtggcaatttggggagtgggtggacgtggtcgtggatgacctgctgcccatcaaggacgggaagctagtgttcgtgcactctgccgaaggcaacgagttctggagcgccctgcttgagaaggcctatgccaaggtaaatggcagctacgaggccctgtcagggggcagcacctcagagggctttgaggacttcacaggcggggttaccgagtggtacgagttgcgcaaggctcccagtgacctctaccagatcatcctcaaggcgctggagcggggctccctgctgggctgctccatagacatctccagcgttctagacatggaggccatcactttcaagaagttggtgaagggccatgcctactctgtgaccggggccaagcaggtgaactaccgaggccaggtggtgagcctgatccggatgcggaacc

SEQ ID NO: 113563 - DNA, 582 bp, Homo sapiens
  Payload ID: 2196
  Gene Symbol: CAPN1
  Gene Name: calpain 1, (mu/I) large subunit
  ENST ID: ENST00000527739
  CDS Start-End: 98-582
gcgctggcccctccccggggactgctctgccttttactaatttgtcctctcgcggaattggcccccggcctgcggagggaggggcggggagacaccgatgtcggaggagatcatcacgccggtgtactgcactggggtgtcagcccaagtgcagaagcagcgggccagggagctgggcctgggccgccatgagaatgccatcaagtacctgggccaggattatgagcagctgcgggtgcgatgcctgcagagtgggaccctcttccgtgatgaggccttccccccggtaccccagagcctgggttacaaggacctgggtcccaattcctccaagacctatggcatcaagtggaagcgtcccacggaactgctgtcaaacccccagttcattgtggatggagctacccgcacagacatctgccagggagcactgggggactgctggctcttggcggccatcgcctccctcactctcaacgacaccctcctgcaccgagtggttccgcacggccagagcttccagaatggctatgccggcatcttccatttccagctgtggcaatttggggagtgggtggacgt

SEQ ID NO: 113564 - DNA, 2960 bp, Homo sapiens
  Payload ID: 2196
  Gene Symbol: CAPN1
  Gene Name: calpain 1, (mu/I) large subunit
  Uniprot ID: P07384
  ENST ID: ENST00000524773
  CDS Start-End: 101-2245
tggcccccggcctgcggagggaggggcggggagacaccgtgagtaagagatagtcagagaccgtgccggagagataagggagagccgagaggaagcggggatgtcggaggagatcatcacgccggtgtactgcactggggtgtcagcccaagtgcagaagcagcgggccagggagctgggcctgggccgccatgagaatgccatcaagtacctgggccaggattatgagcagctgcgggtgcgatgcctgcagagtgggaccctcttccgtgatgaggccttccccccggtaccccagagcctgggttacaaggacctgggtcccaattcctccaagacctatggcatcaagtggaagcgtcccacggaactgctgtcaaacccccagttcattgtggatggagctacccgcacagacatctgccagggagcactgggggactgctggctcttggcggccatcgcctccctcactctcaacgacaccctcctgcaccgagtggttccgcacggccagagcttccagaatggctatgccggcatcttccatttccagctgtggcaatttggggagtgggtggacgtggtcgtggatgacctgctgcccatcaaggacgggaagctagtgttcgtgcactctgccgaaggcaacgagttctggagcgccctgcttgagaaggcctatgccaaggtaaatggcagctacgaggccctgtcagggggcagcacctcagagggctttgaggacttcacaggcggggttaccgagtggtacgagttgcgcaaggctcccagtgacctctaccagatcatcctcaaggcgctggagcggggctccctgctgggctgctccatagacatctccagcgttctagacatggaggccatcactttcaagaagttggtgaagggccatgcctactctgtgaccggggccaagcaggtgaactaccgaggccaggtggtgagcctgatccggatgcggaacccctggggcgaggtggagtggacgggagcctggagcgacagctcctcagagtggaacaacgtggacccatatgaacgggaccagctccgggtcaagatggaggacggggagttctggatgtcattccgagacttcatgcgggagttcacccgcctggagatctgcaacctcacacccgacgccctcaagagccggaccatccgcaaatggaacaccacactctacgaaggcacctggcggcgggggagcaccgcggggggctgccgaaactacccagccaccttctgggtgaaccctcagttcaagatccggctggatgagacggatgacccggacgactacggggaccgcgagtcaggctgcagcttcgtgctcgcccttatgcagaagcaccgtcgccgcgagcgccgcttcggccgcgacatggagactattggcttcgcggtctacgaggtccctccggagctggtgggccagccggccgtacacttgaagcgtgacttcttcctggccaatgcgtctcgggcgcgctcagagcagttcatcaacctgcgagaggtcagcacccgcttccgcctgccacccggggagtatgtggtggtgccctccaccttcgagcccaacaaggagggcgacttcgtgctgcgcttcttctcagagaagagtgctgggactgtggagctggatgaccagatccaggccaatctccccgatgagcaagtgctctcagaagaggagattgacgagaacttcaaggccctcttcaggcagctggcaggggaggacatggagatcagcgtgaaggagttgcggacaatcctcaataggatcatcagcaaacacaaagacctgcggaccaagggcttcagcctagagtcgtgccgcagcatggtgaacctcatggatcgtgatggcaatgggaagctgggcctggtggagttcaacatcctgtggaaccgcatccggaattacctgtccatcttccggaagtttgacctggacaagtcgggcagcatgagtgcctacgagatgcggatggccattgagtcggcaggcttcaagctcaacaagaagctgtacgagctcatcatcacccgctactcggagcccgacctggcggtcgactttgacaatttcgtttgctgcctggtgcggctagagaccatgttccgatttttcaaaactctggacacagatctggatggagttgtgacctttgacttgtttaagtggttgcagctgaccatgtttgcatgaggcagggactcggtcccccttgccgtgctcccctccctcctcgtctgccaagcctcgcctcctaccacaccacaccaggccaccccagctgcaagtgccttccttggagcagagaggcagcctcgtcctcctgtcccctctcctcccagccaccatcgttcatctgctccgggcagaactgtgtggcccctgcctgtgccagccatgggctcgggatggactccctgggccccacccattgccaagccaggaaggcagctttcgcttgttcctgcctcgggacagccccgggtttccccagcatcctgatgtgtcccctctccccacttcagaggccacccactcagcaccaccggcctggccttgcctgcagactataaactataaccactagctcgacacagtctgcagtccaggcgtgtggagccgcctcccggctcggggaggccccggggctgggaacgcctgtgccttcctgcgccgaagccaacgccccctctgtccttccctggccctgctgccgaccaggagctgcccagcctgtgggcggtcggccttccctccttcgctccttttttatattagtgattttaaaggggactcttcagggacttgtgtactggttatgggggtgccagaggcactaggcttggggtggggaggtcccgtgttccatatagaggaaccccaaataataaaaggccccacatctgtc

SEQ ID NO: 113565 - DNA, 496 bp, Homo sapiens
  Payload ID: 2196
  Gene Symbol: CAPN1
  Gene Name: calpain 1, (mu/I) large subunit
  ENST ID: ENST00000531068
  CDS Start-End: 130-496
actacagagctgcaagcccctgacaatgggatccgggaaaggagaggtggccggcacgcctgggaactgggaaatccctttcctggattcactgggagcaccgggaggtggctgagaaccctacttctgatgtcggaggagatcatcacgccggtgtactgcactggggtgtcagcccaagtgcagaagcagcgggccagggagctgggcctgggccgccatgagaatgccatcaagtacctgggccaggattatgagcagctgcgggtgcgatgcctgcagagtgggaccctcttccgtgatgaggccttccccccggtaccccagagcctgggttacaaggacctgggtcccaattcctccaagacctatggcatcaagtggaagcgtcccacggaactgctgtcaaacccccagttcattgtggatggagctacccgcacagacatctgccagggagcactgggggactgctggctcttggcggccatcgcct

SEQ ID NO: 113566 - DNA, 573 bp, Homo sapiens
  Payload ID: 2196
  Gene Symbol: CAPN1
  Gene Name: calpain 1, (mu/I) large subunit
  ENST ID: ENST00000533909
  CDS Start-End: 129-573
cctgacaatgggatccgggaaaggagaggtggccggcacgcctgggaactgggaaatccctttcctggattcactgggagcaccgggaggtggctgagaaccctacttctgtgaggggagcagtgaggatgtcggaggagatcatcacgccggtgtactgcactggggtgtcagcccaagtgcagaagcagcgggccagggagctgggcctgggccgccatgagaatgccatcaagtacctgggccaggattatgagcagctgcgggtgcgatgcctgcagagtgggaccctcttccgtgatgaggccttccccccggtaccccagagcctgggttacaaggacctgggtcccaattcctccaagacctatggcatcaagtggaagcgtcccacggaactgctgtcaaacccccagttcattgtggatggagctacccgcacagacatctgccagggagcactgggggactgctggctcttggcggccatcgcctccctcactctcaacgacaccctcctgcaccgagtggttccgcacggccagagcttccagaatggctatgccggcatct

SEQ ID NO: 113567 - DNA, 3083 bp, Homo sapiens
  Payload ID: 2196
  Gene Symbol: CAPN1
  Gene Name: calpain 1, (mu/I) large subunit
  Uniprot ID: P07384
  ENST ID: ENST00000533820
  CDS Start-End: 219-2363
gaaagtcgggccgaacggggcagggacttacccaaggtcacgcagcgagcccggtccccctgcgttccccggggagcgctgagccgggacgcggcggtggggtggggaaggggagtggcgcggccctgcggggtgaggctgccgtttgctgagtgtccggcaggggtctgctcgctgccagcccggcccctcctcagagcagctgccgcagcccgaggatgtcggaggagatcatcacgccggtgtactgcactggggtgtcagcccaagtgcagaagcagcgggccagggagctgggcctgggccgccatgagaatgccatcaagtacctgggccaggattatgagcagctgcgggtgcgatgcctgcagagtgggaccctcttccgtgatgaggccttccccccggtaccccagagcctgggttacaaggacctgggtcccaattcctccaagacctatggcatcaagtggaagcgtcccacggaactgctgtcaaacccccagttcattgtggatggagctacccgcacagacatctgccagggagcactgggggactgctggctcttggcggccatcgcctccctcactctcaacgacaccctcctgcaccgagtggttccgcacggccagagcttccagaatggctatgccggcatcttccatttccagctgtggcaatttggggagtgggtggacgtggtcgtggatgacctgctgcccatcaaggacgggaagctagtgttcgtgcactctgccgaaggcaacgagttctggagcgccctgcttgagaaggcctatgccaaggtaaatggcagctacgaggccctgtcagggggcagcacctcagagggctttgaggacttcacaggcggggttaccgagtggtacgagttgcgcaaggctcccagtgacctctaccagatcatcctcaaggcgctggagcggggctccctgctgggctgctccatagacatctccagcgttctagacatggaggccatcactttcaagaagttggtgaagggccatgcctactctgtgaccggggccaagcaggtgaactaccgaggccaggtggtgagcctgatccggatgcggaacccctggggcgaggtggagtggacgggagcctggagcgacagctcctcagagtggaacaacgtggacccatatgaacgggaccagctccgggtcaagatggaggacggggagttctggatgtcattccgagacttcatgcgggagttcacccgcctggagatctgcaacctcacacccgacgccctcaagagccggaccatccgcaaatggaacaccacactctacgaaggcacctggcggcgggggagcaccgcggggggctgccgaaactacccagccaccttctgggtgaaccctcagttcaagatccggctggatgagacggatgacccggacgactacggggaccgcgagtcaggctgcagcttcgtgctcgcccttatgcagaagcaccgtcgccgcgagcgccgcttcggccgcgacatggagactattggcttcgcggtctacgaggtccctccggagctggtgggccagccggccgtacacttgaagcgtgacttcttcctggccaatgcgtctcgggcgcgctcagagcagttcatcaacctgcgagaggtcagcacccgcttccgcctgccacccggggagtatgtggtggtgccctccaccttcgagcccaacaaggagggcgacttcgtgctgcgcttcttctcagagaagagtgctgggactgtggagctggatgaccagatccaggccaatctccccgatgagcaagtgctctcagaagaggagattgacgagaacttcaaggccctcttcaggcagctggcaggggaggacatggagatcagcgtgaaggagttgcggacaatcctcaataggatcatcagcaaacacaaagacctgcggaccaagggcttcagcctagagtcgtgccgcagcatggtgaacctcatggatcgtgatggcaatgggaagctgggcctggtggagttcaacatcctgtggaaccgcatccggaattacctgtccatcttccggaagtttgacctggacaagtcgggcagcatgagtgcctacgagatgcggatggccattgagtcggcaggcttcaagctcaacaagaagctgtacgagctcatcatcacccgctactcggagcccgacctggcggtcgactttgacaatttcgtttgctgcctggtgcggctagagaccatgttccgatttttcaaaactctggacacagatctggatggagttgtgacctttgacttgtttaagtggttgcagctgaccatgtttgcatgaggcagggactcggtcccccttgccgtgctcccctccctcctcgtctgccaagcctcgcctcctaccacaccacaccaggccaccccagctgcaagtgccttccttggagcagagaggcagcctcgtcctcctgtcccctctcctcccagccaccatcgttcatctgctccgggcagaactgtgtggcccctgcctgtgccagccatgggctcgggatggactccctgggccccacccattgccaagccaggaaggcagctttcgcttgttcctgcctcgggacagccccgggtttccccagcatcctgatgtgtcccctctccccacttcagaggccacccactcagcaccaccggcctggccttgcctgcagactataaactataaccactagctcgacacagtctgcagtccaggcgtgtggagccgcctcccggctcggggaggccccggggctgggaacgcctgtgccttcctgcgccgaagccaacgccccctctgtccttccctggccctgctgccgaccaggagctgcccagcctgtgggcggtcggccttccctccttcgctccttttttatattagtgattttaaaggggactcttcagggacttgtgtactggttatgggggtgccagaggcactaggcttggggtggggaggtcccgtgttccatatagaggaaccccaaataataaaaggccccacatctgtctgtga

SEQ ID NO: 113568 - DNA, 571 bp, Homo sapiens
  Payload ID: 2196
  Gene Symbol: CAPN1
  Gene Name: calpain 1, (mu/I) large subunit
  ENST ID: ENST00000528396
  CDS Start-End: 82-571
acccttctctgtccctggacacctgcgcagaaagcctaggagctggttccacccatcactcaccaggttaggtatttcaggatgtcggaggagatcatcacgccggtgtactgcactggggtgtcagcccaagtgcagaagcagcgggccagggagctgggcctgggccgccatgagaatgccatcaagtacctgggccaggattatgagcagctgcgggtgcgatgcctgcagagtgggaccctcttccgtgatgaggccttccccccggtaccccagagcctgggttacaaggacctgggtcccaattcctccaagacctatggcatcaagtggaagcgtcccacggaactgctgtcaaacccccagttcattgtggatggagctacccgcacagacatctgccagggagcactgggggactgctggctcttggcggccatcgcctccctcactctcaacgacaccctcctgcaccgagtggttccgcacggccagagcttccagaatggctatgccggcatcttccatttccagctgtggcaatttggggagtgggtggacgtggtcg

SEQ ID NO: 113569 - DNA, 754 bp, Homo sapiens
  Payload ID: 2196
  Gene Symbol: CAPN1
  Gene Name: calpain 1, (mu/I) large subunit
  ENST ID: ENST00000526954
  CDS Start-End: 16-621
cacccctcccccaggatgtcggaggagatcatcacgccggtgtactgcactggggtgtcagcccaagtgcagaagcagcgggccagggagctgggcctgggccgccatgagaatgccatcaagtacctgggccaggattatgagcagctgcgggtgcgatgcctgcagagtgggaccctcttccgtgatgaggccttccccccggtaccccagagcctgggttacaaggacctgggtcccaattcctccaagacctatggcatcaagtggaagcgtcccacggaactgctgtcaaacccccagttcattgtggatggagctacccgcacagacatctgccagggagcactgggggactgctggctcttggcggccatcgcctccctcactctcaacgacaccctcctgcaccgagtggttccgcacggccagagcttccagaatggctatgccggcatcttccatttccagctgtggcaatttggggagtgggtggacgtggtcgtggatgacctgctgcccatcaaggacgggaagctagtgttcgtgcactctgccgaaggcaacgagttctggagcgccctgcttgagaaggcctatgccaaatctccagcgttctagacatggaggccatcactttcaagaagttggtgaagggccatgcctactctgtgaccggggccaagcaggtgaactaccgaggccaggtggtgagcctgatccggatgcggaacccctggggcgaggtggagtg

SEQ ID NO: 113570 - DNA, 568 bp, Homo sapiens
  Payload ID: 2196
  Gene Symbol: CAPN1
  Gene Name: calpain 1, (mu/I) large subunit
  ENST ID: ENST00000532285
  CDS Start-End: 380-568
cttcctggttgggccctgccctgagctgccaccgggaagccagcctcagggactgcagcgacccccaaacacccctcccccaggtaagaagctgggtagccgagccgggattccttgaccctggccactgctcctgggctgaggggctgccccagcacggtcccttctcgggggcctctgcgttcctggagcaggggtgggggctggcggagcggcacagcccaggcgcctgtcccagcctggctcaccgctgtccccaggggctgggctagggcccaccagctctgatatcgagcctgctgcgggggcctgaggagggggaccccgaccgtctggggttttcagcccacggcaaggggccggtgcaccaggagcttggatgtcggaggagatcatcacgccggtgtactgcactggggtgtcagcccaagtgcagaagcagcgggccagggagctgggcctgggccgccatgagaatgccatcaagtacctgggccaggattatgagcagctgcgggtgcgatgcctgcagagtgggaccctcttccgtgatgaggccttccccccg

SEQ ID NO: 113571 - DNA, 2453 bp, Homo sapiens
  Payload ID: 2197
  Gene Symbol: CAPN10
  Gene Name: calpain 10
  Uniprot ID: Q9HC96
  ENST ID: ENST00000270361
  CDS Start-End: 42-866
ccgaggcaaccggctgcagatgggagcccgcggagccgaggatgcgggcgggccggggcgcgacgccggcgagggagctgttccgggacgccgccttccccgccgcggactcctcgctcttctgcgacttgtctacgccgctggcccagttccgcgaggacatcacgtggaggcggccccaggagatttgtgccacaccccggctgtttccagatgacccacgggaagggcaggtgaagcaggggctgctgggggattgctggttcctgtgtgcctgcgccgcgctgcagaagagcaggcacctcctggaccaggtcattcctccgggacagccgagctgggccgaccaggagtaccggggctccttcacctgtcgcatttggcagtttggacgctgggtggaggtgaccacagatgaccgcctgccgtgccttgcagggagactctgtttctcccgctgccagagggaggatgtgttctggctccccttactggaaaagggtccatgggtcctacgagcacctgtgggccgggcaggtggcggatgccctggtggacctgaccggcggcctggcagaaagatggaacctgaagggcgtagcaggaagcggaggccagcaggacaggccaggccgctgggagcacaggacttgtcggcagctgctccacctgaaggaccagtgtctgatcagctgctgcgtgctcagccccagagcaggtgcccgggagctgggggagttccatgccttcattgtctcggacctgcgggagctccagggtcaggcgggccagtgcatcctgctgctgcggatccagaacccctggggccggcggtgctggcaggggctctggagagaggggggtgaagggtggagccaggtagatgcagcggtagcatctgagctcctgtcccagctccaggaaggggagttctgggtggaggaggaggagttcctcagggagtttgacgagctcaccgttggctacccggtcacggaggccggccacctgcagagcctctacacagagaggctgctctgccatacgcgggcgctgcctggggcctgggtcaagggccagtcagcaggaggctgccggaacaacagcggctttcccagcaaccccaaattctggctgcgggtctcagaaccgagtgaggtgtacattgccgtcctgcagagatccaggctgcacgcggcggactgggcaggccgggcccgggcactggtgggtgacagtcatacttcgtggagcccagcgagcatcccgggcaagcactaccaggctgtgggtctgcacctctggaaggtagagaagcggcgggtcaatctgcctagggtcctgtccatgccccccgtggctggcaccgcgtgccatgcatacgaccgggaggtccacctgcgttgtgagctctcaccgggctactacctggctgtccccagcaccttcctgaaggacgcgccaggggagttcctgctccgagtcttctctaccgggcgagtctcccttagcgccatcagggcagtggccaagaacaccacccccggggcagccctgcctgcgggggagtgggggaccgtgcagctacggggttcttggagagtcggccagacggcggggggcagcaggaactttgcctcataccccaccaacccctgcttccccttctcggtccccgagggccctggcccccgctgcgtccgcatcactctgcatcagcactgccggcccagtgacaccgagttccaccccatcggcttccatatcttccaggtcccagagggtggaaggagccaggacgcacccccactgctgctgcaggagccgctgctgagctgcgtgccacatcgctacgcccaggaggtgagccggctctgcctcctgcctgcgggcacctacaaggttgtgccctccacctacctgccggacacagagggggccttcacagtgaccatcgcaaccaggattgacaggccatccattcacagccaggagatgctgggccagttcctccaagaggtctccatcatggcagtgatgaaaacctaacagggtggccccctgtgccagctcaggtgactggagcccgagggcctgacaggttcccagcagctgggccggccagccttgcactgtgggggctggtcctgagtcttggcctgcctcccagccctgccaggaggctgcggcctaggggtccacgggaagcctccgtcaggagagacgcagccctgggggccagctggtgctgcaaggaagggtgggaagcttgctggcttctgttgcgccactgagacggcagagaccccaggatcccagagcttcccaggatccctcccagatcctctgctgactccatatggaggcctcacacccagagggtagggcagcagatcttctttataactatttattgttcgaatcacttttaggatgtaactttataaataaac

SEQ ID NO: 113572 - DNA, 1999 bp, Homo sapiens
  Payload ID: 2197
  Gene Symbol: CAPN10
  Gene Name: calpain 10
  Uniprot ID: Q9HC96
  ENST ID: ENST00000354082
  CDS Start-End: 42-1595
ccgaggcaaccggctgcagatgggagcccgcggagccgaggatgcgggcgggccggggcgcgacgccggcgagggagctgttccgggacgccgccttccccgccgcggactcctcgctcttctgcgacttgtctacgccgctggcccagttccgcgaggacatcacgtggaggcggccccaggagatttgtgccacaccccggctgtttccagatgacccacgggaagggcaggtgaagcaggggctgctgggggattgctggttcctgtgtgcctgcgccgcgctgcagaagagcaggcacctcctggaccaggtcattcctccgggacagccgagctgggccgaccaggagtaccggggctccttcacctgtcgcatttggcagtttggacgctgggtggaggtgaccacagatgaccgcctgccgtgccttgcagggagactctgtttctcccgctgccagagggaggatgtgttctggctccccttactggaaaaggtctacgccaaggtccatgggtcctacgagcacctgtgggccgggcaggtggcggatgccctggtggacctgaccggcggcctggcagaaagatggaacctgaagggcgtagcaggaagcggaggccagcaggacaggccaggccgctgggagcacaggacttgtcggcagctgctccacctgaaggaccagtgtctgatcagctgctgcgtgctcagccccagagcaggtgcccgggagctgggggagttccatgccttcattgtctcggacctgcgggagctccagggtcaggcgggccagtgcatcctgctgctgcggatccagaacccctggggccggcggtgctggcaggggctctggagagaggggggtgaagggtggagccaggtagatgcagcggtagcatctgagctcctgtcccagctccaggaaggggagttctgggtggaggaggaggagttcctcagggagtttgacgagctcaccgttggctacccggtcacggaggccggccacctgcagagcctctacacagagaggctgctctgccatacgcgggcgctgcctggggcctgggtcaagggccagtcagcaggaggctgccggaacaacagcggctttcccagcaaccccaaattctggctgcgggtctcagaaccgagtgaggtgtacattgccgtcctgcagagatccaggctgcacgcggcggactgggcaggccgggcccgggcactggtgggtgacagtcatacttcgtggagcccagcgagcatcccgggcaagcactaccaggctgtgggtctgcacctctggaaggtcccagagggtggaaggagccaggacgcacccccactgctgctgcaggagccgctgctgagctgcgtgccacatcgctacgcccaggaggtgagccggctctgcctcctgcctgcgggcacctacaaggttgtgccctccacctacctgccggacacagagggggccttcacagtgaccatcgcaaccaggattgacaggccatccattcacagccaggagatgctgggccagttcctccaagaggtctccatcatggcagtgatgaaaacctaacagggtggccccctgtgccagctcaggtgactggagcccgagggcctgacaggttcccagcagctgggccggccagccttgcactgtgggggctggtcctgagtcttggcctgcctcccagccctgccaggaggctgcggcctaggggtccacgggaagcctccgtcaggagagacgcagccctgggggccagctggtgctgcaaggaagggtgggaagcttgctggcttctgttgcgccactgagacggcagagaccccaggatcccagagcttcccaggatccctcccagatcctctgctgactccatatggaggcctcacacccagagggtagggcagcagatcttctttataactatttattgttcgaatcacttttaggatgtaactttataaataaac

SEQ ID NO: 113573 - DNA, 1267 bp, Homo sapiens
  Payload ID: 2197
  Gene Symbol: CAPN10
  Gene Name: calpain 10
  Uniprot ID: Q9HC96
  ENST ID: ENST00000270364
  CDS Start-End: 141-560
gcggggccctcgggcttggagggctgggccgggcggggaacgggcggggcgggccggaggcggcggcggctgactcgccttctctccggggctgcgaccccgaggcaaccggctgcagatgggagcccgcggagccgaggatgcgggcgggccggggcgcgacgccggcgagggagctgttccgggacgccgccttccccgccgcggactcctcgctcttctgcgacttgtctacgccgctggcccagttccgcgaggacatcacgtggaggcggccccaggagatttgtgccacaccccggctgtttccagatgacccacgggaagggcaggtgaagcaggggctgctgggggattgctggttcctgtgtgcctgcgccgcgctgcagaagagcaggcacctcctggaccaggtctcttgccctgtgcagcttcctgcagactggacttgcaaagtccagcctgtatggctggagttcccatgcctgccaatctcctgtcgactgcgagtcagctccgatacttcaccagattcagccacctgggggagctggaagtgaatctcatcttagctgagccttctgatgagactgcagccccagctgacacctggattgcagactcatgaaagacctgaaactctaccaacagccacctgggggagctggaagtgaatctcctcgtagctgagccttctgatgagactgcagccccggctgacacctggattgcagactcatgaaagacctgaaactctaccaacagccacctgggggagctggaagtgaatctcctcgtagctgagccttctgatgagactgcagccccggctgacacctggattgcagactcatgaaagaccctgagcagaggacccagtttggcagagcccgaattcctgacccacaggaactgggagataaaactctgtggttttaatcttctcattttagaggtaatttttttgtgtagcaataggtagctgacaatgcacagctaaaataatagataattaaccctaatgctagtttcattcatccatcagggtttgcaaagtagtgatattctacttctgtcttccttcattatttattagcagaaatgtatctataaaaagaagtgttccttcattaactctttggtcatgttgaggtacagtttgcataggaaaggcagggcaaatgcttgattctttcccttcctttcctcatttataaaataatgaactgttttcctggcatctttcaacaatgactaatgagttttt

SEQ ID NO: 113574 - DNA, 862 bp, Homo sapiens
  Payload ID: 2197
  Gene Symbol: CAPN10
  Gene Name: calpain 10
  Uniprot ID: Q9HC96
  ENST ID: ENST00000352879
  CDS Start-End: 42-458
ccgaggcaaccggctgcagatgggagcccgcggagccgaggatgcgggcgggccggggcgcgacgccggcgagggagctgttccgggacgccgccttccccgccgcggactcctcgctcttctgcgacttgtctacgccgctggcccagttccgcgaggacatcacgtggaggcggccccaggtcccagagggtggaaggagccaggacgcacccccactgctgctgcaggagccgctgctgagctgcgtgccacatcgctacgcccaggaggtgagccggctctgcctcctgcctgcgggcacctacaaggttgtgccctccacctacctgccggacacagagggggccttcacagtgaccatcgcaaccaggattgacaggccatccattcacagccaggagatgctgggccagttcctccaagaggtctccatcatggcagtgatgaaaacctaacagggtggccccctgtgccagctcaggtgactggagcccgagggcctgacaggttcccagcagctgggccggccagccttgcactgtgggggctggtcctgagtcttggcctgcctcccagccctgccaggaggctgcggcctaggggtccacgggaagcctccgtcaggagagacgcagccctgggggccagctggtgctgcaaggaagggtgggaagcttgctggcttctgttgcgccactgagacggcagagaccccaggatcccagagcttcccaggatccctcccagatcctctgctgactccatatggaggcctcacacccagagggtagggcagcagatcttctttataactatttattgttcgaatcacttttaggatgtaactttataaataaac

SEQ ID NO: 113575 - DNA, 2202 bp, Homo sapiens
  Payload ID: 2197
  Gene Symbol: CAPN10
  Gene Name: calpain 10
  Uniprot ID: Q9HC96
  ENST ID: ENST00000357048
  CDS Start-End: 42-1583
ccgaggcaaccggctgcagatgggagcccgcggagccgaggatgcgggcgggccggggcgcgacgccggcgagggagctgttccgggacgccgccttccccgccgcggactcctcgctcttctgcgacttgtctacgccgctggcccagttccgcgaggacatcacgtggaggcggccccaggagatttgtgccacaccccggctgtttccagatgacccacgggaagggcaggtgaagcaggggctgctgggggattgctggttcctgtgtgcctgcgccgcgctgcagaagagcaggcacctcctggaccaggtcattcctccgggacagccgagctgggccgaccaggagtaccggggctccttcacctgtcgcatttggcagtttggacgctgggtggaggtgaccacagatgaccgcctgccgtgccttgcagggagactctgtttctcccgctgccagagggaggatgtgttctggctccccttactggaaaaggtctacgccaaggtccatgggtcctacgagcacctgtgggccgggcaggtggcggatgccctggtggacctgaccggcggcctggcagaaagatggaacctgaagggcgtagcaggaagcggaggccagcaggacaggccaggccgctgggagcacaggacttgtcggcagctgctccacctgaaggaccagtgtctgatcagctgctgcgtgctcagccccagagcaggtgcccgggagctgggggagttccatgccttcattgtctcggacctgcgggagctccagggtcaggcgggccagtgcatcctgctgctgcggatccagaacccctggggccggcggtgctggcaggggctctggagagaggggggtgaagggtggagccaggtagatgcagcggtagcatctgagctcctgtcccagctccaggaaggggagttctgggtggaggaggaggagttcctcagggagtttgacgagctcaccgttggctacccggtcacggaggccggccacctgcagagcctctacacagagaggctgctctgccatacgcgggcgctgcctggggcctgggtcaagggccagtcagcaggaggctgccggaacaacagcggctttcccagcaaccccaaattctggctgcgggtctcagaaccgagtgaggtgtacattgccgtcctgcagagatccaggctgcacgcggcggactgggcaggccgggcccgggcactggtgggtgacagtcatacttcgtggagcccagcgagcatcccgggcaagcactaccaggctgtgggtctgcacctctggaaggtagagaagcggcgggtcaatctgcctagggtcctgtccatgccccccgtggctggcaccgcgtgccatgcatacgaccgggaggtccacctgcgttgtgagctctcaccgggctactacctggctgtccccagcaccttcctgaaggacgcgccaggggagttcctgctccgagtcttctctaccgggcgagtctcccttaggtcccagagggtggaaggagccaggacgcacccccactgctgctgcaggagccgctgctgagctgcgtgccacatcgctacgcccaggaggtgagccggctctgcctcctgcctgcgggcacctacaaggttgtgccctccacctacctgccggacacagagggggccttcacagtgaccatcgcaaccaggattgacaggccatccattcacagccaggagatgctgggccagttcctccaagaggtctccatcatggcagtgatgaaaacctaacagggtggccccctgtgccagctcaggtgactggagcccgagggcctgacaggttcccagcagctgggccggccagccttgcactgtgggggctggtcctgagtcttggcctgcctcccagccctgccaggaggctgcggcctaggggtccacgggaagcctccgtcaggagagacgcagccctgggggccagctggtgctgcaaggaagggtgggaagcttgctggcttctgttgcgccactgagacggcagagaccccaggatcccagagcttcccaggatccctcccagatcctctgctgactccatatggaggcctcacacccagagggtagggcagcagatcttctttataactatttattgttcgaatcacttttaggatgtaactttataaataaac

SEQ ID NO: 113576 - DNA, 2320 bp, Homo sapiens
  Payload ID: 2197
  Gene Symbol: CAPN10
  Gene Name: calpain 10
  Uniprot ID: Q9HC96
  ENST ID: ENST00000391983
  CDS Start-End: 42-1676
ccgaggcaaccggctgcagatgggagcccgcggagccgaggatgcgggcgggccggggcgcgacgccggcgagggagctgttccgggacgccgccttccccgccgcggactcctcgctcttctgcgacttgtctacgccgctggcccagttccgcgaggacatcacgtggaggcggccccaggagatttgtgccacaccccggctgtttccagatgacccacgggaagggcaggtgaagcaggggctgctgggggattgctggttcctgtgtgcctgcgccgcgctgcagaagagcaggcacctcctggaccaggtcattcctccgggacagccgagctgggccgaccaggagtaccggggctccttcacctgtcgcatttggcagtttggacgctgggtggaggtgaccacagatgaccgcctgccgtgccttgcagggagactctgtttctcccgctgccagagggaggatgtgttctggctccccttactggaaaaggtctacgccaaggtccatgggtcctacgagcacctgtgggccgggcaggtggcggatgccctggtggacctgaccggcggcctggcagaaagatggaacctgaagggcgtagcaggaagcggaggccagcaggacaggccaggccgctgggagcacaggacttgtcggcagctgctccacctgaaggaccagtgtctgatcagctgctgcgtgctcagccccagagcaggtgcccgggagctgggggagttccatgccttcattgtctcggacctgcgggagctccagggtcaggcgggccagtgcatcctgctgctgcggatccagaacccctggggccggcggtgctggcaggggctctggagagaggggggtgaagggtggagccaggtagatgcagcggtagcatctgagctcctgtcccagctccaggaaggggagttctgggtggaggaggaggagttcctcagggagtttgacgagctcaccgttggctacccggtcacggaggccggccacctgcagagcctctacacagagaggctgctctgccatacgcgggcgctgcctggggcctgggtcaagggccagtcagcaggaggctgccggaacaacagcggctttcccagcaaccccaaattctggctgcgggtctcagaaccgagtgaggtgtacattgccgtcctgcagagatccaggctgcacgcggcggactgggcaggccgggcccgggcactggtgggtgacagtcatacttcgtggagcccagcgagcatcccgggcaagcactaccaggctgtgggtctgcacctctggaaggtagagaagcggcgggtcaatctgcctagggtcctgtccatgccccccgtggctggcaccgcgtgccatgcatacgaccgggaggtccacctgcgttgtgagctctcaccgggctactacctggctgtccccagcaccttcctgaaggacgcgccaggggagttcctgctccgagtcttctctaccgggcgagtctcccttagggccctggcccccgctgcgtccgcatcactctgcatcagcactgccggcccagtgacaccgagttccaccccatcggcttccatatcttccaggtcccagagggtggaaggagccaggacgcacccccactgctgctgcaggagccgctgctgagctgcgtgccacatcgctacgcccaggaggtgagccggctctgcctcctgcctgcgggcacctacaaggttgtgccctccacctacctgccggacacagagggggccttcacagtgaccatcgcaaccaggattgacaggccatccattcacagccaggagatgctgggccagttcctccaagaggtctccatcatggcagtgatgaaaacctaacagggtggccccctgtgccagctcaggtgactggagcccgagggcctgacaggttcccagcagctgggccggccagccttgcactgtgggggctggtcctgagtcttggcctgcctcccagccctgccaggaggctgcggcctaggggtccacgggaagcctccgtcaggagagacgcagccctgggggccagctggtgctgcaaggaagggtgggaagcttgctggcttctgttgcgccactgagacggcagagaccccaggatcccagagcttcccaggatccctcccagatcctctgctgactccatatggaggcctcacacccagagggtagggcagcagatcttctttataactatttattgttcgaatcacttttaggatgtaactttataaataaacatgagcgctgatgatttgcagatca

SEQ ID NO: 113577 - DNA, 2644 bp, Homo sapiens
  Payload ID: 2197
  Gene Symbol: CAPN10
  Gene Name: calpain 10
  Uniprot ID: Q9HC96
  ENST ID: ENST00000391984
  CDS Start-End: 197-2215
cgcctggttaccaatgggagactagcgggccggcgtactggcctggtccagcacctgcggggccctcgggcttggagggctgggccgggcggggaacgggcggggcgggccggaggcggcggcggctgactcgccttctctccggggctgcgaccccgaggcaaccggctgcagatgggagcccgcggagccgaggatgcgggcgggccggggcgcgacgccggcgagggagctgttccgggacgccgccttccccgccgcggactcctcgctcttctgcgacttgtctacgccgctggcccagttccgcgaggacatcacgtggaggcggccccaggagatttgtgccacaccccggctgtttccagatgacccacgggaagggcaggtgaagcaggggctgctgggggattgctggttcctgtgtgcctgcgccgcgctgcagaagagcaggcacctcctggaccaggtcattcctccgggacagccgagctgggccgaccaggagtaccggggctccttcacctgtcgcatttggcagtttggacgctgggtggaggtgaccacagatgaccgcctgccgtgccttgcagggagactctgtttctcccgctgccagagggaggatgtgttctggctccccttactggaaaaggtctacgccaaggtccatgggtcctacgagcacctgtgggccgggcaggtggcggatgccctggtggacctgaccggcggcctggcagaaagatggaacctgaagggcgtagcaggaagcggaggccagcaggacaggccaggccgctgggagcacaggacttgtcggcagctgctccacctgaaggaccagtgtctgatcagctgctgcgtgctcagccccagagcaggtgcccgggagctgggggagttccatgccttcattgtctcggacctgcgggagctccagggtcaggcgggccagtgcatcctgctgctgcggatccagaacccctggggccggcggtgctggcaggggctctggagagaggggggtgaagggtggagccaggtagatgcagcggtagcatctgagctcctgtcccagctccaggaaggggagttctgggtggaggaggaggagttcctcagggagtttgacgagctcaccgttggctacccggtcacggaggccggccacctgcagagcctctacacagagaggctgctctgccatacgcgggcgctgcctggggcctgggtcaagggccagtcagcaggaggctgccggaacaacagcggctttcccagcaaccccaaattctggctgcgggtctcagaaccgagtgaggtgtacattgccgtcctgcagagatccaggctgcacgcggcggactgggcaggccgggcccgggcactggtgggtgacagtcatacttcgtggagcccagcgagcatcccgggcaagcactaccaggctgtgggtctgcacctctggaaggtagagaagcggcgggtcaatctgcctagggtcctgtccatgccccccgtggctggcaccgcgtgccatgcatacgaccgggaggtccacctgcgttgtgagctctcaccgggctactacctggctgtccccagcaccttcctgaaggacgcgccaggggagttcctgctccgagtcttctctaccgggcgagtctcccttagcgccatcagggcagtggccaagaacaccacccccggggcagccctgcctgcgggggagtgggggaccgtgcagctacggggttcttggagagtcggccagacggcggggggcagcaggaactttgcctcataccccaccaacccctgcttccccttctcggtccccgagggccctggcccccgctgcgtccgcatcactctgcatcagcactgccggcccagtgacaccgagttccaccccatcggcttccatatcttccaggtcccagagggtggaaggagccaggacgcacccccactgctgctgcaggagccgctgctgagctgcgtgccacatcgctacgcccaggaggtgagccggctctgcctcctgcctgcgggcacctacaaggttgtgccctccacctacctgccggacacagagggggccttcacagtgaccatcgcaaccaggattgacaggccatccattcacagccaggagatgctgggccagttcctccaagaggtctccatcatggcagtgatgaaaacctaacagggtggccccctgtgccagctcaggtgactggagcccgagggcctgacaggttcccagcagctgggccggccagccttgcactgtgggggctggtcctgagtcttggcctgcctcccagccctgccaggaggctgcggcctaggggtccacgggaagcctccgtcaggagagacgcagccctgggggccagctggtgctgcaaggaagggtgggaagcttgctggcttctgttgcgccactgagacggcagagaccccaggatcccagagcttcccaggatccctcccagatcctctgctgactccatatggaggcctcacacccagagggtagggcagcagatcttctttataactatttattgttcgaatcacttttaggatgtaactttataaataaacatgagcgctgatgatttgcagatca

SEQ ID NO: 113578 - DNA, 2570 bp, Homo sapiens
  Payload ID: 2197
  Gene Symbol: CAPN10
  Gene Name: calpain 10
  ENST ID: ENST00000404753
  CDS Start-End: 174-2135
agcgggccggcgtactggcctggtccagcacctgcggggccctcgggcttggagggctgggccgggcggggaacgggcggggcgggccggaggcggcggcggctgactcgccttctctccggggctgcgaccccgaggcaaccggctgcagatgggagcccgcggagccgaggatgcgggcgggccggggcgcgacgccggcgagggagctgttccgggacgccgccttccccgccgcggactcctcgctcttctgcgacttgtctacgccgctggcccagttccgcgaggacatcacgtggaggcggccccaggagatttgtgccacaccccggctgtttccagatgacccacgggaagggcaggtgaagcaggggctgctgggggattgctggttcctgtgtgcctgcgccgcgctgcagaagagcaggcacctcctggaccaggtcattcctccgggacagccgagctgggccgaccaggagtaccggggctccttcacctgtcgcatttggcagtttggacgctgggtggaggtgaccacagatgaccgcctgccgtgccttgcagggagactctgtttctcccgctgccagagggaggatgtgttctggctccccttactggaaaaggtctacgccaaggtccatgggtcctacgagcacctgtgggccgggcaggtggcggatgccctggtggacctgaccggcggcctggcagaaagatggaacctgaagggcgtagcaggaagcggaggccagcaggacaggccaggccgctgggagcacaggacttgtcggcagctgctccacctgaaggaccagtgtctgatcagctgctgcgtgctcagccccagagcaggtgcccgggagctgggggagttccatgccttcattgtctcggacctgcgggagctccagggtcaggcgggccagtgcatcctgctgctgcggatccagaacccctggggccggcggtgctggcaggggctctggagagaggggggtgaagggtggagccaggtagatgcagcggtagcatctgagctcctgtcccagctccaggaaggggagttctgggtggaggaggaggagttcctcagggagtttgacgagctcaccgttggctacccggtcacggaggccggccacctgcagagcctctacacagagaggctgctctgccatacgcgggcgctgcctggggcctgggtcaagggccagtcagcaggaggctgccggaacaacagcggctttcccagcaaccccaaattctggctgcgggtctcagaaccgagtgaggtgtacattgccgtcctgcagagatccaggctgcacgcggcggactgggcaggccgggcccgggcactggtgggtgacagtcatacttcgtggagcccagcgagcatcccgggcaagcactaccaggctgtgggtctgcacctctggaaggtagagaagcggcgggtcaatctgcctagggtcctgtccatgccccccgtggctggcaccgcgtgccatgcatacgaccgggaggtccacctgcgttgtgagctctcaccgggctactacctggctgtccccagcaccttcctgaaggacgcgccaggggagttcctgctccgagtcttctctaccgggcgagtctcccttagcgccatcagggcagtggccaagaacaccacccccggggcagccctgcctgcgggggagtgggggaccgtgcagctacggggttcttggagagtcggccagacggcggggggcagcaggaactttgcctcataccccaccaacccctgcttccccttctcggtccccgagggccctggcccccgctgcgtccgcatcactctgcatcagcactgccggcccagtgacaccgagttccaccccatcggcttccatatcttccaggtcccagagggtggaaggagccaggacgcacccccactgctgctgcaggagccgctgctgagctgcgtgccacatcgctacgcccaggaggtgagccggctctgcctcctgcctgcgggcacctacaaggttgtgccctccacctacctgccggacacagagggggccttcacagtgaccatcgcaaccaggattgacaggtctccatcatggcagtgatgaaaacctaacagggtggccccctgtgccagctcaggtgactggagcccgagggcctgacaggttcccagcagctgggccggccagccttgcactgtgggggctggtcctgagtcttggcctgcctcccagccctgccaggaggctgcggcctaggggtccacgggaagcctccgtcaggagagacgcagccctgggggccagctggtgctgcaaggaagggtgggaagcttgctggcttctgttgcgccactgagacggcagagaccccaggatcccagagcttcccaggatccctcccagatcctctgctgactccatatggaggcctcacacccagagggtagggcagcagatcttctttataactatttattgttcgaatcacttttaggatgtaactttataaataaacatgagcgctgatgatttgca

SEQ ID NO: 113579 - DNA, 2514 bp, Homo sapiens
  Payload ID: 2197
  Gene Symbol: CAPN10
  Gene Name: calpain 10
  Uniprot ID: Q9HC96
  ENST ID: ENST00000416591
  CDS Start-End: 42-1376
ccgaggcaaccggctgcagatgggagcccgcggagccgaggatgcgggcgggccggggcgcgacgccggcgagggagctgttccgggacgccgccttccccgccgcggactcctcgctcttctgcgacttgtctacgccgctggcccagttccgcgaggacatcacgtggaggcggccccaggagatttgtgccacaccccggctgtttccagatgacccacgggaagggcaggtgaagcaggggctgctgggggattgctggttcctgtgtgcctgcgccgcgctgcagaagagcaggcacctcctggaccaggtcattcctccgggacagccgagctgggccgaccaggagtaccggggctccttcacctgtcgcatttggcagtttggacgctgggtggaggtgaccacagatgaccgcctgccgtgccttgcagggagactctgtttctcccgctgccagagggaggatgtgttctggctccccttactggaaaaggtctacgccaaggtccatgggtcctacgagcacctgtgggccgggcaggtggcggatgccctggtggacctgaccggcggcctggcagaaagatggaacctgaagggcgtagcaggaagcggaggccagcaggacaggccaggccgctgggagcacaggacttgtcggcagctgctccacctgaaggaccagtgtctgatcagctgctgcgtgctcagccccagagcaggtgcccgggagctgggggagttccatgccttcattgtctcggacctgcgggagctccagggtcaggcgggccagtgcatcctgctgctgcggatccagaacccctggggccggcggtgctggcaggggctctggagagaggggggtgaagggtggagccaggtagatgcagcggtagcatctgagctcctgtcccagctccaggaaggggagttctgggtggaggaggaggagttcctcagggagtttgacgagctcaccgttggctacccggtcacggaggccggccacctgcagagcctctacacagagaggctgctctgccatacgcgggcgctgcctggggcctgggtcaagggccagtcagcaggaggctgccggaacaacagcggctttcccagcaaccccaaattctggctgcgggtctcagaaccgagtgaggtgtacattgccgtcctgcagagatccaggctgcacgcggcggactgggcaggccgggcccgggcactggtgggtgacagtcatacttcgtggagcccagcgagcatcccgggcaagcactaccaggctgtgggtctgcacctctggaagggtgtgacacttggcaccacactgttccctgtcccttcatggatgtggcccacatgatgttcctttcctcttgcaaaagaagttgctggaaggcccactgtccagcagcccccaggttgcctgggccacggtgcctttgtgggcccagctacaaggaggacttgcaggctcgtgtctgggacagatactggcgccagggccaagtgaagcccgggattggtagagaagcggcgggtcaatctgcctagggtcctgtccatgccccccgtggctggcaccgcgtgccatgcatacgaccgggaggtccacctgcgttgtgagctctcaccgggctactacctggctgtccccagcaccttcctgaaggacgcgccaggggagttcctgctccgagtcttctctaccgggcgagtctcccttagggccctggcccccgctgcgtccgcatcactctgcatcagcactgccggcccagtgacaccgagttccaccccatcggcttccatatcttccaggtcccagagggtggaaggagccaggacgcacccccactgctgctgcaggagccgctgctgagctgcgtgccacatcgctacgcccaggaggtgagccggctctgcctcctgcctgcgggcacctacaaggttgtgccctccacctacctgccggacacagagggggccttcacagtgaccatcgcaaccaggattgacaggccatccattcacagccaggagatgctgggccagttcctccaagaggtctccatcatggcagtgatgaaaacctaacagggtggccccctgtgccagctcaggtgactggagcccgagggcctgacaggttcccagcagctgggccggccagccttgcactgtgggggctggtcctgagtcttggcctgcctcccagccctgccaggaggctgcggcctaggggtccacgggaagcctccgtcaggagagacgcagccctgggggccagctggtgctgcaaggaagggtgggaagcttgctggcttctgttgcgccactgagacggcagagaccccaggatcccagagcttcccaggatccctcccagatcctctgctgactccatatggaggcctcacacccagagggtagggcagcagatcttctttataactatttattgttcgaatcacttttaggatgtaactttataaataaac

SEQ ID NO: 113580 - DNA, 706 bp, Homo sapiens
  Payload ID: 2197
  Gene Symbol: CAPN10
  Gene Name: calpain 10
  ENST ID: ENST00000426297
  CDS Start-End: 1-140
cctccacctacctgccggacacagagggggccttcacagtgaccatcgcaaccaggattgacaggccatccattcacagccaggagatgctgggccagttcctccaagaggtctccatcatggcagtgatgaaaacctaacagggtggccccctgtgccagctcagctgacatgggctcattgctccttctccaagccctctgaggacatcaaaagcgtggacgcatcactttccaccatcttgctgcccactgtccctccatcctgaggcctcctaagcacatgtgtggggtggcaggcacactgctgatagctgtggatgcggccgtgacatccttcacccctgcccccatggcatgcatgatccattagggaggaccgtctgcacaaaggatctcactctgtttgtccaggctgaagtccagtggcaggatttcagctcactgcagcctcaacctcctgggctcaggtgattctcccaccttagcctcccgagtagctgggactacaagcacagatcaccacacctggctaattttttgcatttttgttttttagtagaaacagggtttcgctatgttgcccaggctagtctcaaacgcctggactccaacaatccacccaccttggcctcccggagtgctgggattataggctggggccactgtgctgaaccctgtccatttatttggatcttctttaattt

SEQ ID NO: 113581 - DNA, 638 bp, Homo sapiens
  Payload ID: 2197
  Gene Symbol: CAPN10
  Gene Name: calpain 10
  ENST ID: ENST00000432084
  CDS Start-End: 1-258
ctggaaaaggtctacgccaaggtccatgggtcctacgagcacctgtgggccgggcaggtggcggatgccctggtggacctgaccggcggcctggcagaaagatggaacctgaagggcgtagcaggaagcggaggccagcaggacaggccaggccgctgggagcacaggacttgtcggcagctgctccacctgaaggaccagtgtctgatcagctgctgcgtgctcagccccagagcagtgatagataacattcgttaaaaacagtttgtctccaaaaaatgaaaggggccaggtgtggtggctcacacctgtaatcccagaactttgggaggctgaggtgggagtatcgctggagcccaggagttcaagagacccgcctgggcaacatggcaagatctcatctctacaaaaaatgaaggaaaaaaatcacttagatggaaccacatgtgacttttgagtgcgctctcagttttccatgagcacgcacggtttacgtgttcccttccgcaccgcttctcacactgccacacacgcgctgtcaaatgttcgccccatgagcgggtttgccacagtctcttaatcattcccctgatgttggatattaagatctctctggttttatataattataagcagta

SEQ ID NO: 113582 - DNA, 2728 bp, Homo sapiens
  Payload ID: 2198
  Gene Symbol: CAPN11
  Gene Name: calpain 11
  Uniprot ID: Q9UMQ6
  ENST ID: ENST00000398776
  CDS Start-End: 39-2258
agaaccttcaactgtcaagcaccgagctagccaccagcatgctgtactccccagggccgagtcttccggagtcagcagagagcctggatggatcacaggaggataagcctcggggctcatgtgcggagcccacttttactgatacgggaatggtggctcacataaacaacagccggctcaaggccaagggcgtgggccagcacgacaacgcccagaactttggtaaccagagctttgaggagctgcgagcagcctgtctaagaaagggggagctcttcgaggaccccttattccctgctgaacccagctcactgggcttcaaggacctgggccccaactccaaaaatgtgcagaacatctcctggcagcggcccaaggatatcataaacaaccctctattcatcatggatgggatttctccaacagacatctgccaggggatcctcggggactgctggctgctggctgccatcggctcccttaccacctgccccaaactgctataccgcgtggtgcccagaggacagagcttcaagaaaaactatgctggcatcttccattttcagatttggcagtttggacagtgggtgaacgtggtggtagatgaccggctgcccacaaagaatgacaagctggtgtttgtgcactcaaccgaacgcagtgagttctggagtgccctgctggagaaggcgtatgccaagctgagtgggtcctatgaagcattgtcagggggcagtaccatggagggccttgaggacttcacaggaggcgtggcccagagcttccaactccagaggccccctcagaacctgctcaggctccttaggaaggccgtggagcgatcctccctcatgggttgctccattgaagtcaccagtgatagtgaactggaatccatgactgacaagatgctggtgagagggcacgcttactctgtgactggccttcaggatgtccactacagaggcaaaatggaaacactgattcgggtccggaatccctggggccggattgagtggaatggagcttggagtgacagtgccagggagtgggaagaggtggcctcagacatccagatgcagctgctgcacaagacggaggacggggagttctggatgtcctaccaagatttcctgaacaacttcacgctcctggagatctgcaacctcacgcctgatacactctctggggactacaagagctactggcacaccaccttctacgagggcagctggcgcagaggcagctccgcagggggctgcaggaaccaccctggcacgttctggaccaacccccagtttaagatctctcttcctgagggggatgacccagaggatgacgcagagggcaatgttgtggtctgcacctgcctggtggccctaatgcagaagaactggcggcatgcacggcagcagggagcccagctgcagaccattggctttgtcctctacgcggtcccaaaagagtttcagaacattcaggatgtccacttgaagaaggaattcttcacgaagtatcaggaccacggcttctcagagatcttcaccaactcacgggaggtgagcagccaactccggctgcctccgggggaatatatcattattccctccacctttgagccacacagagatgctgacttcctgcttcgggtcttcaccgagaagcacagcgagtcatgggaattggatgaagtcaactatgctgagcaactccaagaggaaaaggtctctgaggatgacatggaccaggacttcctacatttgtttaagatagtggcaggagagggcaaggagataggggtgtatgagctccagaggctgctcaacaggatggccatcaaattcaaaagcttcaagaccaagggctttggcctggatgcttgccgctgcatgatcaacctcatggataaagatggctctggcaagctggggcttctagagttcaagatcctgtggaaaaaactcaagaaatggatggacatcttcagagagtgtgaccaggaccattcaggcaccttgaactcctatgagatgcgcctggttattgagaaagcaggcatcaagctgaacaacaaggtaatgcaggtcctggtggccaggtatgcagatgatgacctgatcatagactttgacagcttcatcagctgtttcctgaggctaaagaccatgttcacattctttctaaccatggaccccaagaatactggccatatttgcttgagcctggaacagtggctgcagatgaccatgtggggatagaggcgctgtaggagcctggtcatctctaccagcagcagcagcagcgaggttctagcccaggagggtggggtgcttcttgtagccctcagctctccggtctctgctgatgaaatgggctccaggtggcagtgcccgggtcccaggtgccgtgtttactgcagcagtgggacctccgtgcccactcccccagctcagaggctttctcttttttccccaacccggcttctgatggctggctttcccccaccatcgctctctcagagtatattttactaaagagtagttgatgcttccccagggtccccctggctggggaggccaagaatagggaagggacttgtagcccgtttcttaccctccatgcttgctgtcctgctcacacctacctgctgaccacccatcctggcacagcctctgttttcctccccatctgtggatactattctaataaatagcacatgccattggct

SEQ ID NO: 113583 - DNA, 565 bp, Homo sapiens
  Payload ID: 2198
  Gene Symbol: CAPN11
  Gene Name: calpain 11
  ENST ID: ENST00000526118
  CDS Start-End: 30-152
aactgtcaagcaccgagctagccaccagcatgctgtactccccaggcccccaggagagctcaacaccctcagtcctcggagcagccagggtagaggctgcctggagtgactgcacggtgcaagggcatggagtggtttgccttatcgtgtgaatgaccttagatgattcgctcaacccagggccgagtcttccggagtcagcagagagcctggatggatcacaggaggataagcctcggggctcatgtgcggagcccacttttactgatacgggaatggtggctcacataaacaacagccggctcaaggccaagggcgtgggccagcacgacaacgcccagaactttggtaaccagagctttgaggagctgcgagcagcctgtctaagaaagggggagctcttcgaggaccccttattccctgctgaacccagctcactgggcttcaaggacctgggccccaactccaaaaatgtgcagaacatctcctggcagcggcccaaggatatcataaacaaccctctattcatcatggatgggatttctccaacagacatctgccaggg

SEQ ID NO: 113584 - DNA, 585 bp, Homo sapiens
  Payload ID: 2198
  Gene Symbol: CAPN11
  Gene Name: calpain 11
  ENST ID: ENST00000532171
  CDS Start-End: 39-585
agaaccttcaactgtcaagcaccgagctagccaccagcatgctgtactccccagggccgagtcttccggagtcagcagagagcctggatggatcacaggaggataagcctcggggctcatgtgcggagacaaggtcttgctctgtcacccagactggagtgccatcacatctcattgcagcctcaaactgccacagcctcgaactccagggctcagagcccacttttactgatacgggaatggtggctcacataaacaacagccggctcaaggccaagggcgtgggccagcacgacaacgcccagaactttggtaaccagagctttgaggagctgcgagcagcctgtctaagaaagggggagctcttcgaggaccccttattccctgctgaacccagctcactgggcttcaaggacctgggccccaactccaaaaatgtgcagaacatctcctggcagcggcccaaggatatcataaacaaccctctattcatcatggatgggatttctccaacagacatctgccaggggatcctcggggactgctggctgctggctgccatcggctcccttaccacctgcccca

SEQ ID NO: 113585 - DNA, 2762 bp, Homo sapiens
  Payload ID: 2199
  Gene Symbol: CAPN12
  Gene Name: calpain 12
  Uniprot ID: Q6ZSI9
  ENST ID: ENST00000328867
  CDS Start-End: 310-2469
actgacctccttcttggtgctctgacagcggcagccggtcctccctcagctctgcccgccttctctcctgctgctggccaagcccattaagctgctaccttggccacaactgaaggccccacgccctgggaagaaagctactgaagaggcgtccctgctccccagcaccccaaaccatcaattaatattaacgagggaaggctcctcattgcctaaagaccccactggggctccaatggaagagaggccccgcccccgtgactcaggaggttaaagggcctggtgccggcttgtgaggccagtgtccagatggcatccagcagtgggagggtcaccatccagctcgtggatgaggaggctggggtcggagccgggcgcctgcagctttttcggggccagagctatgaggcaattcgggcagcctgcctggattcggggatcctgttccgcgacccttacttccctgctggccctgatgcccttggctatgaccagctggggccggactcggagaaggccaaaggcgtgaaatggatgaggccccatgagttctgtgctgagccgaagttcatctgtgaagacatgagccgcacagacgtgtgtcaggggagcctgggtaactgctggttccttgcagctgccgcctcccttactctgtatccccggctcctgcgccgggtggtccctcctggacaggatttccagcatggctacgcaggcgtcttccacttccagctctggcagtttggccgctggatggacgtcgtggtggatgacaggctgcccgtgcgtgaggggaagctgatgttcgtgcgctcggaacagcggaatgagttctgggccccactcctggagaaggcctacgccaagctccacggctcctatgaggtgatgcggggcggccacatgaatgaggcttttgtggatttcacaggcggcgtgggcgaggtgctctatctgagacaaaacagcatggggctgttctctgccctgcgccatgccctggccaaggagtccctcgtgggcgccactgccctgagtgatcggggtgagtaccgcacagaagagggcctggtaaagggacacgcgtattccatcacgggcacacacaaggtgttcctgggcttcaccaaggtgcggctgctgcggctgcggaacccatggggctgcgtggagtggacgggggcctggagcgacagctgcccacgctgggacacactccccaccgagtgccgcgatgccctgctggtgaaaaaggaggatggcgagttctggatggagctgcgggacttcctcctccatttcgacaccgtgcagatctgctcgctgagcccggaggtgctgggccccagcccggaggggggcggctggcacgtccacaccttccaaggccgctgggtgcgtggcttcaactccggcgggagccagcctaatgctgaaaccttctggaccaatcctcagttccgtttaacgctgctggagcctgatgaggaggatgacgaggatgaggaagggccctgggggggctggggggctgcaggggcacggggcccagcgcgggggggccgcacgcccaagtgcacggtccttctgtccctcatccagcgcaaccggcggcgcctgagagccaagggcctcacttacctcaccgttggcttccacgtgttccagattccagaggagctgctgggcctctgggattccccgcgcagccatgcgctcctgccccggctgctgcgcgccgaccgctcgcccctcagcgcccgccgcgacgtgacccgccgctgctgcctgcgtccaggccactacctggtggtgccgagcaccgcccacgccggcgacgaggctgacttcactctgcgtgtcttctccgagcgccgccacacggccgtggagatcgacgacgtgatcagcgcagacctgcagtctctccagggcccctacctgcccctggagctggggttggagcagctgtttcaggagctggctggagaggaggaagaactcaatgcctctcagctccaggccttactaagcattgccctggagcctgccagggcccatacctccacccccagagagatcgggctcaggacctgtgagcagctgctgcagtgtttcgggcatgggcaaagcctggccttacaccacttccagcagctctggggctacctcctggagtggcaggccatatttaacaagttcgatgaggacacctctggaaccatgaactcctacgagctgaggctggcactgaatgcagcaggcttccacctgaacaaccagctgacccagaccctcaccagccgctaccgggatagccgtctgcgtgtggacttcgagcggttcgtgtcctgtgtggcccacctcacctgcatcttctgccactgcagccagcacctggatgggggtgagggggtcatctgcctgacccacagacagtggatggaggtggccaccttctcctaggatctccggatgggcgcacctgctgctcagggcagggttgctgagcaagaccacctccctaggccttgcctggcatgggtgccactctctctggcatccacctgtctggggctagtctctggccctcactgctcacggccgggtgaccactctggcctgcgtactcctcactcagaaacaagaacagcgacagcccttctcgagcagatgacacgagctagtccacgttgacagcttaagacagtgctagctctgccctggctctcctagaaggtggaggacagacacaggag

SEQ ID NO: 113586 - DNA, 1046 bp, Homo sapiens
  Payload ID: 2199
  Gene Symbol: CAPN12
  Gene Name: calpain 12
  ENST ID: ENST00000594552
  CDS Start-End: 1-110
agctggggttggagcagctgtttcaggagctggctggagaggaggaagaactcaatgcctctcagctccaggccttactaagcattgccctggagcctggccatatttaacaagttcgatgaggacacctctggaaccatgaactcctacgagctgaggctggcactgaatgcagcaggcttccacctgaacaaccagctgacccagaccctcaccagccgctaccgggatagccgtctgcgtgtggacttcgagcggttcgtgtcctgtgtggcccacctcacctgcatcttctgccactgcagccagcacctggatgggggtgagggggtcatctgcctgacccacagacagtggatggaggtggccaccttctcctaggatctccggatgggcgcacctgctgctcagggcagggttgctgagcaagaccacctccctaggccttgcctggcatgggtgccactctctctggcatccacctgtctggggctagtctctggccctcactgctcacggccgggtgaccactctggcctgcgtactcctcactcagaaacaagaacagcgacagcccttctcgagcagatgacacgagctagtccacgttgacagcttaagacagtgctagctctgccctggctctcctagaaggtggaggacagacacaggagaaataaaaaaagatgatgctgcaggaatccttcttaaaaatattacatgttttattatcctgtccccagagggtggtttatccagaaaccaagaaaaaaaatcaatcagaataaactcaaaaaaaaaaggtagggggagcaaaaccatcaaccaccaggcagccaggccatcagcccacctccacctctggagggtccccagagacccacgcccgacgcagacccggaggagcatcagcaaggggcccgggcagagaatcggctatgtcttcattatgagagcaggagagacggcagagatatgttgctaggtgaatatatatttatataataaatccgtaagttaataaagtaaatagtaattctctgaaa

SEQ ID NO: 113587 - DNA, 546 bp, Homo sapiens
  Payload ID: 2199
  Gene Symbol: CAPN12
  Gene Name: calpain 12
  ENST ID: ENST00000598684
  CDS Start-End: 8-546
tgtccagatggcatccagcagtgggagggtcaccatccagctcgtggatgaggaggctggggtcggagccgggcgcctgcagctttttcggggccagagctatgaggcaattcgggcagcctgcctggattcggggatcctgttccgcgacccttacttccctgctggccctgatgcccttggctatgaccagctggggccggactcggagaaggccaaaggcgtgaaatggatgaggccccatgagttctgtgctgagccgaagttcatctgtgaagacatgagccgcacagacgtgtgtcaggggagcctggctgccgcctcccttactctgtatccccggctcctgcgccgggtggtccctcctggacaggatttccagcatggctacgcaggcgtcttccacttccagctctggcagtttggccgctggatggacgtcgtggtggatgacaggctgcccgtgcgtgaggggaagctgatgttcgtgcgctcggaacagcggaatgagttctgggccccactcctggagaaggcctacgccaa

SEQ ID NO: 113588 - DNA, 896 bp, Homo sapiens
  Payload ID: 2199
  Gene Symbol: CAPN12
  Gene Name: calpain 12
  ENST ID: ENST00000597987
  CDS Start-End: 1-318
gggttggagcagctgtttcaggagctggctggagaggccatatttaacaagttcgatgaggacacctctggaaccatgaactcctacgagctgaggctggcactgaatgcagcaggcttccacctgaacaaccagctgacccagaccctcaccagccgctaccgggatagccgtctgcgtgtggacttcgagcggttcgtgtcctgtgtggcccacctcacctgcatcttctgccactgcagccagcacctggatgggggtgagggggtcatctgcctgacccacagacagtggatggaggtggccaccttctcctaggatctccggatgggcgcacctgctgctcagggcagggttgctgagcaagaccacctccctaggccttgcctggcatgggtgccactctctctggcatccacctgtctggggctagtctctggccctcactgctcacggccgggtgaccactctggcctgcgtactcctcactcagaaacaagaacagcgacagcccttctcgagcagatgacacgagctagtccacgttgacagcttaagacagtgctagctctgccctggctctcctagaaggtggaggacagacacaggagaaataaaaaaagatgatgctgcaggaatccttcttaaaaatattacatgttttattatcctgtccccagagggtggtttatccagaaaccaagaaaaaaaatcaatcagaataaactcaaaaaaaaaaggtagggggagcaaaaccatcaaccaccaggcagccaggccatcagcccacctccacctctggagggtccccagagacccacgcccgacgcagacccggaggagcatcagcaaggggcccgggcagagaatcggctatgtcttcattatgagagcag

SEQ ID NO: 113589 - DNA, 488 bp, Homo sapiens
  Payload ID: 2199
  Gene Symbol: CAPN12
  Gene Name: calpain 12
  ENST ID: ENST00000595177
  CDS Start-End: 1-314
acctgcccctggagctggggttggagcagctgtttcaggagctggctggagaggaggaagaactcaatgcctctcagctccaggccttactaagcattgccctggagcctggcttccacctgaacaaccagctgacccagaccctcaccagccgctaccgggatagccgtctgcgtgtggacttcgagcggttcgtgtcctgtgtggcccacctcacctgcatcttctgccactgcagccagcacctggatgggggtgagggggtcatctgcctgacccacagacagtggatggaggtggccaccttctcctaggatctccggatgggcgcacctgctgctcagggcagggttgctgagcaagaccacctccctaggccttgcctggcatgggtgccactctctctggcatccacctgtctggggctagtctctggccctcactgctcacggccgggtgaccactctggcctgcgtactcctcactca

SEQ ID NO: 113590 - DNA, 547 bp, Homo sapiens
  Payload ID: 2199
  Gene Symbol: CAPN12
  Gene Name: calpain 12
  ENST ID: ENST00000597740
  CDS Start-End: 8-289
tgtccagatggcatccagcagtgggagggtcaccatccagctcgtggatgaggaggctggggtcggagccgggcgcctgcagctttttcggggccagagctatgaggcaattcgggcagcctgcctggattcggggatcctgttccgcgacccttacttccctgctggccctgatgcccttggctatgaccagctggggccggactcggagaaggccaaaggcgtgaaatggatgaggccccatgctgaggcctggaatcccccaccacccacaggagttctgtgctgagccgaagttcatctgtgaagacatgagccgcacagacgtgtgtcaggggagcctgggtaactgctggttccttgcagctgccgcctcccttactctgtatccccggctcctgcgccgggtggtccctcctggacaggatttccagcatggctacgcaggcgtcttccacttccagatggaatctcactctgtcatccaggctggagtgcagtggcacaatctcggctcactgcaaccttcgccccgcccccaggttca

SEQ ID NO: 113591 - DNA, 2381 bp, Homo sapiens
  Payload ID: 2199
  Gene Symbol: CAPN12
  Gene Name: calpain 12
  ENST ID: ENST00000601953
  CDS Start-End: 248-1960
attgctgcctggaccaaggcggatgcaggaagctggggtggttcctggcctggcctgaatctgattctggtgtctggtggggacgccaggttcgccgcggggcccaggtaactgctggttccttgcagctgccgcctcccttactctgtatccccggctcctgcgccgggtggtccctcctggacaggatttccagcatggctacgcaggcgtcttccacttccagctctggcagtttggccgctggatggacgtcgtggtggatgacaggctgcccgtgcgtgaggggaagctgatgttcgtgcgctcggaacagcggaatgagttctgggccccactcctggagaaggcctacgccaagctccacggctcctatgaggtgatgcggggcggccacatgaatgaggcttttgtggatttcacaggcggcgtgggcgaggtgctctatctgagacaaaacagcatggggctgttctctgccctgcgccatgccctggccaaggagtccctcgtgggcgccactgccctgagtgatcggggtgagtaccgcacagaagagggcctggtaaagggacacgcgtattccatcacgggcacacacaaggtgttcctgggcttcaccaaggtgcggctgctgcggctgcggaacccatggggctgcgtggagtggacgggggcctggagcgacagctgcccacgctgggacacactccccaccgagtgccgcgatgccctgctggtgaaaaaggaggatggcgagttctggatggagctgcgggacttcctcctccatttcgacaccgtgcagatctgctcgctgagcccggaggtgctgggccccagcccggaggggggcggctggcacgtccacaccttccaaggccgctgggtgcgtggcttcaactccggcgggagccagcctaatgctgaaaccttctggaccaatcctcagttccgtttaacgctgctggagcctgatgaggaggatgacgaggatgaggaagggccctgggggggctggggggctgcaggggcacggggcccagcgcgggggggccgcacgcccaagtgcacggtccttctgtccctcatccagcgcaaccggcggcgcctgagagccaagggcctcacttacctcaccgttggcttccacgtgttccagattccagaggagctgctgggcctctgggattccccgcgcagccatgcgctcctgccccggctgctgcgcgccgaccgctcgcccctcagcgcccgccgcgacgtgacccgccgctgctgcctgcgtccaggccactacctggtggtgccgagcaccgcccacgccggcgacgaggctgacttcactctgcgtgtcttctccgagcgccgccacacggccgtggagatcgacgacgtgatcagcgcagacctgcagtctctccagggcccctacctgcccctggagctggggttggagcagctgtttcaggagctggctggagaggaggaagaactcaatgcctctcagctccaggccttactaagcattgccctggagcctgccagggcccatacctccacccccagagagatcgggctcaggacctgtgagcagctgctgcagtgtttcgggcatgggcaaagcctggccttacaccacttccagcagctctggggctacctcctggagtggcaggccatatttaacaagttcgatgaggacacctctggaaccatgaactcctacgagctgaggctggcactgaatgcagcaggcttccacctgaacaaccagctgacccagaccctcaccagccgctaccgggatagccgtctgcgtgtggacttcgagcggttcgtgtcctgtgtggcccacctcacctgcatcttctgccactgcagccagcacctggatgggggtgagggggtcatctgcctgacccacagacagtggatggaggtggccaccttctcctaggatctccggatgggcgcacctgctgctcagggcagggttgctgagcaagaccacctccctaggccttgcctggcatgggtgccactctctctggcatccacctgtctggggctagtctctggccctcactgctcacggccgggtgaccactctggcctgcgtactcctcactcagaaacaagaacagcgacagcccttctcgagcagatgacacgagctagtccacgttgacagcttaagacagtgctagctctgccctggctctcctagaaggtggaggacagacacaggagaaataaaaaaagatgatgctgcaggaatccttcttaaaaatattacatgttttattatcctgtccccagagggtggtttatccagaaaccaagaaaaaaaatcaatcagaataaactcaaaaaaaaaa

SEQ ID NO: 113592 - DNA, 3129 bp, Homo sapiens
  Payload ID: 2199
  Gene Symbol: CAPN12
  Gene Name: Calpain 12
  ENST ID: ENST00000635148
  CDS Start-End: 310-2469
actgacctccttcttggtgctctgacagcggcagccggtcctccctcagctctgcccgccttctctcctgctgctggccaagcccattaagctgctaccttggccacaactgaaggccccacgccctgggaagaaagctactgaagaggcgtccctgctccccagcaccccaaaccatcaattaatattaacgagggaaggctcctcattgcctaaagaccccactggggctccaatggaagagaggccccgcccccgtgactcaggaggttaaagggcctggtgccggcttgtgaggccagtgtccagatggcatccagcagtgggagggtcaccatccagctcgtggatgaggaggctggggtcggagccgggcgcctgcagctttttcggggccagagctatgaggcaattcgggcagcctgcctggattcggggatcctgttccgcgacccttacttccctgctggccctgatgcccttggctatgaccagctggggccggactcggagaaggccaaaggcgtgaaatggatgaggccccatgagttctgtgctgagccgaagttcatctgtgaagacatgagccgcacagacgtgtgtcaggggagcctgggtaactgctggttccttgcagctgccgcctcccttactctgtatccccggctcctgcgccgggtggtccctcctggacaggatttccagcatggctacgcaggcgtcttccacttccagctctggcagtttggccgctggatggacgtcgtggtggatgacaggctgcccgtgcgtgaggggaagctgatgttcgtgcgctcggaacagcggaatgagttctgggccccactcctggagaaggcctacgccaagctccacggctcctatgaggtgatgcggggcggccacatgaatgaggcttttgtggatttcacaggcggcgtgggcgaggtgctctatctgagacaaaacagcatggggctgttctctgccctgcgccatgccctggccaaggagtccctcgtgggcgccactgccctgagtgatcggggtgagtaccgcacagaagagggcctggtaaagggacacgcgtattccatcacgggcacacacaaggtgttcctgggcttcaccaaggtgcggctgctgcggctgcggaacccatggggctgcgtggagtggacgggggcctggagcgacagctgcccacgctgggacacactccccaccgagtgccgcgatgccctgctggtgaaaaaggaggatggcgagttctggatggagctgcgggacttcctcctccatttcgacaccgtgcagatctgctcgctgagcccggaggtgctgggccccagcccggaggggggcggctggcacgtccacaccttccaaggccgctgggtgcgtggcttcaactccggcgggagccagcctaatgctgaaaccttctggaccaatcctcagttccgtttaacgctgctggagcctgatgaggaggatgacgaggatgaggaagggccctgggggggctggggggctgcaggggcacggggcccagcgcgggggggccgcacgcccaagtgcacggtccttctgtccctcatccagcgcaaccggcggcgcctgagagccaagggcctcacttacctcaccgttggcttccacgtgttccagattccagaggagctgctgggcctctgggattccccgcgcagccatgcgctcctgccccggctgctgcgcgccgaccgctcgcccctcagcgcccgccgcgacgtgacccgccgctgctgcctgcgtccaggccactacctggtggtgccgagcaccgcccacgccggcgacgaggctgacttcactctgcgtgtcttctccgagcgccgccacacggccgtggagatcgacgacgtgatcagcgcagacctgcagtctctccagggcccctacctgcccctggagctggggttggagcagctgtttcaggagctggctggagaggaggaagaactcaatgcctctcagctccaggccttactaagcattgccctggagcctgccagggcccatacctccacccccagagagatcgggctcaggacctgtgagcagctgctgcagtgtttcgggcatgggcaaagcctggccttacaccacttccagcagctctggggctacctcctggagtggcaggccatatttaacaagttcgatgaggacacctctggaaccatgaactcctacgagctgaggctggcactgaatgcagcaggcttccacctgaacaaccagctgacccagaccctcaccagccgctaccgggatagccgtctgcgtgtggacttcgagcggttcgtgtcctgtgtggcccacctcacctgcatcttctgccactgcagccagcacctggatgggggtgagggggtcatctgcctgacccacagacagtggatggaggtggccaccttctcctaggatctccggatgggcgcacctgctgctcagggcagggttgctgagcaagaccacctccctaggccttgcctggcatgggtgccactctctctggcatccacctgtctggggctagtctctggccctcactgctcacggccgggtgaccactctggcctgcgtactcctcactcagaaacaagaacagcgacagcccttctcgagcagatgacacgagctagtccacgttgacagcttaagacagtgctagctctgccctggctctcctagaaggtggaggacagacacaggagaaataaaaaaagatgatgctgcaggaatccttcttaaaaatattacatgttttattatcctgtccccagagggtggtttatccagaaaccaagaaaaaaaatcaatcagaataaactcaaaaaaaaaaggtagggggagcaaaaccatcaaccaccaggcagccaggccatcagcccacctccacctctggagggtccccagagacccacgcccgacgcagacccggaggagcatcagcaaggggcccgggcagagaatcggctatgtcttcattatgagagcaggagagacggcagagatatgttgctaggtgaatatatatttatataataaatccgtaagttaataaagtaaatagtaattctc

SEQ ID NO: 113593 - DNA, 2683 bp, Homo sapiens
  Payload ID: 2200
  Gene Symbol: CAPN13
  Gene Name: calpain 13
  Uniprot ID: Q6MZZ7
  ENST ID: ENST00000295055
  CDS Start-End: 178-2187
aagcagacaccagcactgctctttctccaagacggccggccatgctctcctcctctgccagtctcctccaccactctctaacctgagagcctgtggaacctgcccgtctcccctcctccatcagacacacctgcctaggaaacaggaaaggacctcggaagtcttctaaggagagtcatggcgtattaccaggagccttcagtggagacctccatcatcaagttcaaagaccaggactttaccaccttgcgggatcactgcctgagcatgggccggacgtttaaggatgagacattccctgcagcagattcttccataggccagaagctgctccaggaaaaacgcctctccaatgtgatatggaagcggccacaggatctaccagggggtcctcctcacttcatcctggatgatataagcagatttgacatccaacaaggaggcgcagctgactgctggttcctggcagcactgggatccttgactcagaacccacagtacaggcagaagatcctgatggtccaaagcttttcacaccagtatgctggcattttccgtttccggttctggcaatgtggccagtgggtggaagtggtgattgatgaccgcctacctgtccagggagataaatgcctctttgtgcgtcctcgccaccaaaaccaagagttctggccctgcctgctggagaaggcctatgccaagctgctcggatcctattccgatctgcactatggcttcctcgaggatgccctggtggacctcacaggaggcgtgatcaccaacatccatctgcactcttcccctgtggacctggtgaaggcagtgaagacagcgaccaaggcaggctccctgataacctgtgccactccaagtgggccaacagatacagcacaggcgatggagaatgggctggtgagtctccatgcctacactgtgactggggctgagcagattcaataccgaaggggctgggaagaaattatctccctgtggaacccctggggctggggcgaggccgaatggagagggcgctggagtgatgggtctcaggagtgggaggaaacctgtgatccgcggaaaagccagctacataagaaacgggaagatggcgagttttggatgtcgtgtcaagatttccaacagaaattcatcgccatgtttatatgtagcgaaattccaattaccctggaccatggaaacacactccacgaaggatggtcccaaataatgtttaggaagcaagtgattctaggaaacactgcaggaggacctcggaatgatgctcaattcaacttctctgtgcaagagccaatggaaggcaccaatgttgtcgtgtgcgtcacagttgctgtcacaccatcaaatttgaaagcagaagatgcaaaatttccactcgatttccaagtgattctggctggctcacagcggttccgggagaaatttccacccgtgtttttttcctcgttcagaaacactgtccaaagctcaaataataaattccgccgcaacttcaccatgacttaccatctgagccctgggaactatgttgtggttgcacagacacggagaaaatcagcggagttcttgctccgaatcttcctgaaaatgccagacagtgacaggcacctgagcagccatttcaacctcagaatgaagggaagcccttcagaacatggctcccaacaaagcattttcaacagatatgctcagcagaggctggacattgatgccacccagcttcagggccttctcaaccaggagcttctaacaggacctccaggggacatgttctccttagatgagtgccgcagcttggtggctctgatggaactgaaagtgaatgggcggctagaccaagaggagtttgcgcgactgtggaagcgccttgttcactaccagcatgttttccagaaggttcagacaagccctggagtcctcctgagctcggacttgtggaaggccatagagaatacagacttcctcagagggatcttcatcagccgtgagctgctgcatctggtgaccctcaggtacagcgacagcgtcggcagggtcagcttccccagcctggtctgcttcctgatgcggcttgaagccatggcaaagaccttccgcaacctctctaaggatggaaaaggactctacctgacagaaatggagtggatgagcctggtcatgtacaactgaagcaaagaggaaagcagacccatggctcaggacaagctcccagtgatcactcaagaatctggctctcattctaagaggctgtgctgcccagtatggtggttgtgataaatctaaaccagccctgcatgaaacagagtccaagctgtctcccaacagcctgggttcggtccttggctggcccaggcccagttaagcctgtggccaccaagcagctcatctgagcactttgggatgtattcagcctacgttgccctggaaaaggaagcaggagatgtctccctgtgggaaaggagaagagaagttgtctctgagtcccctgtcaccagttggattcatttcttggaagagccagaatgagccactttgaccaccctcgggtgctatgggtgacacaagagctgtccactgggtgtttgcagaataattacactatcttatgtctggatcctgatgatttcacagctaaatggcaaaaataaaacatgtttcccataaa

SEQ ID NO: 113594 - DNA, 2328 bp, Homo sapiens
  Payload ID: 2200
  Gene Symbol: CAPN13
  Gene Name: calpain 13
  ENST ID: ENST00000450650
  CDS Start-End: 1-377
caaataataaattccgccgcaacttcaccatgacttaccatctgagccctgggaactatgttgtggttgcacagacacggagaaaatcagcggagttcttgctccgaatcttcctgaaaatgccagacagtgacaggcacctgagcagccatttcaacctcagaatgaagggaagcccttcagaacatggctcccaacaaagcattttcaacagatatgctcagcagaggctggacattgatgccacccagcttcagggccttctcaaccaggagcttctaacaggacctccaggggacatgttctccttagatgagtgccgcagcttggtggctctgatggaagtatcctttgcggtcatccctcccatgctctgagcacccctcagctctgtgggcttccccagagacctaattaggacagtagggaacccttttcccactcagtattttctcttcttccctgtccttgagtttctggggattctctactaactcactaacataccacagcaacaatgataatagttaccatctatcaagcacctactatgtgctgatcagtgtactggggtgtgtgtgtgtgtgtgtgtgtgtgtgtgtgtgtgtgtgtccttataattcttgaagcaatccctctgatacaaaaaagtatcatctcataatacagtagaagaaacaggagttcagagaggttaagtaatttgcccagatcacacagctagtcaggactcatgctcagatttgaagttggagctttcagcctccaaagtcgatgctctaaccttatcctaaaccgcccctttatagcaccgttgggaactattttcccttttacccattcacttcccactggaggagtctccattatttaaatttcttacttcaacaagtccccaattcaatcaagataactaccaccaaaacatggaaaactgcctggtctacacagcagttgcaccccagcattgctatgctgcattcacagcgggagacgctgggcagaggcagttcagagactcactccaggcccgtggctacaagtgtaggaccaagaattgaaccccagactcctgaccctcctcctgatttccattccccagtgagccatcctcttcctgcgtacccctggcttggcaagcagaagaggctgactccatgagtgtagacccccagatgctgccctgccagcccctcactcggcagtgtgctgtctcctgagacgcattgccccgctcctgcaccgttgacaaggctgaattgggactgtgaagccggccattgtgaaacaagagggcttttttgatgaaatcataaatcaggccctgtctctgctggctgtgctttggaatctatcagagacacagcccatctcccacagaggaatccaaatggtcctcacagtgccacggcccggggatggcagcccctctgcaccttgcacgctggctggttcactcttaactccttacccagctgaaagtgaatgggcggctagaccaagaggagtttgcgcgactgtggaagcgccttgttcactaccagcatgttttccagaaggttcagacaagccctggagtcctcctgagctcggacttgtggaaggccatagagaatacagacttcctcagagggatcttcatcagccgtgagctgctgcatctggtgaccctcaggtacagcgacagcgtcggcagggtcagcttccccagcctggtctgcttcctgatgcggcttgaagccatggcaaagaccttccgcaacctctctaaggatggaaaaggactctacctgacagaaatggagtggatgagcctggtcatgtacaactgaagcaaagaggaaagcagacccatggctcaggacaagctcccagtgatcactcaagaatctggctctcattctaagaggctgtgctgcccagtatggtggttgtgataaatctaaaccagccctgcatgaaacagagtccaagctgtctcccaacagcctgggttcggtccttggctggcccaggcccagttaagcctgtggccaccaagcagctcatctgagcactttgggatgtattcagcctacgttgccctggaaaaggaagcaggagatgtctccctgtgggaaaggagaagagaagttgtctctgagtcccctgtcaccagttggattcatttcttggaagagccagaatgagccactttgaccaccctcgggtgctatgggtgacacaagagctgtccactgggtgtttgcagaataattacactatcttatgtctggatcctgatgatttcacagctaaatggcaaaaataaaacatgtttcccataaa

SEQ ID NO: 113595 - DNA, 2269 bp, Homo sapiens
  Payload ID: 2200
  Gene Symbol: CAPN13
  Gene Name: calpain 13
  Uniprot ID: Q6MZZ7
  ENST ID: ENST00000458085
  CDS Start-End: 244-1515
ctttctccaagacggccggccatgctctcctcctctgccagtctcctccaccactctctaacctgagagcctgtggaacctgcccgtctcccctcctccatcagacacacctgcctaggaaacagatggaaaaagtgagggaccggtgagtgacttgctgcaaaagtttataccagatgcaaatgacagagctggagttctgctgtgcctggaaaggacctcggaagtcttctaaggagagtcatggcgtattaccaggagccttcagtggagacctccatcatcaagttcaaagaccaggactttaccaccttgcgggatcactgcctgagcatgggccggacgtttaaggatgagacattccctgcagcagattcttccataggccagaagctgctccaggaaaaacgcctctccaatgtgatatggaagcggccacaggatctaccagggggtcctcctcacttcatcctggatgatataagcagatttgacatccaacaaggaggcgcagctgactgctggttcctggcagcactgggatccttgactcagaacccacagtacaggcagaagatcctgatggtccaaagcttttcacaccagtatgctggcattttccgtttccggttctggcaatgtggccagtgggtggaagtggtgattgatgaccgcctacctgtccagggagataaatgcctctttgtgcgtcctcgccaccaaaaccaagagttctggccctgcctgctggagaaggcctatgccaagctgctcggatcctattccgatctgcactatggcttcctcgaggatgccctggtggacctcacaggaggcgtgatcaccaacatccatctgcactcttcccctgtggacctggtgaaggcagtgaagacagcgaccaaggcaggctccctgataacctgtgccactccaagtgggccaacagatacagcacaggcgatggagaatgggctggtgagtctccatgcctacactgtgactggggctgagcagattcaataccgaaggggctgggaagaaattatctccctgtggaacccctggggctggggcgaggccgaatggagagggcgctggagtgatgggtctcaggagtgggaggaaacctgtgatccgcggaaaagccagctacataagaaacgggaagatggcgagttttggatgtcgtgtcaagatttccaacagaaattcatcgccatgtttatatgtagcgaaattccaattaccctggaccatggaaacacactccacgaaggatggtcccaaataatgtttaggaagcaagtgattctaggaaacactgcaggaggacctcggaatgatgctcaattcaacttctctgtgcaagagccaatggaaggcaccaatgttgtcgtgtgcgtcacagttgctgtcacaccatcaaatttgaaagcagaagatgcaaaatttccactcgatttccaagtgattctggctggctcacagaaacactgtccaaagctcaaataataaattccgccgcaacttcaccatgacttaccatctgagccctgggaactatgttgtggttgcacagacacggagaaaatcagcggagttcttgctccgaatcttcctgaaaatgccagacagtgacaggcacctgagcagccatttcaacctcagaatgaagggaagcccttcagaacatggctcccaacaaagcattttcaacagatatgctcagcaggtatggtacctagcacccaggggccttacgtgggattggagaaaggggacctgagggagggacagctctcacaggcccttactgggatgcagagaggagaagtgacttgatggactattttacctgcctctcttcctggatcgtctccagaactgctgtggctgccaagctcggtagagacgtggcgccccacccagtgtcatccgggggacttcaagctggaatgcagagcttagaaagggaggggataattatggggtgtgaggtgcattgccctctaaatctttaaacaagcaattggcagtaccccgtgaaacctttccttctcctactcggccacctcccaccaacctggcatcgttcctcccgggagctagccagcttcagaaagcacatacagcatccttgctgccaaaccacctatgtgcacacaggatttccttaatggcttaataaactgttataaagaactccttgacttgtcagaataaaatagctgccaggggctctgcacaatgagcctcttaccgttaa

SEQ ID NO: 113596 - DNA, 710 bp, Homo sapiens
  Payload ID: 2200
  Gene Symbol: CAPN13
  Gene Name: calpain 13
  ENST ID: ENST00000485248
  CDS Start-End: 244-552
ctttctccaagacggccggccatgctctcctcctctgccagtctcctccaccactctctaacctgagagcctgtggaacctgcccgtctcccctcctccatcagacacacctgcctaggaaacagatggaaaaagtgagggaccggtgagtgacttgctgcaaaagtttataccagatgcaaatgacagagctggagttctgctgtgcctggaaaggacctcggaagtcttctaaggagagtcatggcgtattaccaggagccttcagtggagacctccatcatcaagttcaaagaccaggactttaccaccttgcgggatcactgcctgagcatgggccggacgtttaaggatgagacattccctgcagcagattcttccataggccagaagctgctccaggaaaaacgcctctccaatgtgatatggaagcggccacaggatctaccagggggtcctcctcacttcatcctggatgatataagcagatttgacatccaacaaggaggcgcagttctggcaatgtggccagtgggtggaagtggtgattgatgaccgcctacctgtccagggagataaatgcctctttgtgcgtcctcgccaccaaaaccaagagttctggccctgcctgctggagaaggcctatgccaagctgctcggatcctattccgatctgcactatggcttcctcgaggatgccctggtggacc

SEQ ID NO: 113597 - DNA, 3787 bp, Homo sapiens
  Payload ID: 2201
  Gene Symbol: CAPN14
  Gene Name: calpain 14
  ENST ID: ENST00000398824
  CDS Start-End: 245-676
attcatcacactccctgctttgaatcgcctctccttcagttgctgaggtcaattccctaggaaaacagcaggatcttgattgcaccatcccactcaacagcctcgcttgggtaagggaaacaccaaaagcagaaaaatccatgctgaaggaccccaggaccagcaccagttcctgagcatctttcccgggctgagcagcagagactcctcaggaagactcactggactgtacccaccacctgccatgtctctgtggccacctttccgatgcagatggaagctggcgccaaggtactctaggagggcgtctccacagcaaccccaacaggactttgaggccctgctggcagagtgcctgaggaatggctgcctctttgaagacaccagcttcccggccaccctgagctccatcggcagtggctccctgctgcagaagctgccaccccgcctgcagtggaagaggcccccggagctgcacagcaatccccagttttattttgccaaggccaaaaggctggatctgtgccaggggatagtaggagactgctggttcttggctgctttgcaagctctggccttgcaccaggacatcctgagccgggttgttcccctgaatcagagtttcactgagaagtatgctggcatcttccggttctgggctctctggttcctatgaagacttgcagtcaggacaggtgtctgaagcccttgtagacttcactggaggggtgacaatgaccatcaacctggcagaagcccatggcaacctctgggacatcctcatcgaagccacctacaacagaaccctcattggctgccagacccactcaggggagaagattctggagaatgggctggtggaaggccatgcctatactctcacaggaatcaggaaggtgacctgcaaacatagacctgaatatctcgtcaagctacggaacccctggggaaaggtggaatggaaaggagactggagtgacagttcaagtaaatgggagctgctgagccccaaggagaagattctgcttctgaggaaagacaatgacggagaattctggatgacgctgcaggactttaaaacacatttcgtgctcctggttatctgtaaactgaccccaggcctgttgagccaggaggcggcccagaagtggacgtacaccatgcgggaggggagatgggagaagcggagcacagctggtggccagaggcagttgctgcaggacacattttggaagaacccgcagttcctgctgtctgtctggaggcccgaggagggcaggagatccctgaggccctgcagcgtgctggtgtccctgctccagaagcccaggcacaggtgccgcaagcggaagcctctcctcgccattggcttctacctgtataggatgaacaagtaccatgatgaccagaggagactgccccctgagttcttccagagaaacactcctctgagccagcctgataggtttctcaaggagaaagaagtgagtcaggagctgtgtctggaaccagggacgtacctcatcgtgccctgcatattggaggcccaccagaagtcagagttcgtcctcagggtcttctccaggaagcacatcttttatgaaattggcagcaattctggtgtcgtcttctcaaaggagatagaagaccaaaatgaaaggcaggatgaattcttcaccaaattctttgaaaagcatccagagattaatgcagttcaacttcagaacctcctgaaccagatgacctggtcaagtctggggagcagacagcccttctttagcctggaagcctgccaggggatcctggccttactggaccttaatgcatcaggtactatgagcatccaggaattcagggacctgtggaagcagctgaagctctctcagaaggttttccacaagcaagaccgtgggtcaggatacctgaactgggagcagctgcacgctgccatgagggaggcaggaatcatgctcagtgatgacgtctgtcagctgatgctcatccgctacggcggcccccgcctccagatggactttgtcagtttcatccacttgatgctgcgtgtagagaacatggaggatgtcttccaaaacttaacccaagatggcaaagggatatacctccagaagccagagtggatgatgatggcactgtactcctgagaaggctgagtctcacctgccctcactgaagactctgcatgtggcccaagagcagcctttggctgagaccaacccatgcccaccctacttactgatcttcaggacagcctcactagccgtcaccttctcagctgggaaggtttctcttctgcagccctccccgtgcatggccagcatgcagaaagggaagggaggaagtaaagattacatcagatttgtaaaagctagccatccttccctgaggccacaaccttgtcacaagcggagatgttacctgacatggcctaagcattctgactccagagctggtgtggttagcctccatacaacactgcctctgtggctgcaaactcaagtgactttagacatgccacatgttctcacatggtggggtaatcatctaggttttaaggtctgaaatgggaatgatatatccttagacatttagtcccagcatctgcaaattgatagagacataggctaagtttcagctgtttggggatggggtcagggatatagtgggctttcagaaacacagacagtaagagaattggcagagtccaggtggggtgggctggctctggcatctgaggtcatggggtagtcttcttctgacaatatctccgtatgattggatctggggcaacctagtagatttaaaacacctgagttctcaaagggcttcctgcttgtgacaggtgtgtctatttgcttgatatatagactatcagatccatttcaaatctgtccagaaattctctgtctatctacttcaaaggacaaaaacaaacccatgctaaattatagagtcaatcagtgggtggttggtatatctgattttttgaactaccatgaaacaccttgtttatgtcatccctctcaaccaagaatacaggtgcaaaaccagaacaatggcctttttccaaagtctatgcaatttattcataagttagcacctcagagccatttattactacaggttgagcatcccaaatctgaaaaccccaaatctgaaatactccaaaatctaaaatttctgagagtagacatgaaactcaaaggaaataggggcattttggattttgaatttttgggtttgaggtgttcaactgacaagtctataatgcagatatcctgaaatctgaaacacttctggtcccaagcattttagttaagagatagtcaacctgtattctatttaatcttaatttacaaacaattctaacaaacatggctgtttgatttccaactccatagcagactcaggaaggaagctgaatgaagagataaaagtgtgtccattggcagaggactaaaggagatttgagcacctgtcagatgggtactgtaccagaagaaaggagcactttgaaagcgtagcttatggggtaggaaagtattttatttaggaaaaaaaacccttcatttattccaaatgataaaatgtaaaatgggtttccataaagtgccagatacatgagatgttgttgattttataaatgatgatcatgtatttacagccttttacagttttttatatccattgacttatttgtgtctttgtctttaaaatctgccattgcaaatagctgttttaataaaccaattttgccttggcccctgaa

SEQ ID NO: 113598 - DNA, 2197 bp, Homo sapiens
  Payload ID: 2201
  Gene Symbol: CAPN14
  Gene Name: calpain 14
  Uniprot ID: A8MX76
  ENST ID: ENST00000403897
  CDS Start-End: 143-2197
atataagaggtggtttcaggctgcatgcttctgactgcaccgggattagagcttgcccaggcgcttaaagaagcaaaatctcctgtgcaggagcagcagagactcctcaggaagactcactggactgtacccaccacctgccatgtctctgtggccacctttccgatgcagatggaagctggcgccaaggtactctaggagggcgtctccacagcaaccccaacaggactttgaggccctgctggcagagtgcctgaggaatggctgcctctttgaagacaccagcttcccggccaccctgagctccatcggcagtggctccctgctgcagaagctgccaccccgcctgcagtggaagaggcccccggagctgcacagcaatccccagttttattttgccaaggccaaaaggctggatctgtgccaggggatagtaggagactgctggttcttggctgctttgcaagctctggccttgcaccaggacatcctgagccgggttgttcccctgaatcagagtttcactgagaagtatgctggcatcttccggttctggttctggcactatgggaactgggttcctgtggtgatcgatgaccgtctgcctgtgaatgaggctggccagctggtctttgtctcctccacctataagaacttgttctggggagcacttctggaaaaggcctatgccaagctctctggttcctatgaagacttgcagtcaggacaggtgtctgaagcccttgtagacttcactggaggggtgacaatgaccatcaacctggcagaagcccatggcaacctctgggacatcctcatcgaagccacctacaacagaaccctcattggctgccagacccactcaggggagaagattctggagaatgggctggtggaaggccatgcctatactctcacaggaatcaggaaggtgacctgcaaacatagacctgaatatctcgtcaagctacggaacccctggggaaaggtggaatggaaaggagactggagtgacagttcaagtaaatgggagctgctgagccccaaggagaagattctgcttctgaggaaagacaatgacggagaattctggatgacgctgcaggactttaaaacacatttcgtgctcctggttatctgtaaactgaccccaggcctgttgagccaggaggcggcccagaagtggacgtacaccatgcgggaggggagatgggagaagcggagcacagctggtggccagaggcagttgctgcaggacacattttggaagaacccgcagttcctgctgtctgtctggaggcccgaggagggcaggagatccctgaggccctgcagcgtgctggtgtccctgctccagaagcccaggcacaggtgccgcaagcggaagcctctcctcgccattggcttctacctgtataggatgaacaagtaccatgatgaccagaggagactgccccctgagttcttccagagaaacactcctctgagccagcctgataggtttctcaaggagaaagaagtgagtcaggagctgtgtctggaaccagggacgtacctcatcgtgccctgcatattggaggcccaccagaagtcagagttcgtcctcagggtcttctccaggaagcacatcttttatgaaattggcagcaattctggtgtcgtcttctcaaaggagatagaagaccaaaatgaaaggcaggatgaattcttcaccaaattctttgaaaagcatccagagattaatgcagttcaacttcagaacctcctgaaccagatgacctggtcaagtctggggagcagacagcccttctttagcctggaagcctgccaggggatcctggccttactggaccttaatgcatcaggtactatgagcatccaggaattcagggacctgtggaagcagctgaagctctctcagaaggttttccacaagcaagaccgtgggtcaggatacctgaactgggagcagctgcacgctgccatgagggaggcaggaatcatgctcagtgatgacgtctgtcagctgatgctcatccgctacggcggcccccgcctccagatggactttgtcagtttcatccacttgatgctgcgtgtagagaacatggaggatgtcttccaaaacttaacccaagatggcaaagggatatacctccagaagccagagtggatgatgatggcactgtactcctga

SEQ ID NO: 113599 - DNA, 4744 bp, Homo sapiens
  Payload ID: 2202
  Gene Symbol: CAPN15
  Gene Name: calpain 15
  Uniprot ID: O75808
  ENST ID: ENST00000219611
  CDS Start-End: 364-3624
gccccgcggctgaggagcgggaggccgtccgggcagcgcggccggcggcgagaggggccccgccgctctccggaggcagaagttgtggatcggccggcgggggcgagcgggcccgggggccggggccgcgctgcccgggccgcgaggacgaggcggcgccgccgggctgtggaggcagcagcccagacgcggcacagagagggcctgggagcttgctgcagcttcagacagggagccaggatgggaaccacggactgacctgacctgcgtcctcggggccactgcactgggtgattcacgtgtgcccaggccctgaggtgggccggacctgggagtggcagccacacccactcgcccgggtctatggccacggtcggagagtggtcctgtgtgcgctgcaccttcctgaacccggccggccagcgccagtgctccatctgcgaggctccccggcacaagcccgacctcaaccacatcctgcggctcagcgtggaggagcagaaatggccctgcgcccgctgcaccttccgcaacttcctgggcaaggaggcctgcgaggtgtgcggcttcaccccggagcctgcgcctggggctgccttcctgccagtcctcaacggggtcctccccaagccacccgccatcctgggggagcccaagggcagctgccaggaggaagcaggtccagtgaggactgcggggctggtggccacggagcccgccagggggcagtgcgaggacaaggacgaggaggagaaggaggagcaggaggaggaggagggagcggcggagcccagagggggctgggcgtgtccgcgttgcacgctgcacaacacgcccgtggccagctcctgctccgtctgcgggggcccacgcaggctctcgctgccacggatccctcctgaggccctggtggtcccggaagtggtggccccggccggcttccacgtcgtgcctgccgcgcctccacctggcctccccggggaaggtgccgaggccaaccccccagccaccagccagggcccagctgccgaaccagagccgcccagggtcccgcccttcagccccttctcgtccaccctgcagaacaaccccgtgccgcgcagccgacgcgaggttcccccccagctgcagccaccggtgcctgaggctgcccagccgtcaccctctgccggctgcaggggagccccccagggctcgggctgggctggggcctcccgcctagcagagttgctgtctggcaagcggctgagtgtgctggaggaagaggccacggagggtggcaccagccgcgtagaggccggcagctccacctcgggcagtgacatcattgacctggccggagacaccgtgcgttacacgcccgccagcccctccagccccgacttcaccacctggtcatgtgccaagtgcacgctcagaaaccccacagtggcccccaggtgctcggcctgcggctgctccaaactgcacggcttccaggagcatggcgagccccccacccactgccccgactgtggggccgacaagcccagcccctgcggcagaagctgcggacgggtgtcctcggcccagaaggccgcccgcgtcctgcccgagcgcccgggccagtgggcctgccctgcctgtaccctgctcaacgcactgcgggccaagcactgcgccgcctgccacacgcctcagctcctggtggcccagcggcggggggccgcgcccctgaggcgcagggagagcatgcacgtggagcagcggcggcagacagacgagggcgaggccaaggcactctgggagaacatcgtggccttctgccgggagaacaatgtgagcttcgtggatgacagcttccctcccgggcccgagtctgtcggcttccccgcgggtgacagcgtgcagcagcgtgtgaggcagtggctgcgaccccaggagatcaactgctccgtcttcagggaccacagggccacgtggtctgtgttccacacactgcggccctcagacatcctgcaggggctgctggggaactgctggttcctgagcgccctggcggtgctggcggagcggccggacctggtggagcgggtgatggtcacgcgcagcctgtgtgcagagggcgcctaccaggtgcggctgtgcaaggacggcacgtggaccacggtgctggtggacgacatgctgccctgtgatgaggccggctgcctcctcttctcacaggcgcagcggaagcagctgtgggtggccctcatcgagaaggcgctggccaagctgcacggctcctactttgcgctccaggcgggccgcgccatcgaaggcctggccacgctcaccggcgccccctgtgagagcctggcgctgcagctcagctccactaacccccgcgaggagcccgttgacactgacctcatctgggccaaaatgctgagttctaaggaggctgggttcctcatgggtgcctcctgtggcgggggcaacatgaaggtggacgattcggcctacgagagcctgggcctgcgcccccggcatgcctactccatcctggatgtccgagatgtccagggcaccaggcttctgcggctccgaaacccgtggggccgtttctcctggaacggcagctggtccgacgagtggccacactggccggggcacctgcgtggcgagctcatgccgcacggcagcagtgagggtgtcttctggatggagtacggcgactttgtcaggtacttcgactccgtggacatctgtaaggtgcactcggactggcaggaggcgcgggtgcagggctgctttcccagctcggccagcgcgcccgtgggggtaacagcgctcacggtgctggagcgggcctcgctggagttcgcgctcttccaggagggcagcaggcgctcggacgccgtggacagccacctgctggacctgtgcatcctggtgttccgggccacgttcggcagcggcggccacctcagcctgggccgcctcctggcccacagtaagcgcgcggtcaagaagttcgtcagctgcgacgtcatgctggagcctggcgagtacgctgtggtgtgctgcgccttcaaccactgggggccgcccctgccgggcacccctgccccccaggcctccagcccctcggcaggggtcccgagagcctccccagagccgccgggccacgtgctggctgtgtacagctcgaggctggtcatggtggagcccgtggaagcccagccgaccacgctggccgacgccatcatcctgctcaccgagagccgcggagagcggcacgagggccgtgagggcatgacctgctactacctgacacacggttgggcggggctcatcgtggtggtggagaaccgacaccccaaggcctacctgcacgtgcagtgtgactgcaccgacagcttcaacgtggtgtccacacgcggcagcctgcgtacccaggatagcgtgccacccctgcacaggcaggtcctggtgatcttgtcccagctagagggcaacgccggcttctctatcacccaccgcctggcacatcgcaaggcagcccaggccttcctcagtgactggacagcctccaaggggacccacagccccccactcacgccagaggtcgccggtctgcatgggccccgaccgctgtgaccaccatgcctggggcaggggctgtgcacagacggaccccccacccccacacgcactttatgagggagaccccgacagaggacgcttgagccagaatctcaggaccccgcccagggagctgccagcccagggctcagcttcccatgggccccccgcccccctccttcccctccctgaaccccacagtccgcctggccaggcctcctggccgccacgcagaatacctcgaaccaggcgggctgtgaaccagccccgctcacctgccagccccaacacccgacgggggccgaggccaggctgcccctccctgtgggctcagggtctcctgcgggctaggcagccaggagctctgtccgcaaaaccaaatctgggtgtcagaggccaagaccctggggtgggatcagggaccacccctcacggggcataaggtcagttttcccccagagcccgggtccctgtcccccacagggcaggcggggtccctggagccctggtgtggagcggcgagtcccggggcggtgcctgtctcagaagaaggggcccttggccagccccccagcgacactatgcaaatcctggagtgcccgccaggatcgaagccatgactgggtgcaggcgggcgccaggcccgctgtgggtgggcaccagttctcagcaccgctcactgctgccgggcacactgggaccagcaggctcctcagccaaccctgtccctcggcccggccctgccagagagggaccccagcacatcgtgggcacgggcagggctcagccgctcccacctccccacagaagcccaggagtgtgtggacgtctgagcccagctttctgcgtgccctcctggcccctcactcccggcagcgggccggcctcgcccccactccccctcctaccccggcaggggcttccggggccttttcacctggagaaacattcccactcccctttggcctccctgtactctgagctgtgaatatttttaaccctgtaaatacggccagctcttgtgacacagagactattttatcaattgtcagtcccgttcctttaccataggattctccacagtggcttccgactcaggctccaatggaccaaataaaagcgttttgttttgtaa

SEQ ID NO: 113600 - DNA, 942 bp, Homo sapiens
  Payload ID: 2202
  Gene Symbol: CAPN15
  Gene Name: calpain 15
  ENST ID: ENST00000562370
  CDS Start-End: 389-942
ccgggcgcgcgattcacagcgccgcgtgcgccccgggcgcgccgtagccgcggggcccgggccgggcgctacgctacgaaggcagcgtaaggcgggcgccggacgcgggcaggggccggggccggagccgggtcggggcgccccgcggctgaggagcgggaggccgtccgggcagcgcggccggcggcgagaggggccccgccgctctccggaggcagaagttgtggatcggccggcgggggcgagcgggcccgggggccggggccgcgctgcccgggccgcgaggacgaggcggcgccgccgggctgtggaggcagcagcccagacgcggcacagagagggcctgggagcttgctgcagcttcagccacacccactcgcccgggtctatggccacggtcggagagtggtcctgtgtgcgctgcaccttcctgaacccggccggccagcgccagtgctccatctgcgaggctccccggcacaagcccgacctcaaccacatcctgcggctcagcgtggaggagcagaaatggccctgcgcccgctgcaccttccgcaacttcctgggcaaggaggcctgcgaggtgtgcggcttcaccccggagcctgcgcctggggctgccttcctgccagtcctcaacggggtcctccccaagccacccgccatcctgggggagcccaagggcagctgccaggaggaagcaggtccagtgaggactgcggggctggtggccacggagcccgccagggggcagtgcgaggacaaggacgaggaggagaaggaggagcaggaggaggaggagggagcggcggagcccagagggggctgggcgtgtccgcgttgcacgctgcacaacacgcccgtggccagctcctgctccgtctgcgggggcccacgcaggctctcgctgccacggatccctcctgaggccctggtggtccc

SEQ ID NO: 113601 - DNA, 911 bp, Homo sapiens
  Payload ID: 2202
  Gene Symbol: CAPN15
  Gene Name: calpain 15
  ENST ID: ENST00000568988
  CDS Start-End: 575-911
gggcaggggccggggccggagccgggtcggggcgccccgcggctgaggagcgggaggccgtccgggcagcgcggccggcggcgagaggggccccgccgctctccggaggcagaagttgtggatcggccggcgggggcgagcgggcccgggggccggggccgcgctgcccgggccgcgaggacgaggcggcgccgccgggctgtggaggcagcagcccagacgcggcacagagagggcctgggagcttgctgcagcttcagaacaaccccgtgccgcgcagccgacgcgaggttcccccccagctgcagccaccggtgcctgaggctgcccagccgtcaccctctgccggctgcaggggagccccccagggctcgggctgggctggggcctcccgcctagcagagttgctgtctggcaagcggctgagtgtgctggaggaagaggccacggagggtggcaccagccgcgtagaggccggcagctccacctcgggcagtgacatcattgacctggccggagacaccgtgcgttacacgcccgccagcccctccagccccgacttcaccacctggtcatgtgccaagtgcacgctcagaaaccccacagtggcccccaggtgctcggcctgcggctgctccaaactgcacggcttccaggagcatggcgagccccccacccactgccccgactgtggggccgacaagcccagcccctgcggcagaagctgcggacgggtgtcctcggcccagaaggccgcccgcgtcctgcccgagcgcccgggccagtgggcctgccctgcctgtaccctgctcaacgcactgcgggccaagcactgcgccgcctgccacacgcctcagctcctggtggcccagcggcggggggccgcgcccctgaggcgcagggagagcatg

SEQ ID NO: 113602 - DNA, 279 bp, Homo sapiens
  Payload ID: 2202
  Gene Symbol: CAPN15
  Gene Name: calpain 15
  ENST ID: ENST00000566977
  CDS Start-End: 1-215
gcggagagcggcacgagggccgtgagggcatgacctgctactacctgacacacggttgggcggggctcatcgtggtggtggagaaccgacaccccaaggcctacctgcacgtgcagtgtgactgcaccgacagcttcaacgtggtgtccacacgcggcagcctgcgtacccaggatagcgtgccacccctgcacagtcccgttcctttaccataggattctccacagtggcttccgactcaggctccaatggaccaaataaaagcgttttgttttgtaa

SEQ ID NO: 113603 - DNA, 3573 bp, Homo sapiens
  Payload ID: 2203
  Gene Symbol: CAPN2
  Gene Name: calpain 2, (m/II) large subunit
  Uniprot ID: P17655
  ENST ID: ENST00000295006
  CDS Start-End: 310-2412
cctccccggcgccgggccgcgccatcccgggagctgtccgcagatggcagcaccggccccgggtcgcggcgttcccggcgctcggcaggccgcaggatggcctggtcccgggccgggagcccagcaggccgggagcggctgaggccacaccccgcgggccgggccgcttccctccggtgaatcatcgctcgcagcggcggcgcccgcagtggccgcagcagcgcgccgggccctggccgcgccccagccgagcgcagcgcggagtcgccccgacctttctctgcgcagtacggccgccgggaccgcagcatggcgggcatcgcggccaagctggcgaaggaccgggaggcggccgaggggctgggctcccacgacagggccatcaagtacctcaaccaggactacgaggcgctgcggaacgagtgcctggaggccgggacgctcttccaggacccgtccttcccggccatcccctcggccctgggcttcaaggagttggggccctactccagcaaaacccggggcatcgagtggaagcgccccacggagatctgcgctgacccccagtttatcattggaggagccacccgcacagacatctgccaaggagccctgggtgactgctggctgctggcagccattgcctccctcaccttgaatgaagaaatcctggctcgagtcgtccccctaaaccagagcttccaggaaaactatgcagggatctttcacttccagttctggcaatacggcgagtgggtggaggtggtggtggatgacaggctgcccaccaaggacggggagctgctctttgtgcattcagccgaagggagcgagttctggagcgccctgctggagaaggcatacgccaagatcaacggatgctatgaagcgctatcagggggtgccaccactgagggcttcgaagacttcaccggaggcattgctgagtggtatgagttgaagaagccccctcccaacctgttcaagatcatccagaaagctctgcaaaaaggctctctccttggctgctccatcgacatcaccagcgccgcggactcggaggccatcacgtttcagaagctggtgaaggggcacgcgtactcggtcaccggagccgaggaggttgaaagtaacggaagcctacagaaactgatccgcatccgaaatccctggggagaagtggagtggacagggcggtggaatgacaactgcccaagctggaacactatagacccagaggagagggaaaggctgaccagacggcatgaagatggagaattctggatgtctttcagtgacttcctgaggcactattcccgcctggagatctgtaacctgaccccagacactctcaccagcgatacctacaagaagtggaaactcaccaaaatggatgggaactggaggcggggctccaccgcgggaggttgcaggaactacccgaacacattctggatgaaccctcagtacctgatcaagctggaggaggaggatgaggacgaggaggatggggagagcggctgcaccttcctggtggggctcattcagaagcaccgacggcggcagaggaagatgggcgaggacatgcacaccatcggctttggcatctatgaggttccagaggagttaagtgggcagaccaacatccacctcagcaaaaacttcttcctgacgaatcgcgccagggagcgctcagacaccttcatcaacctccgggaggtgctcaaccgcttcaagctgccgccaggagagtacattctcgtgccttccaccttcgaacccaacaaggatggggatttctgcatccgggtcttttctgaaaagaaagctgactaccaagctgtcgatgatgaaatcgaggccaatcttgaagagttcgacatcagcgaggatgacattgatgatggattcaggagactgtttgcccagttggcaggagaggatgcggagatctctgcctttgagctgcagaccatcctgagaagggttctagcaaagcgccaagatatcaagtcagatggcttcagcatcgagacatgcaaaattatggttgacatgctagattcggacgggagtggcaagctggggctgaaggagttctacattctctggacgaagattcaaaaataccaaaaaatttaccgagaaatcgacgttgacaggtctggtaccatgaattcctatgaaatgcggaaggcattagaagaagcaggtttcaagatgccctgtcaactccaccaagtcatcgttgctcggtttgcagatgaccagctcatcatcgattttgataattttgttcggtgtttggttcggctggaaacgctattcaagatatttaagcagctggatcccgagaatactggaacaatagagctcgaccttatctcttggctctgtttctcagtactttgaagttataactaatctgcctgaagacttctcatgatggaaaatcagccaaggactaagcttccatagaaatacactttgtatctggacctcaaaattatgggaacatttacttaaacggatgatcatagctgaaaataatgatactgtcaatttgagatagcagaagtttcacacatcaaagtaaaagatttgcatatcattatactaaatgcaaatgagtcgcttaacccttgacaaggtcaaagaaagctttaaatctgtaaatagtatacactttttacttttacacactttcctgttcatagcaatattaaatcaggaaaaaaaaatgcagggaggtatttaacagctgagcaaaaacattgagtcgctctcaaaggacacgaggcccttggcagggaatatttaaagcaacttcaagtttaaaatgcagctgttgattctaccaaacaacagtccaagattaccatttcccatgagccaactgggaaacatggtatatcatgaagtaatcttgtcaaggcatctggagagtccaggagagaagactcacctctgtcgcttgggttaaacaagagacaggttttgtagaatattgattggtaatagtaaatcgttctccttacaatcaagttcttgaccctattcggccttatacatctggtcttacaaagaccaaagggatcctgcgcttgatcaactgaaccagtatgccaaaaccaggcatccaatttgtaaaccaattatgataaaggacaaaataagctgtttgccacctcaaaactttatgaacttcaccaccactagtgtctgtccatggagttagaggggacatcacttagaagttcttatagaaaggacacaagtttgtttcctggctttaccttgggaaaatgctagcaacattatagaaattttgccttgttgccttatcttcttccaaatgtactgttaaataaaaataaagggttaccccatgcaatcacaccatgccatgttttccttcctggagggcagccccacaggacggtttatgagcacacaattatagcttgtttctactttaacaaggtatgctgcctctgtaaattcatgtattcaaaggaaaagacaccttgcctataattaaaatgtggaactataaaattttttaaaatccaa

SEQ ID NO: 113604 - DNA, 577 bp, Homo sapiens
  Payload ID: 2203
  Gene Symbol: CAPN2
  Gene Name: calpain 2, (m/II) large subunit
  ENST ID: ENST00000434648
  CDS Start-End: 185-577
caaaggaacgaatttccaggatgttcgactatgtggagaaaacaaaaaaaaagcaaagaaaaaaatatttttaaagaaagaaagaaggccaggtgcagtggttcacgcctgtaatcccaacactttgggaggccgaggcagacagatcacctgaggtcaggagttcaagaccagcctggccaacatggagatctgcgctgacccccagtttatcattggaggagccacccgcacagacatctgccaaggagccctgggtgactgctggctgctggcagccattgcctccctcaccttgaatgaagaaatcctggctcgagtcgtccccctaaaccagagcttccaggaaaactatgcagggatctttcacttccagttctggcaatacggcgagtgggtggaggtggtggtggatgacaggctgcccaccaaggacggggagctgctctttgtgcattcagccgaagggagcgagttctggagcgccctgctggagaaggcatacgccaagatcaacggatgctatgaagcgctatcagggggtgccaccactgagggcttcgaagacttcaccgga

SEQ ID NO: 113605 - DNA, 3264 bp, Homo sapiens
  Payload ID: 2203
  Gene Symbol: CAPN2
  Gene Name: calpain 2, (m/II) large subunit
  Uniprot ID: P17655
  ENST ID: ENST00000433674
  CDS Start-End: 237-2105
actcagactctgatggctctgtagctaactggcccatcctcagagactaacgcaaaggaacgaatttccaggatgttcgactatgtggagaaaacaaaaaaaaagcaaagaaaaaaatatttttaaagaaagaaagaaggccaggtgcagtggttcacgcctgtaatcccaacactttgggaggccgaggcagacagatcacctgaggtcaggagttcaagaccagcctggccaacatggagatctgcgctgacccccagtttatcattggaggagccacccgcacagacatctgccaaggagccctgggtgactgctggctgctggcagccattgcctccctcaccttgaatgaagaaatcctggctcgagtcgtccccctaaaccagagcttccaggaaaactatgcagggatctttcacttccagttctggcaatacggcgagtgggtggaggtggtggtggatgacaggctgcccaccaaggacggggagctgctctttgtgcattcagccgaagggagcgagttctggagcgccctgctggagaaggcatacgccaagatcaacggatgctatgaagcgctatcagggggtgccaccactgagggcttcgaagacttcaccggaggcattgctgagtggtatgagttgaagaagccccctcccaacctgttcaagatcatccagaaagctctgcaaaaaggctctctccttggctgctccatcgacatcaccagcgccgcggactcggaggccatcacgtttcagaagctggtgaaggggcacgcgtactcggtcaccggagccgaggaggttgaaagtaacggaagcctacagaaactgatccgcatccgaaatccctggggagaagtggagtggacagggcggtggaatgacaactgcccaagctggaacactatagacccagaggagagggaaaggctgaccagacggcatgaagatggagaattctggatgtctttcagtgacttcctgaggcactattcccgcctggagatctgtaacctgaccccagacactctcaccagcgatacctacaagaagtggaaactcaccaaaatggatgggaactggaggcggggctccaccgcgggaggttgcaggaactacccgaacacattctggatgaaccctcagtacctgatcaagctggaggaggaggatgaggacgaggaggatggggagagcggctgcaccttcctggtggggctcattcagaagcaccgacggcggcagaggaagatgggcgaggacatgcacaccatcggctttggcatctatgaggttccagaggagttaagtgggcagaccaacatccacctcagcaaaaacttcttcctgacgaatcgcgccagggagcgctcagacaccttcatcaacctccgggaggtgctcaaccgcttcaagctgccgccaggagagtacattctcgtgccttccaccttcgaacccaacaaggatggggatttctgcatccgggtcttttctgaaaagaaagctgactaccaagctgtcgatgatgaaatcgaggccaatcttgaagagttcgacatcagcgaggatgacattgatgatggattcaggagactgtttgcccagttggcaggagaggatgcggagatctctgcctttgagctgcagaccatcctgagaagggttctagcaaagcgccaagatatcaagtcagatggcttcagcatcgagacatgcaaaattatggttgacatgctagattcggacgggagtggcaagctggggctgaaggagttctacattctctggacgaagattcaaaaataccaaaaaatttaccgagaaatcgacgttgacaggtctggtaccatgaattcctatgaaatgcggaaggcattagaagaagcaggtttcaagatgccctgtcaactccaccaagtcatcgttgctcggtttgcagatgaccagctcatcatcgattttgataattttgttcggtgtttggttcggctggaaacgctattcaagatatttaagcagctggatcccgagaatactggaacaatagagctcgaccttatctcttggctctgtttctcagtactttgaagttataactaatctgcctgaagacttctcatgatggaaaatcagccaaggactaagcttccatagaaatacactttgtatctggacctcaaaattatgggaacatttacttaaacggatgatcatagctgaaaataatgatactgtcaatttgagatagcagaagtttcacacatcaaagtaaaagatttgcatatcattatactaaatgcaaatgagtcgcttaacccttgacaaggtcaaagaaagctttaaatctgtaaatagtatacactttttacttttacacactttcctgttcatagcaatattaaatcaggaaaaaaaaatgcagggaggtatttaacagctgagcaaaaacattgagtcgctctcaaaggacacgaggcccttggcagggaatatttaaagcaacttcaagtttaaaatgcagctgttgattctaccaaacaacagtccaagattaccatttcccatgagccaactgggaaacatggtatatcatgaagtaatcttgtcaaggcatctggagagtccaggagagaagactcacctctgtcgcttgggttaaacaagagacaggttttgtagaatattgattggtaatagtaaatcgttctccttacaatcaagttcttgaccctattcggccttatacatctggtcttacaaagaccaaagggatcctgcgcttgatcaactgaaccagtatgccaaaaccaggcatccaatttgtaaaccaattatgataaaggacaaaataagctgtttgccacctcaaaactttatgaacttcaccaccactagtgtctgtccatggagttagaggggacatcacttagaagttcttatagaaaggacacaagtttgtttcctggctttaccttgggaaaatgctagcaacattatagaaattttgccttgttgccttatcttcttccaaatgtactgttaaataaaaataaagggttaccccatgcaatcacaccatgccatgttttccttcctggagggcagccccacaggacggtttatgagcacacaattatagcttgtttctactttaacaaggtatgctgcctctgtaaattcatgtattcaaaggaaaagacaccttgcctataattaaaatgtggaactataaaattttttaaaatcc

SEQ ID NO: 113606 - DNA, 2955 bp, Homo sapiens
  Payload ID: 2204
  Gene Symbol: CAPN3
  Gene Name: calpain 3
  Uniprot ID: P20807
  ENST ID: ENST00000349748
  CDS Start-End: 222-2411
atttctcaggagaacttatggcttcagaatcacagctcggtttttaagatggacataacctgtacgaccttctgatgggctttcaactttgaactggatgtggacacttttctctcagatgacagaattactccaacttcccctttgcagttgcttcctttccttgaaggtagctgtatcttattttctttaaaaagctttttcttccaaagccacttgccatgccgaccgtcattagcgcatctgtggctccaaggacagcggctgagccccggtccccagggccagttcctcacccggcccagagcaaggccactgaggctgggggtggaaacccaagtggcatctattcagccatcatcagccgcaattttcctattatcggagtgaaagagaagacattcgagcaacttcacaagaaatgtctagaaaagaaagttctttatgtggaccctgagttcccaccggatgagacctctctcttttatagccagaagttccccatccagttcgtctggaagagacctccggaaatttgcgagaatccccgatttatcattgatggagccaacagaactgacatctgtcaaggagagctaggggactgctggtttctcgcagccattgcctgcctgaccctgaaccagcaccttcttttccgagtcataccccatgatcaaagtttcatcgaaaactacgcagggatcttccacttccagttctggcgctatggagagtgggtggacgtggttatagatgactgcctgccaacgtacaacaatcaactggttttcaccaagtccaaccaccgcaatgagttctggagtgctctgctggagaaggcttatgctaagctccatggttcctacgaagctctgaaaggtgggaacaccacagaggccatggaggacttcacaggaggggtggcagagttttttgagatcagggatgctcctagtgacatgtacaagatcatgaagaaagccatcgagagaggctccctcatgggctgctccattgatacaatcattccggttcagtatgagacaagaatggcctgcgggctggtcagaggtcacgcctactctgtcacggggctggatgaggtcccgttcaaaggtgagaaagtgaagctggtgcggctgcggaatccgtggggccaggtggagtggaacggttcttggagtgatagatggaaggactggagctttgtggacaaagatgagaaggcccgtctgcagcaccaggtcactgaggatggagagttctggatgtcctatgaggatttcatctaccatttcacaaagttggagatctgcaacctcacggccgatgctctgcagtctgacaagcttcagacctggacagtgtctgtgaacgagggccgctgggtacggggttgctctgccggaggctgccgcaacttcccagatactttctggaccaaccctcagtaccgtctgaagctcctggaggaggacgatgaccctgatgactcggaggtgatttgcagcttcctggtggccctgatgcagaagaaccggcggaaggaccggaagctaggggccagtctcttcaccattggcttcgccatctacgaggttcccaaagagatgcacgggaacaagcagcacctgcagaaggacttcttcctgtacaacgcctccaaggccaggagcaaaacctacatcaacatgcgggaggtgtcccagcgcttccgcctgcctcccagcgagtacgtcatcgtgccctccacctacgagccccaccaggagggggaattcatcctccgggtcttctctgaaaagaggaacctctctgaggaagttgaaaataccatctccgtggatcggccagtgccacagcctggcagctctgatcaggaaagtgaggaacagcaacaattccggaacattttcaagcagatagcaggagatgacatggagatctgtgcagatgagctcaagaaggtccttaacacagtcgtgaacaaacacaaggacctgaagacacacgggttcacactggagtcctgccgtagcatgattgcgctcatggatacagatggctctggaaagctcaacctgcaggagttccaccacctctggaacaagattaaggcctggcagaaaattttcaaacactatgacacagaccagtccggcaccatcaacagctacgagatgcgaaatgcagtcaacgacgcaggattccacctcaacaaccagctctatgacatcattaccatgcggtacgcagacaaacacatgaacatcgactttgacagtttcatctgctgcttcgttaggctggagggcatgttcagagcttttcatgcatttgacaaggatggagatggtatcatcaagctcaacgttctggagtggctgcagctcaccatgtatgcctgaaccaggctggcctcatccaaagccatgcaggatcactcaggatttcagtttcaccctctatttccaaagccatttacctcaaaggacccagcagctacacccctacaggcttccaggcacctcatcagtcatgctcctcctccattttaccccctacccatccttgatcggtcatgcctagcctgaccctttagtaaagcaatgaggtaggaagaacaaacccttgtccctttgccatgtggaggaaagtgcctgcctctggtccgagccgcctcggttctgaagcgagtgctcctgcttaccttgctctaggctgtctgcagaagcacctgccggtggcactcagcacctccttgtgctagagccctccatcaccttcacgctgtcccaccatgggccaggaaccaaaccagcactgggttctactgctgtggggtaaactaactcagtggaatagggctggttactttgggctgtccaactcataagtttggctgcattttgaaaaaagctgatctaaataaaggcatgtgtatggctggtc

SEQ ID NO: 113607 - DNA, 3172 bp, Homo sapiens
  Payload ID: 2204
  Gene Symbol: CAPN3
  Gene Name: calpain 3
  ENST ID: ENST00000318023
  CDS Start-End: 307-2628
cactctctttctctctccctctggcatgcatgctgctggtaggagacccccaagtcaacattgcttcagaaatcctttagcactcatttctcaggagaacttatggcttcagaatcacagctcggtttttaagatggacataacctgtacgaccttctgatgggctttcaactttgaactggatgtggacacttttctctcagatgacagaattactccaacttcccctttgcagttgcttcctttccttgaaggtagctgtatcttattttctttaaaaagctttttcttccaaagccacttgccatgccgaccgtcattagcgcatctgtggctccaaggacagcggctgagccccggtccccagggccagttcctcacccggcccagagcaaggccactgaggctgggggtggaaacccaagtggcatctattcagccatcatcagccgcaattttcctattatcggagtgaaagagaagacattcgagcaacttcacaagaaatgtctagaaaagaaagttctttatgtggaccctgagttcccaccggatgagacctctctcttttatagccagaagttccccatccagttcgtctggaagagacctccggaaatttgcgagaatccccgatttatcattgatggagccaacagaactgacatctgtcaaggagagctaggggactgctggtttctcgcagccattgcctgcctgaccctgaaccagcaccttcttttccgagtcataccccatgatcaaagtttcatcgaaaactacgcagggatcttccacttccagttctggcgctatggagagtgggtggacgtggttatagatgactgcctgccaacgtacaacaatcaactggttttcaccaagtccaaccaccgcaatgagttctggagtgctctgctggagaaggcttatgctaagctccatggttcctacgaagctctgaaaggtgggaacaccacagaggccatggaggacttcacaggaggggtggcagagttttttgagatcagggatgctcctagtgacatgtacaagatcatgaagaaagccatcgagagaggctccctcatgggctgctccattgatacaatcattccggttcagtatgagacaagaatggcctgcgggctggtcagaggtcacgcctactctgtcacggggctggatgaggtcccgttcaaaggtgagaaagtgaagctggtgcggctgcggaatccgtggggccaggtggagtggaacggttcttggagtgatagatggaaggactggagctttgtggacaaagatgagaaggcccgtctgcagcaccaggtcactgaggatggagagttctggatgtcctatgaggatttcatctaccatttcacaaagttggagatctgcaacctcacggccgatgctctgcagtctgacaagcttcagacctggacagtgtctgtgaacgagggccgctgggtacggggttgctctgccggaggctgccgcaacttcccagatactttctggaccaaccctcagtaccgtctgaagctcctggaggaggacgatgaccctgatgactcggaggtgatttgcagcttcctggtggccctgatgcagaagaaccggcggaaggaccggaagctaggggccagtctcttcaccattggcttcgccatctacgaggttcccaaagagatgcacgggaacaagcagcacctgcagaaggacttcttcctgtacaacgcctccaaggccaggagcaaaacctacatcaacatgcgggaggtgtcccagcgcttccgcctgcctcccagcgagtacgtcatcgtgccctccacctacgagccccaccaggagggggaattcatcctccgggtcttctctgaaaagaggaacctctctgaggaagttgaaaataccatctccgtggatcggccagtgaaaaagaaaaaaaccaagcccatcatcttcgtttcggacagagcaaacagcaacaaggagctgggtgtggaccaggagtcagaggagggcaaaggcaaaacaagccctgataagcaaaagcagtccccacagccacagcctggcagctctgatcaggaaagtgaggaacagcaacaattccggaacattttcaagcagatagcaggagatgacatggagatctgtgcagatgagctcaagaaggtccttaacacagtcgtgaacaaacacaaggacctgaagacacacgggttcacactggagtcctgccgtagcatgattgcgctcatggatacagatggctctggaaagctcaacctgcaggagttccaccacctctggaacaagattaaggcctggcagaaaattttcaaacactatgacacagaccagtccggcaccatcaacagctacgagatgcgaaatgcagtcaacgacgcaggattccacctcaacaaccagctctatgacatcattaccatgcggtacgcagacaaacacatgaacatcgactttgacagtttcatctgctgcttcgttaggctggagggcatgttcagagcttttcatgcatttgacaaggatggagatggtatcatcaagctcaacgttctggagtggctgcagctcaccatgtatgcctgaaccaggctggcctcatccaaagccatgcaggatcactcaggatttcagtttcaccctctatttccaaagccatttacctcaaaggacccagcagctacacccctacaggcttccaggcacctcatcagtcatgctcctcctccattttaccccctacccatccttgatcggtcatgcctagcctgaccctttagtaaagcaatgaggtaggaagaacaaacccttgtccctttgccatgtggaggaaagtgcctgcctctggtccgagccgcctcggttctgaagcgagtgctcctgcttaccttgctctaggctgtctgcagaagcacctgccggtggcactcagcacctccttgtgctagagccctccatcaccttcacgctgtcccaccatgggccaggaaccaaaccagcactgggttctactgctgtggggtaaactaactcagtggaatagggctggttactttgggctgtccaactcataagtttggctgcattttgaaaaaagctgatctaaataaaggcatgtgtatggctggtc

SEQ ID NO: 113608 - DNA, 1271 bp, Homo sapiens
  Payload ID: 2204
  Gene Symbol: CAPN3
  Gene Name: calpain 3
  Uniprot ID: P20807
  ENST ID: ENST00000337571
  CDS Start-End: 259-729
cataatcctgaccctgagccagtgccaggtctccaagtgccttctgaatgaccacaggcgattggttttagtggtaggtgtgtggggatctgttctggtcatctggatgctggtcatcggtgtgcagtattgatcaggacctgcaaacccaaaagcttatgggagctggcacgtcacccacagcctggcagctctgatcaggaaagtgaggaacagcaacaattccggaacattttcaagcagatagcaggagatgacatggagatctgtgcagatgagctcaagaaggtccttaacacagtcgtgaacaaacacaaggacctgaagacacacgggttcacactggagtcctgccgtagcatgattgcgctcatggatacagatggctctggaaagctcaacctgcaggagttccaccacctctggaacaagattaaggcctggcagaaaattttcaaacactatgacacagaccagtccggcaccatcaacagctacgagatgcgaaatgcagtcaacgacgcaggattccacctcaacaaccagctctatgacatcattaccatgcggtacgcagacaaacacatgaacatcgactttgacagtttcatctgctgcttcgttaggctggagggcatgttcagagcttttcatgcatttgacaaggatggagatggtatcatcaagctcaacgttctggagtggctgcagctcaccatgtatgcctgaaccaggctggcctcatccaaagccatgcaggatcactcaggatttcagtttcaccctctatttccaaagccatttacctcaaaggacccagcagctacacccctacaggcttccaggcacctcatcagtcatgctcctcctccattttaccccctacccatccttgatcggtcatgcctagcctgaccctttagtaaagcaatgaggtaggaagaacaaacccttgtccctttgccatgtggaggaaagtgcctgcctctggtccgagccgcctcggttctgaagcgagtgctcctgcttaccttgctctaggctgtctgcagaagcacctgccggtggcactcagcacctccttgtgctagagccctccatcaccttcacgctgtcccaccatgggccaggaaccaaaccagcactgggttctactgctgtggggtaaactaactcagtggaatagggctggttactttgggctgtccaactcataagtttggctgcattttgaaaaaagctgatctaaataaaggcatgtgtatggctgg

SEQ ID NO: 113609 - DNA, 1291 bp, Homo sapiens
  Payload ID: 2204
  Gene Symbol: CAPN3
  Gene Name: calpain 3
  Uniprot ID: P20807
  ENST ID: ENST00000356316
  CDS Start-End: 277-747
cataatcctgaccctgagccagtgccaggtctccaagtgccttctgaatgaccacaggcgattggttttagtggtaggtgtgtggggatctgttctggtcatctggatgctggtcatcggtgtgcagtattgatcaggacctgcaaacccaaaagcttatgggagctggcacgtcacgtgagtagacctccacagccacagcctggcagctctgatcaggaaagtgaggaacagcaacaattccggaacattttcaagcagatagcaggagatgacatggagatctgtgcagatgagctcaagaaggtccttaacacagtcgtgaacaaacacaaggacctgaagacacacgggttcacactggagtcctgccgtagcatgattgcgctcatggatacagatggctctggaaagctcaacctgcaggagttccaccacctctggaacaagattaaggcctggcagaaaattttcaaacactatgacacagaccagtccggcaccatcaacagctacgagatgcgaaatgcagtcaacgacgcaggattccacctcaacaaccagctctatgacatcattaccatgcggtacgcagacaaacacatgaacatcgactttgacagtttcatctgctgcttcgttaggctggagggcatgttcagagcttttcatgcatttgacaaggatggagatggtatcatcaagctcaacgttctggagtggctgcagctcaccatgtatgcctgaaccaggctggcctcatccaaagccatgcaggatcactcaggatttcagtttcaccctctatttccaaagccatttacctcaaaggacccagcagctacacccctacaggcttccaggcacctcatcagtcatgctcctcctccattttaccccctacccatccttgatcggtcatgcctagcctgaccctttagtaaagcaatgaggtaggaagaacaaacccttgtccctttgccatgtggaggaaagtgcctgcctctggtccgagccgcctcggttctgaagcgagtgctcctgcttaccttgctctaggctgtctgcagaagcacctgccggtggcactcagcacctccttgtgctagagccctccatcaccttcacgctgtcccaccatgggccaggaaccaaaccagcactgggttctactgctgtggggtaaactaactcagtggaatagggctggttactttgggctgtccaactcataagtttggctgcattttgaaaaaagctgatctaaataaaggcatgtgtatggctggtc

SEQ ID NO: 113610 - DNA, 2669 bp, Homo sapiens
  Payload ID: 2204
  Gene Symbol: CAPN3
  Gene Name: calpain 3
  Uniprot ID: P20807
  ENST ID: ENST00000357568
  CDS Start-End: 222-2669
atttctcaggagaacttatggcttcagaatcacagctcggtttttaagatggacataacctgtacgaccttctgatgggctttcaactttgaactggatgtggacacttttctctcagatgacagaattactccaacttcccctttgcagttgcttcctttccttgaaggtagctgtatcttattttctttaaaaagctttttcttccaaagccacttgccatgccgaccgtcattagcgcatctgtggctccaaggacagcggctgagccccggtccccagggccagttcctcacccggcccagagcaaggccactgaggctgggggtggaaacccaagtggcatctattcagccatcatcagccgcaattttcctattatcggagtgaaagagaagacattcgagcaacttcacaagaaatgtctagaaaagaaagttctttatgtggaccctgagttcccaccggatgagacctctctcttttatagccagaagttccccatccagttcgtctggaagagacctccggaaatttgcgagaatccccgatttatcattgatggagccaacagaactgacatctgtcaaggagagctaggggactgctggtttctcgcagccattgcctgcctgaccctgaaccagcaccttcttttccgagtcataccccatgatcaaagtttcatcgaaaactacgcagggatcttccacttccagttctggcgctatggagagtgggtggacgtggttatagatgactgcctgccaacgtacaacaatcaactggttttcaccaagtccaaccaccgcaatgagttctggagtgctctgctggagaaggcttatgctaagctccatggttcctacgaagctctgaaaggtgggaacaccacagaggccatggaggacttcacaggaggggtggcagagttttttgagatcagggatgctcctagtgacatgtacaagatcatgaagaaagccatcgagagaggctccctcatgggctgctccattgatgatggcacgaacatgacctatggaacctctccttctggtctgaacatgggggagttgattgcacggatggtaaggaatatggataactcactgctccaggactcagacctcgaccccagaggctcagatgaaagaccgacccggacaatcattccggttcagtatgagacaagaatggcctgcgggctggtcagaggtcacgcctactctgtcacggggctggatgaggtcccgttcaaaggtgagaaagtgaagctggtgcggctgcggaatccgtggggccaggtggagtggaacggttcttggagtgatagatggaaggactggagctttgtggacaaagatgagaaggcccgtctgcagcaccaggtcactgaggatggagagttctggatgtcctatgaggatttcatctaccatttcacaaagttggagatctgcaacctcacggccgatgctctgcagtctgacaagcttcagacctggacagtgtctgtgaacgagggccgctgggtacggggttgctctgccggaggctgccgcaacttcccagatactttctggaccaaccctcagtaccgtctgaagctcctggaggaggacgatgaccctgatgactcggaggtgatttgcagcttcctggtggccctgatgcagaagaaccggcggaaggaccggaagctaggggccagtctcttcaccattggcttcgccatctacgaggttcccaaagagatgcacgggaacaagcagcacctgcagaaggacttcttcctgtacaacgcctccaaggccaggagcaaaacctacatcaacatgcgggaggtgtcccagcgcttccgcctgcctcccagcgagtacgtcatcgtgccctccacctacgagccccaccaggagggggaattcatcctccgggtcttctctgaaaagaggaacctctctgaggaagttgaaaataccatctccgtggatcggccagtgcccatcatcttcgtttcggacagagcaaacagcaacaaggagctgggtgtggaccaggagtcagaggagggcaaaggcaaaacaagccctgataagcaaaagcagtccccacagccacagcctggcagctctgatcaggaaagtgaggaacagcaacaattccggaacattttcaagcagatagcaggagatgacatggagatctgtgcagatgagctcaagaaggtccttaacacagtcgtgaacaaacacaaggacctgaagacacacgggttcacactggagtcctgccgtagcatgattgcgctcatggatacagatggctctggaaagctcaacctgcaggagttccaccacctctggaacaagattaaggcctggcagaaaattttcaaacactatgacacagaccagtccggcaccatcaacagctacgagatgcgaaatgcagtcaacgacgcaggattccacctcaacaaccagctctatgacatcattaccatgcggtacgcagacaaacacatgaacatcgactttgacagtttcatctgctgcttcgttaggctggagggcatgttcagagcttttcatgcatttgacaaggatggagatggtatcatcaagctcaacgttctggagtggctgcagctcaccatgtatgcctga

SEQ ID NO: 113611 - DNA, 3228 bp, Homo sapiens
  Payload ID: 2204
  Gene Symbol: CAPN3
  Gene Name: calpain 3
  Uniprot ID: P20807
  ENST ID: ENST00000397163
  CDS Start-End: 220-2685
ttctcaggagaacttatggcttcagaatcacagctcggtttttaagatggacataacctgtacgaccttctgatgggctttcaactttgaactggatgtggacacttttctctcagatgacagaattactccaacttcccctttgcagttgcttcctttccttgaaggtagctgtatcttattttctttaaaaagctttttcttccaaagccacttgccatgccgaccgtcattagcgcatctgtggctccaaggacagcggctgagccccggtccccagggccagttcctcacccggcccagagcaaggccactgaggctgggggtggaaacccaagtggcatctattcagccatcatcagccgcaattttcctattatcggagtgaaagagaagacattcgagcaacttcacaagaaatgtctagaaaagaaagttctttatgtggaccctgagttcccaccggatgagacctctctcttttatagccagaagttccccatccagttcgtctggaagagacctccggaaatttgcgagaatccccgatttatcattgatggagccaacagaactgacatctgtcaaggagagctaggggactgctggtttctcgcagccattgcctgcctgaccctgaaccagcaccttcttttccgagtcataccccatgatcaaagtttcatcgaaaactacgcagggatcttccacttccagttctggcgctatggagagtgggtggacgtggttatagatgactgcctgccaacgtacaacaatcaactggttttcaccaagtccaaccaccgcaatgagttctggagtgctctgctggagaaggcttatgctaagctccatggttcctacgaagctctgaaaggtgggaacaccacagaggccatggaggacttcacaggaggggtggcagagttttttgagatcagggatgctcctagtgacatgtacaagatcatgaagaaagccatcgagagaggctccctcatgggctgctccattgatgatggcacgaacatgacctatggaacctctccttctggtctgaacatgggggagttgattgcacggatggtaaggaatatggataactcactgctccaggactcagacctcgaccccagaggctcagatgaaagaccgacccggacaatcattccggttcagtatgagacaagaatggcctgcgggctggtcagaggtcacgcctactctgtcacggggctggatgaggtcccgttcaaaggtgagaaagtgaagctggtgcggctgcggaatccgtggggccaggtggagtggaacggttcttggagtgatagatggaaggactggagctttgtggacaaagatgagaaggcccgtctgcagcaccaggtcactgaggatggagagttctggatgtcctatgaggatttcatctaccatttcacaaagttggagatctgcaacctcacggccgatgctctgcagtctgacaagcttcagacctggacagtgtctgtgaacgagggccgctgggtacggggttgctctgccggaggctgccgcaacttcccagatactttctggaccaaccctcagtaccgtctgaagctcctggaggaggacgatgaccctgatgactcggaggtgatttgcagcttcctggtggccctgatgcagaagaaccggcggaaggaccggaagctaggggccagtctcttcaccattggcttcgccatctacgaggttcccaaagagatgcacgggaacaagcagcacctgcagaaggacttcttcctgtacaacgcctccaaggccaggagcaaaacctacatcaacatgcgggaggtgtcccagcgcttccgcctgcctcccagcgagtacgtcatcgtgccctccacctacgagccccaccaggagggggaattcatcctccgggtcttctctgaaaagaggaacctctctgaggaagttgaaaataccatctccgtggatcggccagtgaaaaagaaaaaaaccaagcccatcatcttcgtttcggacagagcaaacagcaacaaggagctgggtgtggaccaggagtcagaggagggcaaaggcaaaacaagccctgataagcaaaagcagtccccacagccacagcctggcagctctgatcaggaaagtgaggaacagcaacaattccggaacattttcaagcagatagcaggagatgacatggagatctgtgcagatgagctcaagaaggtccttaacacagtcgtgaacaaacacaaggacctgaagacacacgggttcacactggagtcctgccgtagcatgattgcgctcatggatacagatggctctggaaagctcaacctgcaggagttccaccacctctggaacaagattaaggcctggcagaaaattttcaaacactatgacacagaccagtccggcaccatcaacagctacgagatgcgaaatgcagtcaacgacgcaggattccacctcaacaaccagctctatgacatcattaccatgcggtacgcagacaaacacatgaacatcgactttgacagtttcatctgctgcttcgttaggctggagggcatgttcagagcttttcatgcatttgacaaggatggagatggtatcatcaagctcaacgttctggagtggctgcagctcaccatgtatgcctgaaccaggctggcctcatccaaagccatgcaggatcactcaggatttcagtttcaccctctatttccaaagccatttacctcaaaggacccagcagctacacccctacaggcttccaggcacctcatcagtcatgctcctcctccattttaccccctacccatccttgatcggtcatgcctagcctgaccctttagtaaagcaatgaggtaggaagaacaaacccttgtccctttgccatgtggaggaaagtgcctgcctctggtccgagccgcctcggttctgaagcgagtgctcctgcttaccttgctctaggctgtctgcagaagcacctgccggtggcactcagcacctccttgtgctagagccctccatcaccttcacgctgtcccaccatgggccaggaaccaaaccagcactgggttctactgctgtggggtaaactaactcagtggaatagggctggttactttgggctgtccaactcataagtttggctgcattttgaaaaaagctgatctaaataaaggcatgtgtatggctggt

SEQ ID NO: 113612 - DNA, 1643 bp, Homo sapiens
  Payload ID: 2204
  Gene Symbol: CAPN3
  Gene Name: calpain 3
  Uniprot ID: P20807
  ENST ID: ENST00000397200
  CDS Start-End: 170-1099
ccctcctccacgcttacagccacacacacagtcacacagacgcgttctgagggtggctgcccgcttgggatggaggaatcacttccctcagaacccagccaagtcctctaggcctccttgggggtccttccagcctgaggggcttcggagctgaggagcagctgttctgatgcacgggaacaagcagcacctgcagaaggacttcttcctgtacaacgcctccaaggccaggagcaaaacctacatcaacatgcgggaggtgtcccagcgcttccgcctgcctcccagcgagtacgtcatcgtgccctccacctacgagccccaccaggagggggaattcatcctccgggtcttctctgaaaagaggaacctctctgaggaagttgaaaataccatctccgtggatcggccagtgaaaaagaaaaaaaccaagcccatcatcttcgtttcggacagagcaaacagcaacaaggagctgggtgtggaccaggagtcagaggagggcaaaggcaaaacaagccctgataagcaaaagcagtccccacagccacagcctggcagctctgatcaggaaagtgaggaacagcaacaattccggaacattttcaagcagatagcaggagatgacatggagatctgtgcagatgagctcaagaaggtccttaacacagtcgtgaacaaacacaaggacctgaagacacacgggttcacactggagtcctgccgtagcatgattgcgctcatggatacagatggctctggaaagctcaacctgcaggagttccaccacctctggaacaagattaaggcctggcagaaaattttcaaacactatgacacagaccagtccggcaccatcaacagctacgagatgcgaaatgcagtcaacgacgcaggattccacctcaacaaccagctctatgacatcattaccatgcggtacgcagacaaacacatgaacatcgactttgacagtttcatctgctgcttcgttaggctggagggcatgttcagagcttttcatgcatttgacaaggatggagatggtatcatcaagctcaacgttctggagtggctgcagctcaccatgtatgcctgaaccaggctggcctcatccaaagccatgcaggatcactcaggatttcagtttcaccctctatttccaaagccatttacctcaaaggacccagcagctacacccctacaggcttccaggcacctcatcagtcatgctcctcctccattttaccccctacccatccttgatcggtcatgcctagcctgaccctttagtaaagcaatgaggtaggaagaacaaacccttgtccctttgccatgtggaggaaagtgcctgcctctggtccgagccgcctcggttctgaagcgagtgctcctgcttaccttgctctaggctgtctgcagaagcacctgccggtggcactcagcacctccttgtgctagagccctccatcaccttcacgctgtcccaccatgggccaggaaccaaaccagcactgggttctactgctgtggggtaaactaactcagtggaatagggctggttactttgggctgtccaactcataagtttggctgcattttgaaaaaagctgatctaaataaaggcatgtgtatggctggtc

SEQ ID NO: 113613 - DNA, 1237 bp, Homo sapiens
  Payload ID: 2204
  Gene Symbol: CAPN3
  Gene Name: calpain 3
  Uniprot ID: P20807
  ENST ID: ENST00000397204
  CDS Start-End: 225-695
cacaggcgattggttttagtggtaggtgtgtggggatctgttctggtcatctggatgctggtcatcggtgtgcagtattgatcaggacctgcaaacccaaaagcttatgggagctggcacgtcacaaaaagaaaaaaaccaagccacagcctggcagctctgatcaggaaagtgaggaacagcaacaattccggaacattttcaagcagatagcaggagatgacatggagatctgtgcagatgagctcaagaaggtccttaacacagtcgtgaacaaacacaaggacctgaagacacacgggttcacactggagtcctgccgtagcatgattgcgctcatggatacagatggctctggaaagctcaacctgcaggagttccaccacctctggaacaagattaaggcctggcagaaaattttcaaacactatgacacagaccagtccggcaccatcaacagctacgagatgcgaaatgcagtcaacgacgcaggattccacctcaacaaccagctctatgacatcattaccatgcggtacgcagacaaacacatgaacatcgactttgacagtttcatctgctgcttcgttaggctggagggcatgttcagagcttttcatgcatttgacaaggatggagatggtatcatcaagctcaacgttctggagtggctgcagctcaccatgtatgcctgaaccaggctggcctcatccaaagccatgcaggatcactcaggatttcagtttcaccctctatttccaaagccatttacctcaaaggacccagcagctacacccctacaggcttccaggcacctcatcagtcatgctcctcctccattttaccccctacccatccttgatcggtcatgcctagcctgaccctttagtaaagcaatgaggtaggaagaacaaacccttgtccctttgccatgtggaggaaagtgcctgcctctggtccgagccgcctcggttctgaagcgagtgctcctgcttaccttgctctaggctgtctgcagaagcacctgccggtggcactcagcacctccttgtgctagagccctccatcaccttcacgctgtcccaccatgggccaggaaccaaaccagcactgggttctactgctgtggggtaaactaactcagtggaatagggctggttactttgggctgtccaactcataagtttggctgcattttgaaaaaagctgatctaaataaaggcatgtgtatggctgg

SEQ ID NO: 113614 - DNA, 908 bp, Homo sapiens
  Payload ID: 2204
  Gene Symbol: CAPN3
  Gene Name: calpain 3
  ENST ID: ENST00000569827
  CDS Start-End: 142-908
cagtcacacagacgcgttctgagggtggctgcccgcttgggatggaggaatcacttccctcagaacccagccaagtcctctaggcctccttgggggtccttccagcctgaggggcttcggagctgaggagcagctgttctgatgcacgggaacaagcagcacctgcagaaggacttcttcctgtacaacgcctccaaggccaggagcaaaacctacatcaacatgcgggaggtgtcccagcgcttccgcctgcctcccagcgagtacgtcatcgtgccctccacctacgagccccaccaggagggggaattcatcctccgggtcttctctgaaaagaggaacctctctgaggaagttgaaaataccatctccgtggatcggccagtgccacagcctggcagctctgatcaggaaagtgaggaacagcaacaattccggaacattttcaagcagatagcaggagatgacatggagatctgtgcagatgagctcaagaaggtccttaacacagtcgtgaacaaacacaaggacctgaagacacacgggttcacactggagtcctgccgtagcatgattgcgctcatggatacagatggctctggaaagctcaacctgcaggagttccaccacctctggaacaagattaaggcctggcagaaaattttcaaacactatgacacagaccagtccggcaccatcaacagctacgagatgcgaaatgcagtcaacgacgcaggattccacctcaacaaccagctctatgacatcattaccatgcggtacgcagacaaacacatgaacatcgactttgacagtttcatctgctgcttcgttaggctggagggcatgttcagagcttttcatgcatttgacaaggatggagatggtatcatcaagctcaacgttct

SEQ ID NO: 113615 - DNA, 598 bp, Homo sapiens
  Payload ID: 2204
  Gene Symbol: CAPN3
  Gene Name: calpain 3
  ENST ID: ENST00000568153
  CDS Start-End: 1-203
gattccacctcaacaaccagctctatgacatcattaccatgcggtacgcagacaaacacatgaacatcgactttgacagtttcatctgctgcttcgttaggctggagggcatgttcagagcttttcatgcatttgacaaggatggagatggtatcatcaagctcaacgttctggagtggctgcagctcaccatgtatgcctgaaccaggctggcctcatccaaagccatgcaggatcactcaggatttcagtttcaccctctatttccaaagccatttacctcaaaggacccagcagctacacccctacaggcttccaggcacctcatcagtcatgctcctcctccattttaccccctacccatccttgatcggtcatgcctagcctgaccctttagtaaagcaatgagcgagtgctcctgcttaccttgctctaggctgtctgcagaagcacctgccggtggcactcagcacctccttgtgctagagccctccatcaccttcacgctgtcccaccatgggccaggaaccaaaccagcactgggttctactgctgtggggtaaactaactcagtggaatagggctggttactttgggc

SEQ ID NO: 113616 - DNA, 1029 bp, Homo sapiens
  Payload ID: 2204
  Gene Symbol: CAPN3
  Gene Name: calpain 3
  Uniprot ID: P20807
  ENST ID: ENST00000569136
  CDS Start-End: 390-860
ataatcctgaccctgagccagtgccaggtctccaagtgccttctgaatgaccacaggcgattggttttagtggtaggtgtgtggggatctgttctggtcatctggatgctggtcatcggtgtgcagtattgatcaggacctgcaaacccaaaagcttatgggagctggcacgtcacaaaaagaaaaaaaccaagcccatcatcttcgtttcggacagagcaaacagcaacaaggagctgggtgtggaccaggagtcagaggagggcaaaggcaaaacaagccctgataagcaaaagcagtccccacagccacagcctggcagctctgatcaggaaagtgaggaacagcaacaattccggaacattttcaagcagatagcaggagatgacatggagatctgtgcagatgagctcaagaaggtccttaacacagtcgtgaacaaacacaaggacctgaagacacacgggttcacactggagtcctgccgtagcatgattgcgctcatggatacagatggctctggaaagctcaacctgcaggagttccaccacctctggaacaagattaaggcctggcagaaaattttcaaacactatgacacagaccagtccggcaccatcaacagctacgagatgcgaaatgcagtcaacgacgcaggattccacctcaacaaccagctctatgacatcattaccatgcggtacgcagacaaacacatgaacatcgactttgacagtttcatctgctgcttcgttaggctggagggcatgttcagagcttttcatgcatttgacaaggatggagatggtatcatcaagctcaacgttctggagtggctgcagctcaccatgtatgcctgaaccaggctggcctcatccaaagccatgcaggatcactcaggatttcagtttcaccctctatttccaaagccatttacctcaaaggacccagcagctacacccctacaggcttccaggcacctcatcagtcatgctcctcctccattttaccccctacccatccttgatc

SEQ ID NO: 113617 - DNA, 711 bp, Homo sapiens
  Payload ID: 2204
  Gene Symbol: CAPN3
  Gene Name: calpain 3
  ENST ID: ENST00000567817
  CDS Start-End: 1-282
aaaattttcaaacactatgacacagaccagtccggcaccatcaacagctacgagatgcgaaatgcagtcaacgacgcaggattccacctcaacaaccagctctatgacatcattaccatgcggtacgcagacaaacacatgaacatcgactttgacagtttcatctgctgcttcgttaggctggagggcatgttcagagcttttcatgcatttgacaaggatggagatggtatcatcaagctcaacgttctggagtggctgcagctcaccatgtatgcctgaaccaggctggcctcatccaaagccatgcaggatcactcaggatttcagtttcaccctctatttccaaagccatttacctcaaaggacccagcagctacacccctacaggcttccaggcacctcatcagtcatgctcctcctccattttaccccctacccatccttgatcggtcatgcctagcctgaccctttagtaaagcaatgaggctgtctgcagaagcacctgccggtggcactcagcacctccttgtgctagagccctccatcaccttcacgctgtcccaccatgggccaggaaccaaaccagcactgggttctactgctgtggggtaaactaactcagtggaatagggctggttactttgggctgtccaactcataagtttggctgcattttgaaaaaagctgatctaaataaaggcatgtgta

SEQ ID NO: 113618 - DNA, 915 bp, Homo sapiens
  Payload ID: 2204
  Gene Symbol: CAPN3
  Gene Name: calpain 3
  ENST ID: ENST00000561817
  CDS Start-End: 240-815
cagtgccaggtctccaagtgccttctgaatgaccacaggcgattggttttagtggtaggtgtgtggggatctgttctggtcatctggatgctggtcatcggtgtgcagtattgatcaggacctgcaaacccaaaagcttatgggagctggcacgtcacccacagcctggcagctctgatcaggaaagtgaggaacagcaacaattccggaacattttcaagcagatagcaggagatgacatggagatctgtgcagatgagctcaagaaggtccttaacacagtcgtgaacaaacacaaggacctgaagacacacgggttcacactggagtcctgccgtagcatgattgcgctcatggatacagatggctctggaaagctcaacctgcaggagttccaccacctctggaacaagattaaggcctggcagaaaattttcaaacactatgacacagaccagtccggcaccatcaacagctacgagatgcgaaatgcagtcaacgacgcaggattccacctcaacaaccagctctatgacatcattaccatgcggtacgcagacaaacacatgaacatcgactttgacagtttcatctgctgcttcgttaggctggagggcatgttcagagcttttcatgcatttgacaaggatggagatggtatcatcaagctcaacgttctggaggctgtctgcagaagcacctgccggtggcactcagcacctccttgtgctagagccctccatcaccttcacgctgtcccaccatgggccaggaaccaaaccagcactgggttctactgctgtggggtaaactaactcagtggaatagggctggttactttgggctgtccaactcataagtttggctgcattttgaaaaaagctgatctaaataaaggcatgtgtatggctggtc

SEQ ID NO: 113619 - DNA, 563 bp, Homo sapiens
  Payload ID: 2204
  Gene Symbol: CAPN3
  Gene Name: calpain 3
  ENST ID: ENST00000567071
  CDS Start-End: 1-563
cgggaacaagcagcacctgcagaaggacttcttcctgtacaacgcctccaaggccaggagcaaaacctacatcaacatgcgggaggtgtcccagcgcttccgcctgcctcccagcgagtacgtcatcgtgccctccacctacgagccccaccaggagggggaattcatcctccgggtcttctctgaaaagaggaacctctctgaggaagttgaaaataccatctccgtggatcggccagtgaaaaagaaaaaaaccaagcccatcatcttcgtttcggacagagcaaacagcaacaaggagctgggtgtggaccaggagtcagaggagggcaaaggcaaaacaagccctgataagcaaaagcagtccccacagttttcctttgtgcctccacagccacagcctggcagctctgatcaggaaagtgaggaacagcaacaattccggaacattttcaagcagatagcaggagatgacatggagatctgtgcagatgagctcaagaaggtccttaacacagtcgtgaacaaacacaaggacctgaagacacacgggttcacactgg

SEQ ID NO: 113620 - DNA, 734 bp, Homo sapiens
  Payload ID: 2204
  Gene Symbol: CAPN3
  Gene Name: calpain 3
  ENST ID: ENST00000565274
  CDS Start-End: 1-333
aaaaaaaccaagcccatcatcttcgtttcggacagagcaaacagcaacaaggagctgggtgtggaccaggagtcagaggagggcaaaggcaaaacaagccctgataagcaaaagcagtccccacagccacagcctggcagctctgatcaggaaagtgaggaacagcaacaattccggaacattttcaagcagatagcaggagatgacatggagatctgtgcagatgagctcaagaaggtccttaacacagtcgtgaacaaacacaaggacctgaagacacacgggttcacactggagtcctgccgtagcatgattgcgctcatggatccctgacctccctcctccagacagatggctctggaaagctcaacctgcaggagttccaccacctctggaacaagattaaggcctggcagatgcgaaatgcagtcaacgacgcaggattccacctcaacaaccagctctatgacatcattaccatgcggtacgcagacaaacacatgaacatcgactttgacagtttcatctgctgcttcgttaggctggagggcatgttcagagcttttcatgcatttgacaaggatggagatggtatcatcaagctcaacgttctggagtggctgcagctcaccatgtatgcctgaaccaggctggcctcatccaaagccatgcaggatcactcaggatttcagtttcaccctctatttccaaagccatttacctcaaaggaccca

SEQ ID NO: 113621 - DNA, 711 bp, Homo sapiens
  Payload ID: 2204
  Gene Symbol: CAPN3
  Gene Name: calpain 3
  ENST ID: ENST00000565559
  CDS Start-End: 239-711
tctgttctggtcatctggatgctggtcatcggtgtgcagtattgatcaggacctgcaaacccaaaagcttatgggagctggcacgtcacaaaaagaaaaaaaccaagcccatcatcttcgtttcggacagagcaaacagcaacaaggagctgggtgtggaccaggagtcagaggagggcaaaggcaaaacaagccctgataagcaaaagcagtccccacaggtgtctgggcatgtggcatgggtggggtggccagcacgctacaggggcttcctatgcgcttgggatacacaggggctggaggcttcccaggagtttgtcttgaacatctggagccacagcctggcagctctgatcaggaaagtgaggaacagcaacaattccggaacattttcaagcagatagcaggagatgacatggagatctgtgcagatgagctcaagaaggtccttaacacagtcgtgaacaaacacaaggacctgaagacacacgggttcacactggagtcctgccgtagcatgattgcgctcatggatacagatggctctggaaagctcaacctgcaggagttccaccacctctggaacaagattaaggcctggcagaaaattttcaaacactatgacacagaccagtccggcaccatcaacagctacgagatgcgaaatgcagtcaacgacgcaggattccacctcaacaaccagctctatga

SEQ ID NO: 113622 - DNA, 593 bp, Homo sapiens
  Payload ID: 2204
  Gene Symbol: CAPN3
  Gene Name: calpain 3
  ENST ID: ENST00000564503
  CDS Start-End: 1-509
agtccccacagccacagcctggcagctctgatcaggaaagtgaggaacagcaacaattccggaacattttcaagcagatagcaggagatgacatggagatctgtgcagatgagctcaagaaggtccttaacacagtcgtgaacaaacacaaggacctgaagacacacgggttcacactggagtcctgccgtagcatgattgcgctcatggatacagatggctctggaaagctcaacctgcaggagttccaccacctctggaacaagattaaggcctggcagatgcgaaatgcagtcaacgacgcaggattccacctcaacaaccagctctatgacatcattaccatgcggtacgcagacaaacacatgaacatcgactttgacagtttcatctgctgcttcgttaggctggagggcatgttcagagcttttcatgcatttgacaaggatggagatggtatcatcaagctcaacgttctggagtggctgcagctcaccatgtatgcctgaaccaggctggcctcatccaaagccatgcaggatcactcaggatttcagtttcaccctctatttccaaagccatttacctcaaag

SEQ ID NO: 113623 - DNA, 4397 bp, Homo sapiens
  Payload ID: 2205
  Gene Symbol: CAPN5
  Gene Name: calpain 5
  Uniprot ID: O15484
  ENST ID: ENST00000278559
  CDS Start-End: 190-2112
gaatgcgagcgccagcccccgccgcaggccagtcccagctggatctccggccagagcccgaggctgctgcgccgggcggctgcagcctccgctccagcgcccgcgccgtgccctgcatcccgggagcccggctggacccgcggcggctcggccggtgttccccctcccctccctggggcagcagccaccatgttctcgtgtgtgaagccctatgaggaccagaactactcagccctgaggcgggactgccggcgcaggaaggtgctcttcgaggaccccctcttccccgccactgacgactcactctactataagggcacgccggggcccgccgtcaggtggaagcgacccaagggcatctgcgaggacccccgcctctttgtggatggcatcagctcccacgacctgcaccagggccaggtgggcaactgctggtttgtggcagcctgctcgtcacttgcctcccgggagtcgctgtggcaaaaggtcatcccagactggaaggagcaggaatgggaccccgaaaagcccaacgcctacgcgggcatcttccacttccacttctggcgcttcggggaatgggtggacgtggtcatcgatgaccggctgcccacagtcaacaaccagctcatctactgccactccaactcccgcaatgagttttggtgcgccctagtggagaaggcctatgccaaactggcaggctgttaccaggccctggatggaggcaacacagcagacgcactggtggacttcacgggtggtgtttctgagcccatcgacctgaccgagggtgactttgccaacgatgagactaagaggaaccagctctttgagcgcatgttaaaggtgcacagccggggcggcctcatcagtgcctccatcaaggcagtgacagcagctgacatggaggcccgcctggcgtgcggcctggtaaagggccacgcatacgccgtcactgatgtgcgcaaggtgcgcctgggccacggcctactggccttcttcaagtcagagaagttggacatgatccgcctgcgcaacccctggggcgagcgggagtggaacgggccctggagtgacacctcggaggagtggcagaaagtgagcaagagtgagcgggagaagatgggtgtgaccgtgcaggacgacggtgagttctggatgaccttcgaggacgtgtgccggtacttcacggacatcatcaagtgccgcgtgatcaacacatcccacctgagcatccacaagacgtgggaggaggcccggctgcatggcgcctggacgctgcatgaggacccgcgacagaaccgcggtggcggctgcatcaaccacaaggacaccttcttccagaacccacagtacatcttcgaagtcaagaagccagaagatgaagtcctgatctgcatccagcagcggccaaagcggtctacgcgccgggagggcaagggtgagaacctggccattggctttgacatctacaaggtggaggagaaccgccagtaccgcatgcacagcctgcagcacaaggccgccagctccatctacatcaactcacgcagcgtcttcctgcgcaccgaccagcccgagggccgctatgtcatcatccccacaaccttcgagccaggccacactggcgagttcctgctccgagtcttcactgatgtgccctccaactgccgggagctgcgcctggatgagcccccacacacctgctggagctccctctgtggctacccccagctggtgacccaggtacatgtcctgggagctgctggcctcaaggactccccaacaggggctaactcttatgtgatcatcaagtgtgagggagacaaagtccgctcggctgtgcagaagggcacctccacaccagagtacaatgtgaaaggcatcttctaccgcaagaagctgagccagcccatcactgtacaggtctggaaccaccgagtgctgaaggatgaatttctgggccaggtgcacctaaaggctgacccggacaacctccaggccctgcataccctccacctccgggaccgaaatagccggcagcccagcaacctgccaggcactgtggccgtgcacattctcagcagcacctccctcatggctgtctgacacctgcccacctacctggctctgaccgttcccaccaccatctgcatgtccccactgggcctgagtctagcctgggagccaggatactggggtccttttcccactcttccactgacttgctgtgtgaccttaggaagtctctgcccctctctcagcctcagtgtcccgagggccccgaagcattccattctcgtggaggagtttccttgctgagatttcaaatagtcctccccacctcaactgtcaccactgctaagggactctatccattgagcacattttcctaaggccctgctgtctgccgaggagcgccaagaagatgtcacttgtttacacacgaactgccacatccccaagctccgttcttgcccctcgtgtcctaggcccaacccagcctcccagacctcactttccccatcagcaatacctggtgttctcccaccttgaaaggactcttggctcctgccgggttcctgctcaggctggaattgggaaaatatgcaggtgacatttgttcattctctaatcccatcctctcacccatccatttcctcactcagtggagatttgccaaatgaataaacgacacctttgaggccccaggtgaagcggggccctactccggcctctgccttgggcctcgcctctgtcctcaggtcctctcagaggcagatacctaggggagctgctgctgcctgctcattctagcttccgattccattcccagcccctgcgttaaggtccctggagaggtggcgtcagtgggggtgaggaagggcatcttcctgactcctctgcccagtgctggaaggagcatgcctgggttagtgggccaggggccaggcagctgggggcctttggggaccagaaggggagatgtgctcccagagcctctctgctgtaagaccccagcttttcctggaagatgggactctggggtgtgtggtgctcaccagagtcaggccacccactgggctcggcaggagatagggagccccatcacctgaccacagccccccaccaacattcccccaaaatgcagcctaggaggccgcagtgctcttcttcctgcccagaccaaaatgttccttttagtcctcaatgttttatattctttttgttttgaaaatctcaattttaatcaggggttttaaaagaaaattgaaagcctgaacctccatttttcttcttggctccagttttgctggtcctctggagaactcttcgtgagcactggtgccgtgacccacttgggatctctgctgtgcccttctcgggcttccagaccaggtgtagcaaatgaaaaagtgcagttaattcaagaacaggaatccctgtgtccttgctgggatttccttttgggaacctgactttccgactccagatcctgctgtctggatcagtgttctggctggaggtgctggattctctgattttgcctcctcactctgtgtctggctttgctcctgggtcttggccctgggccatatgaggggccaggaaatgaacgacaaggaggataagagtgttctttcttgaaagccgggacttcccctcaagaacctgggcctggggccgggactctgcatgactgggagcaagtcacttaaacctcctgtgcctcgatttcccccttctacaaagtggggccaatgattcttgtgtgtcagcactgttactaccgagtgctgagtaagggcaaaataatacccctttctctatgtatctctgtatgcacacgcactatatatatatatatatatatatatacattcatgtaatcaccacttctcgatgtctatttcaaatcaaggctcctgagtagggggtgaagtgagccagcttgcacctcaggctaacacataggactttgctcagccatgtcccctgggatacaggggcacaccaggaccaagtggcagacctgtgggcttcagcctcggggccggggcatgcctgccaccccctgacaaaaacaggttccacagtgctacccttgcttcctgccccttgaggtgggccaggctggctcctggctatgcagggatctctggtccccaggagaccttgggggccaggcaggtaaggatcaggggtgataggggagagcaattactttgttcactgtatgcacccgcgggggcctgggagtccccatttgcaggtgggtagggcctccagcccacaccacccagacctaggcttccctcttctcaggatccaccacagggttaggggacaggaagcctgttctattctcaataaatcttacaaaattccaaaaa

SEQ ID NO: 113624 - DNA, 2805 bp, Homo sapiens
  Payload ID: 2205
  Gene Symbol: CAPN5
  Gene Name: calpain 5
  ENST ID: ENST00000456580
  CDS Start-End: 138-2180
agagcccgaggctgctgcgccgggcggctgcagcctccgctccagcgcccgcgccgtgccctgcatcccgggagcccggctggacccgcggcggctcggccggtgttccccctcccctccctggggcagcagccaccatgttctcgtgtgtgaagccctatgaggaccagaactactcagccctgaggcgggactgccggcgcaggaaggtgctcttcgaggaccccctcttccccgccactgacgactcactctactataagggcacgccggggcccgccgtcaggtggaagcgacccaagtacagtggccattcgctggcccctcacaggcctggctggggagatgcacggagaatggagaatgtccccaggcctgggagctcagggtgtccgtcctcctcgctcagggcccgggacctgggcatctgcgaggacccccgcctctttgtggatggcatcagctcccacgacctgcaccagggccaggtgggcaactgctggtttgtggcagcctgctcgtcacttgcctcccgggagtcgctgtggcaaaaggtcatcccagactggaaggagcaggaatgggaccccgaaaagcccaacgcctacgcgggcatcttccacttccacttctggcgcttcggggaatgggtggacgtggtcatcgatgaccggctgcccacagtcaacaaccagctcatctactgccactccaactcccgcaatgagttttggtgcgccctagtggagaaggcctatgccaaactggcaggctgttaccaggccctggatggaggcaacacagcagacgcactggtggacttcacgggtggtgtttctgagcccatcgacctgaccgagggtgactttgccaacgatgagactaagaggaaccagctctttgagcgcatgttaaaggtgcacagccggggcggcctcatcagtgcctccatcaaggcagtgacagcagctgacatggaggcccgcctggcgtgcggcctggtaaagggccacgcatacgccgtcactgatgtgcgcaaggtgcgcctgggccacggcctactggccttcttcaagtcagagaagttggacatgatccgcctgcgcaacccctggggcgagcgggagtggaacgggccctggagtgacacctcggaggagtggcagaaagtgagcaagagtgagcgggagaagatgggtgtgaccgtgcaggacgacggtgagttctggatgaccttcgaggacgtgtgccggtacttcacggacatcatcaagtgccgcgtgatcaacacatcccacctgagcatccacaagacgtgggaggaggcccggctgcatggcgcctggacgctgcatgaggacccgcgacagaaccgcggtggcggctgcatcaaccacaaggacaccttcttccagaacccacagtacatcttcgaagtcaagaagccagaagatgaagtcctgatctgcatccagcagcggccaaagcggtctacgcgccgggagggcaagggtgagaacctggccattggctttgacatctacaaggtggaggagaaccgccagtaccgcatgcacagcctgcagcacaaggccgccagctccatctacatcaactcacgcagcgtcttcctgcgcaccgaccagcccgagggccgctatgtcatcatccccacaaccttcgagccaggccacactggcgagttcctgctccgagtcttcactgatgtgccctccaactgccgggagctgcgcctggatgagcccccacacacctgctggagctccctctgtggctacccccagctggtgacccaggtacatgtcctgggagctgctggcctcaaggactccccaacaggggctaactcttatgtgatcatcaagtgtgagggagacaaagtccgctcggctgtgcagaagggcacctccacaccagagtacaatgtgaaaggcatcttctaccgcaagaagctgagccagcccatcactgtacaggtctggaaccaccgagtgctgaaggatgaatttctgggccaggtgcacctaaaggctgacccggacaacctccaggccctgcataccctccacctccgggaccgaaatagccggcagcccagcaacctgccaggcactgtggccgtgcacattctcagcagcacctccctcatggctgtctgacacctgcccacctacctggctctgaccgttcccaccaccatctgcatgtccccactgggcctgagtctagcctgggagccaggatactggggtccttttcccactcttccactgacttgctgtgtgaccttaggaagtctctgcccctctctcagcctcagtgtcccgagggccccgaagcattccattctcgtggaggagtttccttgctgagatttcaaatagtcctccccacctcaactgtcaccactgctaagggactctatccattgagcacattttcctaaggccctgctgtctgccgaggagcgccaagaagatgtcacttgtttacacacgaactgccacatccccaagctccgttcttgcccctcgtgtcctaggcccaacccagcctcccagacctcactttccccatcagcaatacctggtgttctcccaccttgaaaggactcttggctcctgccgggttcctgctcaggctggaattgggaaaatatgcaggtgacatttgttcattctctaatcccatcctctcacccatccatttcctcactcagtggagatttgccaaatgaataaacgacacctttgaggccccaggtgaagcggggccctactccgg

SEQ ID NO: 113625 - DNA, 2333 bp, Homo sapiens
  Payload ID: 2205
  Gene Symbol: CAPN5
  Gene Name: calpain 5
  Uniprot ID: O15484
  ENST ID: ENST00000529629
  CDS Start-End: 227-2149
agctggatctccggccagagcccgaggctgctgcgccgggcggctgcagcctccgctccagcgcccgcgccgtgccctgcatcccgggagcccggctggacccgcggcggctcggccgatgagaattctgaagcacaaagaggttaactgctttgcacctcgctggcctcagtctccccatctgaggacgggtgttccccctcccctccctggggcagcagccaccatgttctcgtgtgtgaagccctatgaggaccagaactactcagccctgaggcgggactgccggcgcaggaaggtgctcttcgaggaccccctcttccccgccactgacgactcactctactataagggcacgccggggcccgccgtcaggtggaagcgacccaagggcatctgcgaggacccccgcctctttgtggatggcatcagctcccacgacctgcaccagggccaggtgggcaactgctggtttgtggcagcctgctcgtcacttgcctcccgggagtcgctgtggcaaaaggtcatcccagactggaaggagcaggaatgggaccccgaaaagcccaacgcctacgcgggcatcttccacttccacttctggcgcttcggggaatgggtggacgtggtcatcgatgaccggctgcccacagtcaacaaccagctcatctactgccactccaactcccgcaatgagttttggtgcgccctagtggagaaggcctatgccaaactggcaggctgttaccaggccctggatggaggcaacacagcagacgcactggtggacttcacgggtggtgtttctgagcccatcgacctgaccgagggtgactttgccaacgatgagactaagaggaaccagctctttgagcgcatgttaaaggtgcacagccggggcggcctcatcagtgcctccatcaaggcagtgacagcagctgacatggaggcccgcctggcgtgcggcctggtaaagggccacgcatacgccgtcactgatgtgcgcaaggtgcgcctgggccacggcctactggccttcttcaagtcagagaagttggacatgatccgcctgcgcaacccctggggcgagcgggagtggaacgggccctggagtgacacctcggaggagtggcagaaagtgagcaagagtgagcgggagaagatgggtgtgaccgtgcaggacgacggtgagttctggatgaccttcgaggacgtgtgccggtacttcacggacatcatcaagtgccgcgtgatcaacacatcccacctgagcatccacaagacgtgggaggaggcccggctgcatggcgcctggacgctgcatgaggacccgcgacagaaccgcggtggcggctgcatcaaccacaaggacaccttcttccagaacccacagtacatcttcgaagtcaagaagccagaagatgaagtcctgatctgcatccagcagcggccaaagcggtctacgcgccgggagggcaagggtgagaacctggccattggctttgacatctacaaggtggaggagaaccgccagtaccgcatgcacagcctgcagcacaaggccgccagctccatctacatcaactcacgcagcgtcttcctgcgcaccgaccagcccgagggccgctatgtcatcatccccacaaccttcgagccaggccacactggcgagttcctgctccgagtcttcactgatgtgccctccaactgccgggagctgcgcctggatgagcccccacacacctgctggagctccctctgtggctacccccagctggtgacccaggtacatgtcctgggagctgctggcctcaaggactccccaacaggggctaactcttatgtgatcatcaagtgtgagggagacaaagtccgctcggctgtgcagaagggcacctccacaccagagtacaatgtgaaaggcatcttctaccgcaagaagctgagccagcccatcactgtacaggtctggaaccaccgagtgctgaaggatgaatttctgggccaggtgcacctaaaggctgacccggacaacctccaggccctgcataccctccacctccgggaccgaaatagccggcagcccagcaacctgccaggcactgtggccgtgcacattctcagcagcacctccctcatggctgtctgacacctgcccacctacctggctctgaccgttcccaccaccatctgcatgtccccactgggcctgagtctagcctgggagccaggatactggggtccttttcccactcttccactgacttgctgtgtgaccttaggaagtctctgcccctctctcagcctcagtgtcccgagggccccgaagcatt

SEQ ID NO: 113626 - DNA, 597 bp, Homo sapiens
  Payload ID: 2205
  Gene Symbol: CAPN5
  Gene Name: calpain 5
  ENST ID: ENST00000527066
  CDS Start-End: 307-597
agtcccagctggatctccggccagagcccgaggctgctgcgccgggcggctgcagcctccgctccagcgcccgcgccgtgccctgcatcccgggagcccggctggacccgcggcggctcggccggttgtctctccggtggggagtgagcgagcacacagcccccaccccaccccgggtgagagagaatgtcctgcacagggacgcccagctgtatctacctgctgtcagcactttctctgcaggacctggtgctggactgggagccccgaggtgttccccctcccctccctggggcagcagccaccatgttctcgtgtgtgaagccctatgaggaccagaactactcagccctgaggcgggactgccggcgcaggaaggtgctcttcgaggaccccctcttccccgccactgacgactcactctactataagggcacgccggggcccgccgtcaggtggaagcgacccaagggcatctgcgaggacccccgcctctttgtggatggcatcagctcccacgacctgcaccagggccaggtgggcaactgctggtttgtggcagcctgctcgtcacttgcctcccgggagtcgctgtgg

SEQ ID NO: 113627 - DNA, 534 bp, Homo sapiens
  Payload ID: 2205
  Gene Symbol: CAPN5
  Gene Name: calpain 5
  ENST ID: ENST00000531028
  CDS Start-End: 199-357
gaacccggggaatgcgagcgccagcccccgccgcaggccagtcccagctggatctccggccagagcccgaggctgctgcgccgggcggctgcagcctccgctccagcgcccgcgccgtgccctgcatcccgggagcccggctggacccgcggcggctcggccggtgttccccctcccctccctggggcagcagccaccatgttctcgtgtgtgaagccctatgaggaccagaactactcagccctgaggcgggactgccggcgcaggaaggtgctcttcgaggaccccctcttccccgccactgacgactcactctactataagggcacgccggggcccgccgtcaggtgcacctaaaggctgacccggacaacctccaggccctgcataccctccacctccgggaccgaaatagccggcagcccagcaacctgccaggcactgtggccgtgcacattctcagcagcacctccctcatggctgtctgacacctgcccacctacctggctctgaccgttcccaccaccatctgca

SEQ ID NO: 113628 - DNA, 2374 bp, Homo sapiens
  Payload ID: 2205
  Gene Symbol: CAPN5
  Gene Name: calpain 5
  ENST ID: ENST00000615896
  CDS Start-End: 126-2045
tgctgcgccgggcggctgcagcctccgctccagcgcccgcgccgtgccctgcatcccgggagcccggctggacccgcggcggctcggccggtgttccccctcccctccctggggcagcagccaccatgttctcgtgtgtgaagccctatgaggaccagaactactcagccctgaggcgggactgccggcgcaggaaggtgctcttcgaggaccccctcttccccgccactgacgactcactctactataagggcacgccggggcccgccgtcaggtggaagcgacccaagggcatctgcgaggacccccgcctctttgtggatggcatcagctcccacgacctgcaccagggccaggtgggcaactgctggtttgtggcagcctgctcgtcacttgcctcccgggagtcgctgtggcaaaaggtcatcccagactggaaggagcaggaatgggaccccgaaaagcccaacgcctacgcgggcatcttccacttccacttctggcgcttcggaatggtggacgtggtcatcgatgaccggctgcccacagtcaacaaccagctcatctactgccactccaactcccgcaatgagttttggtgcgccctagtggagaaggcctatgccaaactggcaggctgttaccaggccctggatggaggcaacacagcagacgcactggtggacttcacgggtggtgtttctgagcccatcgacctgaccgagggtgactttgccaacgatgagactaagaggaaccagctctttgagcgcatgttaaaggtgcacagccggggcggcctcatcagtgcctccatcaaggcagtgacagcagctgacatggaggcccgcctggcgtgcggcctggtaaagggccacgcatacgccgtcactgatgtgcgcaaggtgcgcctgggccacggcctactggccttcttcaagtcagagaagttggacatgatccgcctgcgcaacccctggggcgagcgggagtggaacgggccctggagtgacacctcggaggagtggcagaaagtgagcaagagtgagcgggagaagatgggtgtgaccgtgcaggacgacggtgagttctggatgaccttcgaggacgtgtgccggtacttcacggacatcatcaagtgccgcgtgatcaacacatcccacctgagcatccacaagacgtgggaggaggcccggctgcatggcgcctggacgctgcatgaggacccgcgacagaaccgcggtggcggctgcatcaaccacaaggacaccttcttccagaacccacagtacatcttcgaagtcaagaagccagaagatgaagtcctgatctgcatccagcagcggccaaagcggtctacgcgccgggagggcaagggtgagaacctggccattggctttgacatctacaaggtggaggagaaccgccagtaccgcatgcacagcctgcagcacaaggccgccagctccatctacatcaactcacgcagcgtcttcctgcgcaccgaccagcccgagggccgctatgtcatcatccccacaaccttcgagccaggccacactggcgagttcctgctccgagtcttcactgatgtgccctccaactgccgggagctgcgcctggatgagcccccacacacctgctggagctccctctgtggctacccccagctggtgacccaggtacatgtcctgggagctgctggcctcaaggactccccaacaggggctaactcttatgtgatcatcaagtgtgagggagacaaagtccgctcggctgtgcagaagggcacctccacaccagagtacaatgtgaaaggcatcttctaccgcaagaagctgagccagcccatcactgtacaggtctggaaccaccgagtgctgaaggatgaatttctgggccaggtgcacctaaaggctgacccggacaacctccaggccctgcataccctccacctccgggaccgaaatagccggcagcccagcaacctgccaggcactgtggccgtgcacattctcagcagcacctccctcatggctgtctgacacctgcccacctacctggctctgaccgttcccaccaccatctgcatgtccccactgggcctgagtctagcctgggagccaggatactggggtccttttcccactcttccactgacttgctgtgtgaccttaggaagtctctgcccctctctcagcctcagtgtcccgagggccccgaagcattccattctcgtggaggagtttccttgctgagatttcaaatagtcctccccacctcaactgtcaccactgctaagggactctatccattgagcacattttcctaaggccctgctgtctgccgaggagcgccaagaagatgtcacttg

SEQ ID NO: 113629 - DNA, 3568 bp, Homo sapiens
  Payload ID: 2206
  Gene Symbol: CAPN6
  Gene Name: calpain 6
  Uniprot ID: Q9Y6Q1
  ENST ID: ENST00000324068
  CDS Start-End: 169-2094
atagttttcaggttaagaaagccagaatctttgttcagccacactgactgaacagacttttagtggggttacctggctaacagcagcagcggcaacggcagcagcagcagcagcagcagcagcagcagcagcagggctcctgggataactcaggcatagttcaacactatgggtcctcctctgaagctcttcaaaaaccagaaataccaggaactgaagcaggaatgcatcaaagacagcagacttttctgtgatccaacatttctgcctgagaatgattctcttttctacaaccgactgcttcctggaaaggtggtgtggaaacgtccccaggacatctgtgatgacccccatctgattgtgggcaacattagcaaccaccagctgacccaagggagactggggcacaagccaatggtttctgcattttcctgtttggctgttcaggagtctcattggacaaagacaattcccaaccataaggaacaggaatgggaccctcaaaaaacagaaaaatacgctgggatatttcactttcgtttctggcattttggagaatggactgaagtggtgattgatgacttgttgcccaccattaacggagatctggtcttctctttctccacttccatgaatgagttttggaatgctctgctggaaaaagcttatgcaaagctgctaggctgttatgaggccctggatggtttgaccatcactgatattattgtggacttcacgggcacattggctgaaactgttgacatgcagaaaggaagatacactgagcttgttgaggagaagtacaagctattcggagaactgtacaaaacatttaccaaaggtggtctgatctgctgttccattgagtctcccaatcaggaggagcaagaagttgaaactgattggggtctgctgaagggccatacctataccatgactgatattcgcaaaattcgtcttggagagagacttgtggaagtcttcagtgctgagaaggtgtatatggttcgcctgagaaaccccttgggaagacaggaatggagtggcccctggagtgaaatttctgaagagtggcagcaactgactgcatcagatcgcaagaacctggggcttgttatgtctgatgatggagagttttggatgagcttggaggacttttgccgcaactttcacaaactgaatgtctgccgcaatgtgaacaaccctatttttggccgaaaggagctggaatcggtgttgggatgctggactgtggatgatgatcccctgatgaaccgctcaggaggctgctataacaaccgtgataccttcctgcagaatccccagtacatcttcactgtgcctgaggatgggcacaaggtcattatgtcactgcagcagaaggacctgcgcacttaccgccgaatgggaagacctgacaattacatcattggctttgagctcttcaaggtggagatgaaccgcaaattccgcctccaccacctctacatccaggagcgtgctgggacttccacctatattgacacccgcacagtgtttctgagcaagtacctgaagaagggcaactatgtgcttgtcccaaccatgttccagcatggtcgcaccagcgagtttctcctgagaatcttctctgaagtgcctgtccagctcagggaactgactctggacatgcccaaaatgtcctgctggaacctggctcgtggctacccgaaagtagttactcagatcactgttcacagtgctgaggacctggagaagaagtatgccaatgaaactgtaaacccatatttggtcatcaaatgtggaaaggaggaagtccgttctcctgtccagaagaatacagttcatgccatttttgacacccaggccattttctacagaaggaccactgacattcctattatagtacaggtctggaacagccgaaaattctgtgatcagttcttggggcaggttactctggatgctgaccccagcgactgccgtgatctgaagtctctgtacctgcgtaagaagggtggtccaactgccaaagtcaagcaaggccacatcagcttcaaggttatttccagcgatgatctcactgagctctaaatctgcaatcccagagaatcctgacaaagcgtgccacccttttattttccgtcaggtgccaggtcttagttaagattcacaatctttagaaagaatgagattcacaataattaactcttcctctcttctgataaattccccatacctcccaatccaagtagcatctgtagctacataacctatatacctccagcagctggacatggggaggcgacagtcctatctagacatcatacacatttgccaagaaaggatctctggggcttccgggggtgagattcaagtaggacaataacaagaggctggacaccctacagatgtctttgatgttttcagttgtttgatatatctcccctgtagggcatgttgaggaaggaggagggctgatcaaggccaagctggtctagcctgacatcctagctcctgactgaacactatagacttcccagcagcatttcacccagcagccagagccggctttaagtccccaacccttacagacaccactgccaccaccaccaaccacgaccaccaccaccaccaccactcaccaccatcatcacctccggaaagtgtagtcctgccctaacccaagtcacccccgacagtaaattttaccttcatgttgagaaagcttcctggtgcttaatcaagagctggagttcaatgagtcctagacagtgagaggggcctgagcttcagctcaatggaagcctgctgtgtgccacaagacggaaaagtggaagaagctgcagtgggagacaaagcctcggtcccccacccatccacacacacctacactcacacacgcgcacatgggcgcgcacgaactaccattcaggcagtcagtgggcaagaggaaagataagtaagtaccatacacacctaaaagatgagagaattcatccagacatattacagccagtttggggcccctgactgcaatgtgaaacctctcgctgctgctaggtttacaaacaagcccattgtcctgtgcctcctaatatcatttgtactgaagaccccatctggggacttgagactttggtcccagcccagactcctcagacttttctctcagttgggatgcttcactcgctgggggtgtttgtttgccctctcatttttcagtacttctacagaattttctctagagtcagtcattatgaaatgtacttccctccatcttaacctatcaactttctgcccctccttcaaggcccagtataaatgccacctcctccatgaagccttccctaattccaccccaaacccccaccttcaacaatatttcaacgcttctgcaatgatgaaaaagaaacatagttgtagtacttagcctacctagaccagcaagcattcatttttagctcgctcattttttaccatgttttccagtctgtttaacttctgcagtgccttcactacactgccttacataaaccaaatcacaataaagttcatattcagtaca

SEQ ID NO: 113630 - DNA, 4353 bp, Homo sapiens
  Payload ID: 2207
  Gene Symbol: CAPN7
  Gene Name: calpain 7
  Uniprot ID: Q9Y6W3
  ENST ID: ENST00000253693
  CDS Start-End: 254-2695
ggcgagggccgctggggccgcgaagtggggcggccgggtgggctacaagccgggtctgggctgaggggcgcggcttcgcggtggaccccagcccggcaacgggaaggcgagctctcctccaccgtccaaagtaaactttgccgctccttccgcggcgctcccgagtcctcgccgccgccgggccgccgcagtccgcgaagagccgtcctgcgtcagggcctccttccctgccccggcgcggggccactgcgccatggacgccacagcactggagcgggacgctgtgcagttcgcccgtctggcggttcagcgcgaccacgaaggccgctactccgaggcggtgttttattacaaggaagctgcacaagccttaatttatgctgagatggcaggatcaagcctagaaaatattcaagaaaaaataactgagtatctggaaagagttcaagctctacattcagcagttcagtcaaagagtgctgatcctttgaagtcaaaacatcagttggacttagagcgtgctcatttccttgttacacaagcttttgatgaagatgaaaaagagaatgttgaagatgctatagaattgtacacagaagctgtggatctctgtctgaaaacatcttatgaaactgctgataaagtcctgcaaaataaactgaaacagttggctcgacaggcactagacagagcagaagcgctgagtgagcctttgaccaagccagttggcaaaatcagttcaacaagtgttaagccaaagccacctccagtgagagcacattttccactgggcgctaatcccttccttgaaagacctcagtcatttataagtcctcagtcatgtgatgcacaaggacagagatacacagcagaagaaatagaagtactcaggacaacatcaaaaataaatggtatagaatatgttcctttcatgaatgttgacctgagagaacgttttgcctatccaatgcctttctgtgatagatggggcaagctaccattatcacctaaacaaaaaactacattttccaagtgggtacgaccagaagacctcaccaacaatcctacaatgatatatactgtgtccagttttagcataaagcagacaatagtatcggattgctcctttgtggcatcactggccatcagtgcagcttatgaaagacgttttaataagaagttaattaccggcataatttaccctcaaaacaaggatggtgaaccagaatacaatccatgtgggaagtatatggtaaaacttcacctcaatggtgtcccaagaaaggtgataattgatgaccagttacctgttgatcacaagggagaattgctctgttcttattccaacaacaaaagtgaattatgggtttctctcatagaaaaagcatacatgaaagtcatgggaggatatgattttccaggatccaactccaatattgatcttcatgcactgactggctggataccagaaagaattgctatgcattcagatagccaaactttcagtaaggataattctttcagaatgctttatcaaagatttcacaaaggagatgtcctcatcactgcgtcaactggaatgatgacagaagctgaaggagagaagtggggtctggttcccacacacgcatatgctgttttggatattagagagttcaaggggctgcgatttatccagttgaaaaatccttggagtcatttacgttggaaaggaagatacagtgaaaatgatgtaaaaaactggactccagagttgcaaaagtatttaaactttgatccccgaacagctcagaaaatagacaacggaatattttggatttcctgggatgatctctgccagtattatgatgtgatttatttgagttggaatccaggtctttttaaagaatcaacatgtattcacagtacttgggatgctaagcaaggacctgtgaaagatgcctatagcctggccaacaacccccagtacaaactggaggtgcagtgtccacaggggggtgctgcagtttgggttttgcttagtagacacataacagacaaggatgattttgcgaataatcgagaatttatcacaatggttgtatacaagactgatgggaaaaaagtttattacccagctgacccacctccatacattgatggaattcgaattaacagccctcattatttgactaagataaagctgaccacacctggcacccatacctttacattagtggtttctcaatatgaaaaacagaacacaatccattacacggttcgggtatattcagcatgcagctttactttttcaaagattccttcaccatacaccttatcaaaacggattaatggaaagtggagtggtcagagtgctggaggatgtggaaatttccaagagactcacaaaaataaccccatctaccaattccatatagaaaagactgggccgttactgattgagctacgaggaccaaggcaatatagcgttggatttgaggttgtaacagtttctactctaggagatcctggtccccatggctttctgaggaaatctagtggtgactataggtgtgggttttgctacctggaattagaaaatataccttctgggatcttcaatatcattcctagtacctttttgcctaaacaagaaggaccttttttcttggactttaatagtattatccccatcaagatcacacaacttcagtgatggagaaatctcaagttactggcttttatacttaccaaacatcagttcttcaaataaggacgcaaatcttcaggacagtaagcagaacaatcagaatggaattaaatctctaaaaacgtgttacagtggaatctggtgcttgtcagggtgtttggtaagaactgtatatagtcagaattacctaaatcacctagaggtaccgtttacatggttttgtgtatatagagttggcttgcattttaggggccattttgtataaaaagtgcatatgattaaaattagactcagtcatcactgtgagatgcctttgctaagaggataaaggaactgagaccagatgagaaaaagaaaggatatagattccttgagtggaatagtgggctagattaatataccgaaatatttccattgtttcccttttttgcagagcatgtggaagttaaacctgcttgattctactatacatcttgggcaactagttaccaaatgaattgtgccaccataactgattttaattttgcattatttatgattttaaaatatttgttgcccaggtgttatgaaagaataaagcttttaagtatagactaccttagcatgaagatgctcatgcctaagaatgaaaattgttgaggttatctcccattcaatcatgtagcaagaacttaaagaaattcactactgcagtttttatttttaaaaaacagtaattgagatattgaagacattacaatttagtttgtgtggtctttttttaaattgctgtatcgttcagtctcttgtggcaatagcactttgaagaaaatagagaatttaatatatggtgattgggatatgtagcattcaaaaaaagtgaattgccaagatactggtgtcatgtaaattcccactttacataaaaacccatcaggacagaatgatgctcaatattttaaaattctaaaaatagggtgggatttttcattgtctctactttataattatcaaaacttattttgtattgctactaccttaaattgaaataaaatgtttatacttacggatattgcatagtttaagttagatttattgaaagatttcatctgtcgtgtttcatgtaaatgagaacagattatttgcatgaaaatatatacttcaacaaaaatctgttctttaacagagtagtggtagattattacactaatgagatttcactttggtaaatacttcatgctttcagttttagcctattaattttaggtggacaaatttaacaagttttctgttactttttaaaaagaaaaaatccagaacataagaactatattatgaacacatgatttgaacctgttgtggtaaagatcttgtacaggatgcaaactaaaaacctaatccctgccatcaaatttattagaagagacctatatatgaacaacttaaaggcactgatttctataatagagctctaaaaacatgccaccagtgtatgaataagggaaagattaattttggctggaccaatataaaaaattgtatttgaagaattgatactttaacttggaccttgaaggtaaagcttcaaaagacaggttactgaccattgagtgtttactatgtacccaatgtgtatatttttctttttaatcttcccaatagctgaataaagtatagatactatt

SEQ ID NO: 113631 - DNA, 854 bp, Homo sapiens
  Payload ID: 2207
  Gene Symbol: CAPN7
  Gene Name: calpain 7
  ENST ID: ENST00000457023
  CDS Start-End: 276-404
gcgtcgggcggctggtgggcggggcgagggccgctggggccgcgaagtggggcggccgggtgggctacaagccgggtctgggctgaggggcgcggcttcgcggtggaccccagcccggcaacgggaaggcgagctctcctccaccgtccaaagtaaactttgccgctccttccgcggcgctcccgagtcctcgccgccgccgggccgccgcagtccgcgaagagccgtcctgcgtcagggcctccttccctgccccggcgcggggccactgcgccatggacgccacagcactggagcgggacgctgtgcagttcgcccgtctggcggttcagcgcgaccacgaaggccgctactccgaggcggtgttttattacaagttcagtcaaagagtgctgatcctttgaagtcaaaacatcagttggacttagagcgtgctcatttccttgttacacaagcttttgatgaagatgaaaaagagaatgttgaagatgctatagaattgtacacagaagctgtggatctctgtctgaaaacatcttatgaaactgctgataaagtcctgcaaaataaactgaaacagttggctcgacaggcactagacagagcagaagcgctgagtgagcctttgaccaagccagttggcaaaatcagttcaacaagtgttaagccaaagccacctccagtgagagcacattttccactgggcgctaatcccttccttgaaagacctcagtcatttataagtcctcagtcatgtgatgcacaaggacagagatacacagcagaagaaatagaagtactcaggtaaataagtttacaattaattgtaatgaagaattttgttaacatgaatg

SEQ ID NO: 113632 - DNA, 805 bp, Homo sapiens
  Payload ID: 2207
  Gene Symbol: CAPN7
  Gene Name: calpain 7
  ENST ID: ENST00000443567
  CDS Start-End: 1-339
catttacgttggaaaggaagatacagtgaaaatgatgtaaaaaactggactccagagttgcaaaagtatttaaactttgatccccgaacagctcagaaaatagacaacggaatattttggatttcctgggatgatctctgccagtattatgatgtgatttatttgagttggaatccaggtctttttaaagaatcaacatgtattcacaggatgattttgcgaataatcgagaatttatcacaatggttgtatacaagactgatgggaaaaaagtttattacccagctgacccacctccatacattgatggaattcgaattaacagccctcattatttgactaagataaagctgaccacacctggcacccatacctttacattagtggtttctcaatatgaaaaacagaacacaatccattacacggttcgggtatattcagcatgcagctttactttttcaaagattccttcaccatacaccttatcaaaacggattaatggaaagtggagtggtcagagtgctggaggatgtggaaatttccaagagactcacaaaaataaccccatctaccaattccatatagaaaagactgggccgttactgattgagctacgaggaccaaggagatcctggtccccatggctttctgaggaaatctagtggtgactataggtgtgggttttgctacctggaattagaaaatataccttctgggatcttcaatatcattcctagtacctttttgcctaaacaagaaggaccttttttcttggactttaatagtattatccccatcaagatca

SEQ ID NO: 113633 - DNA, 742 bp, Homo sapiens
  Payload ID: 2207
  Gene Symbol: CAPN7
  Gene Name: calpain 7
  ENST ID: ENST00000415565
  CDS Start-End: 1-742
ttttagcataaagcagacaatagtatcggattgctcctttgtggcatcactggccatcagtgcagcttatgaaagacgttttaataagaagttaattaccggcataatttaccctcaaaacaaggatggtgaaccagaatacaatccatgtgggaagtatatggtaaaacttcacctcaatggtgtcccaagaaagaatacctacaagttgaacatctctaatctgaaaatccaaaacactccagtgataattgatgaccagttacctgttgatcacaagggagaattgctctgttcttattccaacaacaaaagtgaattatgggtttctctcatagaaaaagcatacatgaaagtcatgggaggatatgattttccaggatccaactccaatattgatcttcatgcactgactggctggataccagaaagaattgctatgcattcagatagccaaactttcagtaaggataattctttcagaatgctttatcaaagatttcacaaaggagatgtcctcatcactgcgtcaactggaatgatgacagaagctgaaggagagaagtggggtctggttcccacacacgcatatgctgttttggatattagagagttcaaggggctgcgatttatccagttgaaaaatccttggagtcatttacgttggaaaggaagatacagtgaaaatgatgtaaaaaactggactccagagttgcaaaagtatttaaactttgatccccga

SEQ ID NO: 113634 - DNA, 781 bp, Homo sapiens
  Payload ID: 2207
  Gene Symbol: CAPN7
  Gene Name: calpain 7
  ENST ID: ENST00000418994
  CDS Start-End: 345-455
gcgcagtcccgcgagcctggcctcggcggccccagcttctaaggagctcgtgagggccaggctgcgcctgcgtcgggcggctggtgggcggggcgagggccgctggggccgcgaagtggggcggccgggtgggctacaagccgggtctgggctgaggggcgcggcttcgcggtggaccccagcccggcaacgggaaggcgagctctcctccaccgtccaaagtaaactttgccgctccttccgcggcgctcccgagtcctcgccgccgccgggccgccgcagtccgcgaagagccgtcctgcgtcagggcctccttccctgccccggcgcggggccactgcgccatggacgccacagcactggagcgggacgctgtgcagttcgcccgtctggcggttcagcgcgaccacgaaggccgctactccgaggcggtgttttattacaaggttcagtgaaacaactcctgctcaaacaactggattcaaaaagtgatgttcagtagatggcatctttggaaacaggcatgatgacccatgaagtgtacacgcttgggttactgcagagaaggaagctgcacaagccttaatttatgctgagatggcaggatcaagcctagaaaatattcaagaaaaaataactgagtatctggaaagagttcaagctctacattcagcagttcagtcaaagagtgctgatcctttgaagtcaaaacatcagttggacttagagcgtgctcatttccttgttacacaagcttttgatgaagatgaaaaagagaatg

SEQ ID NO: 113635 - DNA, 2427 bp, Homo sapiens
  Payload ID: 2208
  Gene Symbol: CAPN8
  Gene Name: calpain 8
  Uniprot ID: A6NHC0
  ENST ID: ENST00000366872
  CDS Start-End: 89-2200
gtgccttatagctcccctcccagtggagcaggtgtctgagagtacagtgcagccctgcccttctgtccaccctacagagcccacggccatggcagcccaggcagctggtgtatctaggcagcgggcagccactcaaggtcttggctccaaccaaaacgctttgaagtacttgggccaggatttcaagaccctgaggcaacagtgcttggactcaggggtcctatttaaggaccctgagttcccagcatgtccatcagctttgggctacaaggatcttggaccaggctctccgcaaactcaaggcatcatctggaagcggcccacggagttgtgtcccagccctcagtttatcgttggtggagccacgcgcacagacatttgtcagggtggtctaggtgactgctggcttctggctgccattgcctccctgaccctgaatgaagagctgctttaccgggtggtccccagggaccaggacttccaggagaactatgcgggaatctttcactttcagttctggcagtacggagagtgggtggaggtggtcattgacgacaggctgcccaccaagaatggacagctgctcttcctacactcggaacaaggcaatgaattctggagtgccctgctggagaaagcctatgccaagcttaatggttgttatgaggctctcgctggaggttccacagtggaggggtttgaggatttcacaggtggcatctctgagttttatgacctgaagaaaccaccagccaatctatatcagatcatccggaaggccctctgtgcggggtctctgctgggctgctccattgatgtctccagtgcagccgaagccgaagccatcaccagccagaagctggttaagagtcatgcgtactctgtcactggagtcgaagaggtgaatttccagggccatccagagaagctgatcagactcaggaatccatggggtgaagtggagtggtcgggagcctggagcgatgatgcaccagagtggaatcacatagacccccggcggaaggaagaactggacaagaaagttgaggatggagaattctggatgtcactttcagatttcgtgaggcagttctctcggttggagatctgcaacctgtccccggactctctgagtagcgaggaggtgcacaaatggaacctggtcctgttcaacggccactggacccggggctccacagctgggggctgccagaactacccagccacgtactggaccaatccccagttcaaaatccgtttggatgaagtggatgaggaccaggaggagagcatcggtgaaccctgctgtacagtgctgctgggcctgatgcagaaaaatcgcaggtggcggaagcggataggacaaggcatgcttagcatcggctatgccgtctaccaggttcccaaggagctggagagtcacacggacgcacacttgggccgggatttcttcctggcctaccagccctcagcccgcaccagcacctacgtcaacctgcgggaggtctctggccgggcccggctgccccctggggagtacctggtggtgccatccacatttgaacccttcaaagacggcgagttctgcttgagagtgttctcagagaagaaggcccaggccctagaaattggggatgtggtagctggaaacccatatgagccacatcccagtgaggtggatcaggaagatgaccagttcaggaggctgtttgagaagttggcagggaaggattctgagattactgccaatgcactcaagatacttttgaatgaggcgttttccaagagaacagacataaaattcgatggattcaacatcaacacttgcagggaaatgatcagtctgttggatagcaatggaacgggcactttgggggcggtggaattcaagacgctctggctgaagattcagaagtatctggagatctattgggaaactgattataaccactcgggcaccatcgatgcccacgagatgaggacagccctcaggaaggcaggtttcaccctcaacagccaggtgcagcagaccattgccctgcggtatgcgtgcagcaagcttggcatcaactttgacagcttcgtggcttgtatgatccgcctggagaccctcttcaaactattcagccttctggacgaagacaaggatggcatggttcagctctctctggccgagtggctgtgctgcgtgttggtctgacccggggtttcggacatcagtgacactccctgccccactgcttgcttcttgtcaccccttctctacaattttgtgaacatttatgctccagtggcattcactggttgttcatacctttcttgccctgggtctatttcagcagcactgagctatgagctatgtaagccgacccggtgggcccagtggagggaaagcaatcaattaaagttgtgagccagaatggtttc

SEQ ID NO: 113636 - DNA, 2596 bp, Homo sapiens
  Payload ID: 2208
  Gene Symbol: CAPN8
  Gene Name: calpain 8
  ENST ID: ENST00000366873
  CDS Start-End: 78-1223
ctcccctcccagtggagcaggtgtctgagagtacagtgcagccctgcccttctgtccaccctacagagcccacggccatggcagcccaggcagctggtgtatctaggcagcgggcagccactcaaggtcttggctccaaccaaaacgctttgaagtacttgggccaggatttcaagaccctgaggcaacagtgcttggactcaggggtcctatttaaggaccctgagttcccagcatgtccatcagctttgggctacaaggatcttggaccaggctctccgcaaactcaaggcatcatctggaagcggcccacggagttgtgtcccagccctcagtttatcgttggtggagccacgcgcacagacatttgtcagggtggtctaggtgactgctggcttctggctgccattgcctccctgaccctgaatgaagagctgctttaccgggtggtccccagggaccaggacttccaggagaactatgcgggaatctttcactttcagttctggcagtacggagagtgggtggaggtggtcattgacgacaggctgcccaccaagaatggacagctgctcttcctacactcggaacaaggcaatgaattctggagtgccctgctggagaaagcctatgccaagcttaatggttgttatgaggctctcgctggaggttccacagtggaggggtttgaggatttcacaggtggcatctctgagttttatgacctgaagaaaccaccagccaatctatatcagatcatccggaaggccctctgtgcggggtctctgctgggctgctccattgatgtctccagtgcagccgaagccgaagccatcaccagccagaagctggttaagagtcatgcgtactctgtcactggagtcgaagaggtgaatttccagggccatccagagaagctgatcagactcaggaatccatggggtgaagtggagtggtcgggagcctggagcgatgatgcaccagagtggaatcacatagacccccggcggaaggaagaactggacaagaaagttgaggatggagaattctggatgtcactttcagatttcgtgaggcagttctctcggttggagatctgcaacctgtccccggactctctgagtagcgaggaggtgcacaaatggaacctggtcctgttcaacggccactggacccggggctccacagctgggggctgccagaactacccaggctcctcctaggttgaatcagctgaggcagcacctgatgaagaaactcaggaagacagccccacatctctaaggagaaatgaagaaaagcaaatcctgctctctctacttttcacctcctgctccccatgttccctgcctggtttgctgttgatctgttgattgacttagactgtaagcgcatggggcagggccagtcactttcttctcatgacagagctcactgcagggctgtgctcggtgctagggaagcagcattagaataaaaccccacctggatgcagtgctgggtcttgacaagttctctcttctttcatcacccatccaacccaaagctcccggttcaggcagctgtgaccagagtgctgaacagagaggaaggaaaggggtccacatcctgcccttgttgcttgatttagactctgggaagggcatttccctcttctgagcttcagtttcctagtcctccagatggggttcaaccttccaaccttactgggtcactgcaagccttggaacacagagtgtgtagggaagcactttgtaaactgtgtagcattatataaatgggagtattatttttatggcccattctcttcctccagtactgttaaggagtaaacaaaaaatgtatggattgcagtaatgttgcatttgggagaaattaaaatatgctcaccattagcaagctcttagaaaatgtggaggaaatttgcatggatcattttgggagctcagaactgtagggggtgcacaaggtatctggatgcaccaaatcacagtcccatccatgctgccaactagctgtcaggaagacatggatagttcctgccctttggtagtgatggaagtataggcgattacagatttttttttccatctcctatgggatccacagatatccggctttaaaatccataaacttgagccctaaaacaaacaaacaaacaaaacacagcaacaaaaaaacaaaacaaaacaaaacaaacaacccccccccccaaaaaaaaagtggaagtggggattctgagaaggtggaattgaataagtaatcctactgtaaagaaaagtgataatcaatggctcttggtcacctgtgaatgccttgttattttccaagttagactcttctttaaaggatgtaaggaaaaatcccatgcccttccacttcttttttcctcccgggcacatcattattgaaattgttgaggccctagagtggagacacctgtcaggcgtgccttctgcaattttgctctgccactggactctgtcatagacttgctgcatatccttggatgatccttttaatctctccgtgccttggcttgtgtacttactattctgagagatttaaaaaaagccatctttgaaatgaaggagtc

SEQ ID NO: 113637 - DNA, 695 bp, Homo sapiens
  Payload ID: 2208
  Gene Symbol: CAPN8
  Gene Name: calpain 8
  ENST ID: ENST00000430824
  CDS Start-End: 1-471
gattctgagattactgccaatgcactcaagatacttttgaatgaggcgttttccaagagaacagacataaaattcgatggattcaacatcaacacttgcagggaaatgatcagtctgttggatagcaatggaacgggcactttgggggcggtggaattcaagacgctctggctgaagattcagaagtatctggagatctattgggaaactgattataaccactcgggcaccatcgatgcccacgagatgaggacagccctcaggaaggcaggtttcaccctcaacagccaggtgcagcagaccattgccctgcggtatgcgtgcagcaagcttggcatcaactttgacagcttcgtggcttgtatgatccgcctggagaccctcttcaaactattcagccttctggacgaagacaaggatggcatggttcagctctctctggccgagtggctgtgctgcgtgttggtctgacccggggtttcggacatcagtgacactccctgccccactgcttgcttcttgtcaccccttctctacaattttgtgaacatttatgctccagtggcattcactggttgttcatacctttcttgccctgggtctatttcagcagcactgagctatgagctatgtaagccgacccggtgggcccagtggagggaaagcaatcaattaaagttgtgagccagaatggt

SEQ ID NO: 113638 - DNA, 1399 bp, Homo sapiens
  Payload ID: 2208
  Gene Symbol: CAPN8
  Gene Name: calpain 8
  ENST ID: ENST00000419193
  CDS Start-End: 89-1399
gtgccttatagctcccctcccagtggagcaggtgtctgagagtacagtgcagccctgcccttctgtccaccctacagagcccacggccatggcagcccaggcagctggtgtatctaggcagcgggcagccactcaaggtcttggctccaaccaaaacgctttgaagtacttgggccaggatttcaagaccctgaggcaacagtgcttggactcaggggtcctatttaaggaccctgagttcccagcatgtccatcagctttgggctacaaggatcttggaccaggctctccgcaaactcaaggcatcatctggaagcggcccacggagttgtgtcccagccctcagtttatcgttggtggagccacgcgcacagacatttgtcagggtggtctaggtgactgctggcttctggctgccattgcctccctgaccctgaatgaagagctgctttaccgggtggtccccagggaccaggacttccaggagaactatgcgggaatctttcactttcagttctggcagtacggagagtgggtggaggtggtcattgacgacaggctgcccaccaagaatggacagctgctcttcctacactcggaacaaggcaatgaattctggagtgccctgctggagaaagcctatgccaagcttaatggttgttatgaggctctcgctggaggttccacagtggaggggtttgaggatttcacaggtggcatctctgagttttatgacctgaagaaaccaccagccaatctatatcagatcatccggaaggccctctgtgcggggtctctgctgggctgctccattgatgtctccagtgcagccgaagccgaagccatcaccagccagaagctggttaagagtcatgcgtactctgtcactggagtcgaagaggtgaatttccagggccatccagagaagctgatcagactcaggaatccatggggtgaagtggagtggtcgggagcctggagcgatgatgcaccagagtggaatcacatagacccccggcggaaggaagaactggacaagaaagttgaggatggagaattctggatgtcactttcagatttcgtgaggcagttctctcggttggagatctgcaacctgtccccggactctctgagtagcgaggaggtgcacaaatggaacctggtcctgttcaacggccactggacccggggctccacagctgggggctgccagaactacccagccacgtactggaccaatccccagttcaaaatccgtttggatgaagtggatgaggaccaggaggagagcatcggtgaaccctgctgtacagtgctgctgggcctgatgcagaaaaatcgcaggtggcggaagcggataggacaaggcatgcttagcatcggctatgccgtctaccag

SEQ ID NO: 113639 - DNA, 327 bp, Homo sapiens
  Payload ID: 2208
  Gene Symbol: CAPN8
  Gene Name: calpain 8
  ENST ID: ENST00000442247
  CDS Start-End: 1-306
gattctgagattactgccaatgcactcaagatacttttgaatgaggcgttttccaagagaacagacataaaattcgatggattcaacatcaacacttgcagggaaatgatcagtctgttggatgaagaaacacaagacaccatgcaagtcccagactcatctgagaccttctggaacacggaagctgacattttggacacagtgagaagatggccctctatgaaccaggaagggggccctcacagacaccagatctgccagtgctttgatcttggacttctcagccttcgaaactatgagaaataaatttctgttgtttataaggca

SEQ ID NO: 113640 - DNA, 884 bp, Homo sapiens
  Payload ID: 2208
  Gene Symbol: CAPN8
  Gene Name: calpain 8
  ENST ID: ENST00000467384
  CDS Start-End: 1-117
gagttgtgtcccagccctcagtttatcgttggtggagccacgcgcacagacatttgtcagggtggtctagaaacgagatggatgagaattggcctggtgggcttcagaagcaactaggaggaactctgaaataatctgaacaagtttcttcagctgtgaagagtttgcttgcttttttttctttttctttttccttttcctctccactgaaaacttagaaggtgactgctggcttctggctgccattgcctccctgaccctgaatgaagagctgctttaccgggtggtccccagggaccaggacttccaggagaactatgcgggaatctttcactttcagttctggcagtacggagagtgggtggaggtggtcattgacgacaggctgcccaccaagaatggacagctgctcttcctacactcggaacaaggcaatgaattctggagtgccctgctggagaaagcctatgccaagcttaatggttgttatgaggctctcgctggaggttccacagtggaggggtttgaggatttcacaggtggcatctctgagttttatgacctgaagaaaccaccagccaatctatatcagatcatccggaaggccctctgtgcggggtctctgctgggctgctccattgatgtctccagtgcagccgaagccgaagccatcaccagccagaagctggttaagagtcatgcgtactctgtcactggagtcgaagaggtgaatttccagggccatccagagaagctgatcagactcaggaatccatggggtgaagtggagtggtcgggagcctggagcgatgatgcaccagagtggaatcacatagacccccggcggaaggaagaactggacaagaaagttgaggatggagaat

SEQ ID NO: 113641 - DNA, 710 bp, Homo sapiens
  Payload ID: 2208
  Gene Symbol: CAPN8
  Gene Name: calpain 8
  ENST ID: ENST00000465098
  CDS Start-End: 1-521
accaggacttccaggagaactatgcgggaatctttcactttcagttctggcagtacggagagtgggtggaggtggtcattgacgacaggctgcccaccaagaatggacagctgctcttcctacactcggaacaaggcaatgaattctggagtgccctgctggagaaagcctatgccaagcttaatggttgttatgaggctctcgctggaggttccacagtggaggggtttgaggatttcacaggtggcatctctgagttttatgacctgaagaaaccaccagccaatctatatcagatcatccggaaggccctctgtgcggggtctctgctgggctgctccattgatgtctccagtgcagccgaagccgaagccatcaccagccagaagctggttaagagtcatgcgtactctgtcactggagtcgaagaggtgaatttccagggccatccagagaagctgatcagactcaggaatccatggggtgaagtggagtggtcgggagcctggagcgatgagtaggtttttttcccccgcttctccagtcatctctccctctgcggaagggtgtcgtgtaaaacacacaacaatgagatcgatgtcacagtgagttcagcagcacgtcctgtctgcagatcacacagtgtgttcagaaaagagtattaaatggatccaggctgggaaaagcaaaataaaaaccactgggctgta

SEQ ID NO: 113642 - DNA, 364 bp, Homo sapiens
  Payload ID: 2208
  Gene Symbol: CAPN8
  Gene Name: calpain 8
  ENST ID: ENST00000484873
  CDS Start-End: 1-62
aactattcagccttctggacgaagacaaggatggcatggttcagctctctctggccgagtaaataggaagaaacacaagacaccatgcaagtcccagactcatctgagaccttctggaacacggaagctgacattttgagatggggtttcaccacattacccaggctggtcttgaactctgggactcaagcaatctgcccacctcagcctcccaaagtgctgagattacaggacacagtgagaagatggccctctatgaaccaggaagggggccctcacagacaccagatctgccagtgctttgatcttggacttctcagccttcgaaactatgagaaataaatttctgttgtttataaggcac

SEQ ID NO: 113643 - DNA, 2362 bp, Homo sapiens
  Payload ID: 2209
  Gene Symbol: CAPN9
  Gene Name: calpain 9
  Uniprot ID: O14815
  ENST ID: ENST00000271971
  CDS Start-End: 114-2186
actcagcccagtggccctctgagctgttccttcttgaccggcacacacagctcgcttcttcactttcttttccatccactgccggacccaagccagccttccagggagcagccatgccttacctctaccgggccccagggcctcaggcacacccggttcccaaggacgcccggatcacccactcctcaggccagagctttgagcaaatgaggcaggagtgcctgcagagaggcaccctgtttgaggatgcagacttcccagccagcaattcctccctgttctacagtgagaggccgcagatcccctttgtgtggaaacgaccaggggaaatcgtgaaaaacccagaattcattcttggaggggccaccaggactgatatctgccagggagagctgggagactgctggctattagccgccatcgcctcccttacgcttaatcaaaaagcactggccagagtcatcccccaggaccaaagctttggccctggttatgccgggatattccatttccagttctggcagcacagtgagtggctggacgtggtgatcgatgaccgcctgcccaccttcagggaccgcttggttttcctccactctgccgaccacaacgagttctggagcgccttgctggaaaaagcctacgccaagctaaatgggagctatgaagctctgaagggaggcagcgccatcgaggccatggaagacttcactgggggtgtggcagagaccttccaaactaaagaggcccccgagaacttctatgagattctagagaaggctttgaagagaggctccctgctgggctgcttcattgataccagaagtgctgcagaatctgaggcccggacgccgtttggtcttattaagggtcatgcctacagtgtaacgggaattgaccaggtaagcttccgaggccagagaatcgagctcatccgaatccggaacccttggggccaggttgagtggaacgggtcgtggagcgacagttctccggagtggcgttctgttggtccagctgagcagaagcgtctgtgtcacactgctctggatgatggggaattctggatggcatttaaggacttcaaggcccactttgataaagtggagatctgcaacctcactcccgatgccctggaggaagacgcgatccacaaatgggaggtgacggtccatcagggaagctgggttcgcggctccacggctgggggctgccgcaatttcctggataccttttggaccaatccacaaataaaattgtctctgactgagaaagatgaggggcaggaggagtgtagtttccttgtagccctgatgcagaaagatagaaggaaactcaagagatttggtgccaatgtgctgacaatcggctatgccatttatgagtgccctgacaaagacgaacacctgaacaaagacttcttcagataccacgcttctcgggccagaagcaagacgttcatcaacctgagagaagtctccgaccggttcaagctgccccctggggagtacatcctgattcccagcacttttgagccccaccaggaagctgatttctgtctgagaatcttttcagagaaaaaagccattacccgggatatggatggaaatgtagacattgaccttcctgagcctccaaagccaactccacctgaccaggagacagaggaggagcagcggtttcgggctctgtttgaacaagtcgctggtgaggacatggaggtgacagcagaggaacttgagtatgttttaaatgctgtgctgcaaaagaaaaaggacatcaaattcaagaagctaagcctgatctcctgtaaaaacatcatttccctgatggacaccagcggcaatgggaagctggagtttgatgaattcaaagtgttctgggacaagctgaagcagtggattaaccttttccttcggtttgatgctgacaagtccggcaccatgtctacctatgaactacggactgcactgaaagctgcaggctttcagctgagcagccacctcctgcagctgattgtgctcaggtatgcggatgaggagctccagctggacttcgatgacttcctcaactgcctggtccggctggagaatgcgagccgggtgttccaggctctcagtacaaagaacaaggagttcattcatctcaatataaatgagttcatccatttgacaatgaacatctgaggctgccttgtagagatgcagcctgcccagctgaatcttggcttctggaccttgaccttcagaacttctcttggtgtggaaccattacgcccagggttcactcccctctcatcgtccggccttctcccttcatcttgatctgggaagaatgaaatgaactcagctacactctctga

SEQ ID NO: 113644 - DNA, 2484 bp, Homo sapiens
  Payload ID: 2209
  Gene Symbol: CAPN9
  Gene Name: calpain 9
  Uniprot ID: O14815
  ENST ID: ENST00000354537
  CDS Start-End: 83-2077
tcttgaccggcacacacagctcgcttcttcactttcttttccatccactgccggacccaagccagccttccagggagcagccatgccttacctctaccgggccccagggcctcaggcacacccggttcccaaggacgcccggatcacccactcctcaggccagagctttgagcaaatgaggcaggagtgcctgcagagaggcaccctgtttgaggatgcagacttcccagccagcaattcctccctgttctacagtgagaggccgcagatcccctttgtgtggaaacgaccaggggaaatcgtgaaaaacccagaattcattcttggaggggccaccaggactgatatctgccagggagagctgggagactgctggctattagccgccatcgcctcccttacgcttaatcaaaaagcactggccagagtcatcccccaggaccaaagctttggccctggttatgccgggatattccatttccagttctggcagcacagtgagtggctggacgtggtgatcgatgaccgcctgcccaccttcagggaccgcttggttttcctccactctgccgaccacaacgagttctggagcgccttgctggaaaaagcctacgccaagctaaatgggagctatgaagctctgaagggaggcagcgccatcgaggccatggaagacttcactgggggtgtggcagagaccttccaaactaaagaggcccccgagaacttctatgagattctagagaaggctttgaagagaggctccctgctgggctgcttcattgataccagaagtgctgcagaatctgaggcccggacgccgtttggtcttattaagggtcatgcctacagtgtaacgggaattgaccaggtaagcttccgaggccagagaatcgagctcatccgaatccggaacccttggggccaggttgagtggaacgggtcgtggagcgacaggatggcatttaaggacttcaaggcccactttgataaagtggagatctgcaacctcactcccgatgccctggaggaagacgcgatccacaaatgggaggtgacggtccatcagggaagctgggttcgcggctccacggctgggggctgccgcaatttcctggataccttttggaccaatccacaaataaaattgtctctgactgagaaagatgaggggcaggaggagtgtagtttccttgtagccctgatgcagaaagatagaaggaaactcaagagatttggtgccaatgtgctgacaatcggctatgccatttatgagtgccctgacaaagacgaacacctgaacaaagacttcttcagataccacgcttctcgggccagaagcaagacgttcatcaacctgagagaagtctccgaccggttcaagctgccccctggggagtacatcctgattcccagcacttttgagccccaccaggaagctgatttctgtctgagaatcttttcagagaaaaaagccattacccgggatatggatggaaatgtagacattgaccttcctgagcctccaaagccaactccacctgaccaggagacagaggaggagcagcggtttcgggctctgtttgaacaagtcgctggtgaggacatggaggtgacagcagaggaacttgagtatgttttaaatgctgtgctgcaaaagaaaaaggacatcaaattcaagaagctaagcctgatctcctgtaaaaacatcatttccctgatggacaccagcggcaatgggaagctggagtttgatgaattcaaagtgttctgggacaagctgaagcagtggattaaccttttccttcggtttgatgctgacaagtccggcaccatgtctacctatgaactacggactgcactgaaagctgcaggctttcagctgagcagccacctcctgcagctgattgtgctcaggtatgcggatgaggagctccagctggacttcgatgacttcctcaactgcctggtccggctggagaatgcgagccgggtgttccaggctctcagtacaaagaacaaggagttcattcatctcaatataaatgagttcatccatttgacaatgaacatctgaggctgccttgtagagatgcagcctgcccagctgaatcttggcttctggaccttgaccttcagaacttctcttggtgtggaaccattacgcccagggttcactcccctctcatcgtccggccttctcccttcatcttgatctgggaagaatgaaatgaactcagctacactctctgattttgtgctactcctttgtaaagtcactgccttaagggggctgatggcgccacctgtgccttacatccaggttcaggcatcactagctttcccacactctactttccttatttccttccattaagaattactcagagttctaacgcacagaatcctgacttccatgtagctccagtcattgtgatcagacatcctttataaaacatgtttttataaatgtgtatgtggaat

SEQ ID NO: 113645 - DNA, 2173 bp, Homo sapiens
  Payload ID: 2209
  Gene Symbol: CAPN9
  Gene Name: calpain 9
  ENST ID: ENST00000366666
  CDS Start-End: 114-1997
actcagcccagtggccctctgagctgttccttcttgaccggcacacacagctcgcttcttcactttcttttccatccactgccggacccaagccagccttccagggagcagccatgccttacctctaccgggccccagggcctcaggcacacccggttcccaaggacgcccggatcacccactcctcaggccagagctttgagcaaatgaggcaggagtgcctgcagagaggcaccctgtttgaggatgcagacttcccagccagcaattcctccctgttctacagtgagaggccgcagatcccctttgtgtggaaacgaccagggttctggcagcacagtgagtggctggacgtggtgatcgatgaccgcctgcccaccttcagggaccgcttggttttcctccactctgccgaccacaacgagttctggagcgccttgctggaaaaagcctacgccaagctaaatgggagctatgaagctctgaagggaggcagcgccatcgaggccatggaagacttcactgggggtgtggcagagaccttccaaactaaagaggcccccgagaacttctatgagattctagagaaggctttgaagagaggctccctgctgggctgcttcattgataccagaagtgctgcagaatctgaggcccggacgccgtttggtcttattaagggtcatgcctacagtgtaacgggaattgaccaggtaagcttccgaggccagagaatcgagctcatccgaatccggaacccttggggccaggttgagtggaacgggtcgtggagcgacagttctccggagtggcgttctgttggtccagctgagcagaagcgtctgtgtcacactgctctggatgatggggaattctggatggcatttaaggacttcaaggcccactttgataaagtggagatctgcaacctcactcccgatgccctggaggaagacgcgatccacaaatgggaggtgacggtccatcagggaagctgggttcgcggctccacggctgggggctgccgcaatttcctggataccttttggaccaatccacaaataaaattgtctctgactgagaaagatgaggggcaggaggagtgtagtttccttgtagccctgatgcagaaagatagaaggaaactcaagagatttggtgccaatgtgctgacaatcggctatgccatttatgagtgccctgacaaagacgaacacctgaacaaagacttcttcagataccacgcttctcgggccagaagcaagacgttcatcaacctgagagaagtctccgaccggttcaagctgccccctggggagtacatcctgattcccagcacttttgagccccaccaggaagctgatttctgtctgagaatcttttcagagaaaaaagccattacccgggatatggatggaaatgtagacattgaccttcctgagcctccaaagccaactccacctgaccaggagacagaggaggagcagcggtttcgggctctgtttgaacaagtcgctggtgaggacatggaggtgacagcagaggaacttgagtatgttttaaatgctgtgctgcaaaagaaaaaggacatcaaattcaagaagctaagcctgatctcctgtaaaaacatcatttccctgatggacaccagcggcaatgggaagctggagtttgatgaattcaaagtgttctgggacaagctgaagcagtggattaaccttttccttcggtttgatgctgacaagtccggcaccatgtctacctatgaactacggactgcactgaaagctgcaggctttcagctgagcagccacctcctgcagctgattgtgctcaggtatgcggatgaggagctccagctggacttcgatgacttcctcaactgcctggtccggctggagaatgcgagccgggtgttccaggctctcagtacaaagaacaaggagttcattcatctcaatataaatgagttcatccatttgacaatgaacatctgaggctgccttgtagagatgcagcctgcccagctgaatcttggcttctggaccttgaccttcagaacttctcttggtgtggaaccattacgcccagggttcactcccctctcatcgtccggccttctcccttcatcttgatctgggaagaatgaaatgaactcagctacactctctga

SEQ ID NO: 113646 - DNA, 1918 bp, Homo sapiens
  Payload ID: 2210
  Gene Symbol: CAPNS1
  Gene Name: calpain, small subunit 1
  Uniprot ID: P04632
  ENST ID: ENST00000246533
  CDS Start-End: 599-1405
tgccatccgggctgctgcaggcactgggaaaggcaatccagcctcaatcctcgccacagacacgggcgactgtcccccagcgtgtgagtcaaaccatactccaggcctccaggaggtgtttgtcgcgacaacacctgcagagggcccgtgcggagtcccttagtgagcggaccgaaaaccgccaccctggaaggatattggcatgccctagggtgaaaattcacactacgacactcggggggtgggtcccctccgagttctcgtccgcgggtgcctccacccagacctgaggggtgtcgggaagacccccgcctaccgagtcagggcgggattaagacctccggcgctggaaacgcgtagggcggggcccagacctggatccagctagccgggcggtgtggggtgcgcatgcgcaatgtccgcttcggctctaggaccgcgcgggcgacagcagggccgcggtgcagtgtccgacccgagagttgcggcctgagtcaccggccccgccctccggagccggacgctgcgggaggcccgggagcggcagtggaaccgactcccagaactccggacgtgtgcggcgcagtgagtcgcagccatgttcctggttaactcgttcttgaagggcggcggcggcggcggcgggggaggcgggggcctgggtgggggcctgggaaatgtgcttggaggcctgatcagcggggccgggggcggcggcggcggcggcggcggcggcggcggtggtggaggcggcggtggcggtggaacggccatgcgcatcctaggcggagtcatcagcgccatcagcgaggcggctgcgcagtacaacccggagcccccgcccccacgcacacattactccaacattgaggccaacgagagtgaggaggtccggcagttccggagactctttgcccagctggctggagatgacatggaggtcagcgccacagaactcatgaacattctcaataaggttgtgacacgacaccctgatctgaagactgatggttttggcattgacacatgtcgcagcatggtggccgtgatggatagcgacaccacaggcaagctgggctttgaggaattcaagtacttgtggaacaacatcaaaaggtggcaggccatatacaaacagttcgacactgaccgatcagggaccatttgcagtagtgaactcccaggtgcctttgaggcagcagggttccacctgaatgagcatctctataacatgatcatccgacgctactcagatgaaagtgggaacatggattttgacaacttcatcagctgcttggtcaggctggacgccatgttccgtgccttcaaatctcttgacaaagatggcactggacaaatccaggtgaacatccaggagtggctgcagctgactatgtattcctgaactggagccccagacccgccccctcactgccttgctataggagtcacctggagcctcggtctctcccagggccgatcctgtctgcagtcacatctttgtggggcctgctgacccacaagcttttgttctctcagtacttgttacccagcttctcaacatccagggcccaatttgccctgcctggagttccccctggctctaggacactctaacaagctctgtccacgggtctccccattcccaccaggccctgcacacacccactccgtaacctctcccctgtacctgtgccaagcctagcacttgtgatgcctccatgccccgagggccctctctcagttctgggaggatgactccagtccctgcacgccctggcacacccttcacggttgctacccaggcggccaagctccagaccgtgccagacccaggtgccccagtgcctttgtctatattctgctcccagcctgccaggcccaggaggaaataaacatgccccagttgctgatctct

SEQ ID NO: 113647 - DNA, 1471 bp, Homo sapiens
  Payload ID: 2210
  Gene Symbol: CAPNS1
  Gene Name: calpain, small subunit 1
  Uniprot ID: P04632
  ENST ID: ENST00000588815
  CDS Start-End: 152-958
ccgactcccagaactccggacgtgtgcggcggtaagcgcccggcccgtaccccctccgcaccccgcaactccgactttggcggcccccagacccggcgaaaccgtgaagtctcggcctcaggagccccccagatccatgtgagtcgcagccatgttcctggttaactcgttcttgaagggcggcggcggcggcggcgggggaggcgggggcctgggtgggggcctgggaaatgtgcttggaggcctgatcagcggggccgggggcggcggcggcggcggcggcggcggcggcggtggtggaggcggcggtggcggtggaacggccatgcgcatcctaggcggagtcatcagcgccatcagcgaggcggctgcgcagtacaacccggagcccccgcccccacgcacacattactccaacattgaggccaacgagagtgaggaggtccggcagttccggagactctttgcccagctggctggagatgacatggaggtcagcgccacagaactcatgaacattctcaataaggttgtgacacgacaccctgatctgaagactgatggttttggcattgacacatgtcgcagcatggtggccgtgatggatagcgacaccacaggcaagctgggctttgaggaattcaagtacttgtggaacaacatcaaaaggtggcaggccatatacaaacagttcgacactgaccgatcagggaccatttgcagtagtgaactcccaggtgcctttgaggcagcagggttccacctgaatgagcatctctataacatgatcatccgacgctactcagatgaaagtgggaacatggattttgacaacttcatcagctgcttggtcaggctggacgccatgttccgtgccttcaaatctcttgacaaagatggcactggacaaatccaggtgaacatccaggagtggctgcagctgactatgtattcctgaactggagccccagacccgccccctcactgccttgctataggagtcacctggagcctcggtctctcccagggccgatcctgtctgcagtcacatctttgtggggcctgctgacccacaagcttttgttctctcagtacttgttacccagcttctcaacatccagggcccaatttgccctgcctggagttccccctggctctaggacactctaacaagctctgtccacgggtctccccattcccaccaggccctgcacacacccactccgtaacctctcccctgtacctgtgccaagcctagcacttgtgatgcctccatgccccgagggccctctctcagttctgggaggatgactccagtccctgcacgccctggcacacccttcacggttgctacccaggcggccaagctccagaccgtgccagacccaggtgccccagtgcctttgtctatattctgctcccagcctgccaggcccaggaggaaataaacatgccccagttgctgatctct

SEQ ID NO: 113648 - DNA, 616 bp, Homo sapiens
  Payload ID: 2210
  Gene Symbol: CAPNS1
  Gene Name: calpain, small subunit 1
  ENST ID: ENST00000586851
  CDS Start-End: 1-589
aacggccatgcgcatcctaggcggagtcatcagcgccatcagcgaggcggctgcgcagtacaacccggagcccccgcccccacgcacacattactccaacattgaggccaacgagagtgaggaggtccggcagttccggagactctttgcccagctggctggagatgacatggaggtcagcgccacagaactcatgaacattctcaataaggttgtgacacgacaccctgatctgaagactgatggttttggcattgacacatgtcgcagcatggtggccgtgatggatagcgacaccacaggcaagctgggctttgaggaattcaagtacttgtggaacaacatcaaaaggtggcaggccatatacaaacagttcgacactgaccgatcagggaccatttgcagtagtgaactcccaggtgcctttgaggcagcagatgaaagtgggaacatggattttgacaacttcatcagctgcttggtcaggctggacgccatgttccgtgccttcaaatctcttgacaaagatggcactggacaaatccaggtgaacatccaggagtggctgcagctgactatgtattcctgaactggagccccagacccgccccctcac

SEQ ID NO: 113649 - DNA, 926 bp, Homo sapiens
  Payload ID: 2210
  Gene Symbol: CAPNS1
  Gene Name: calpain, small subunit 1
  ENST ID: ENST00000590874
  CDS Start-End: 48-764
ggaaccgactcccagaactccggacgtgtgcggcgtgagtcgcagccatgttcctggttaactcgttcttgaagggcggcggcggcggcggcgggggaggcgggggcctgggtgggggcctgggaaatgtgcttggaggcctgatcagcggggccgggggcggcggcggcggcggcggcggcggcggcggtggtggaggcggcggtggcggtggaacggccatgcgcatcctaggcggagtcatcagcgccatcagcgaggcggctgcgcagtacaacccggagcccccggacatggaggtcagcgccacagaactcatgaacattctcaataaggttgtgacacgacaccctgatctgaagactgatggttttggcattgacacatgtcgcagcatggtggccgtgatggatagcgacaccacaggcaagctgggctttgaggaattcaagtacttgtggaacaacatcaaaaggtggcaggccatatacaaacagttcgacactgaccgatcagggaccatttgcagtagtgaactcccaggtgcctttgaggcagcagggttccacctgaatgagcatctctataacatgatcatccgacgctactcagatgaaagtgggaacatggattttgacaacttcatcagctgcttggtcaggctggacgccatgttccgtgccttcaaatctcttgacaaagatggcactggacaaatccaggtgaacatccaggagtggctgcagctgactatgtattcctgaactggagccccagacccgccccctcactgccttgctataggagtcacctggagcctcggtctctcccagggccgatcctgtctgcagtcacatctttgtggggcctgctgacccacaagcttttgttctctcagtacttgttacccagcttctcaacatcca

SEQ ID NO: 113650 - DNA, 1035 bp, Homo sapiens
  Payload ID: 2210
  Gene Symbol: CAPNS1
  Gene Name: calpain, small subunit 1
  ENST ID: ENST00000588780
  CDS Start-End: 45-881
cacccactggtccccttttttccccccagcagtgagtcgcagccatgttcctggttaactcgttcttgaagggcggcggcggcggcggcgggggaggcgggggcctgggtgggggcctgggaaatgtgcttggaggcctgatcagcggggccgggggcggcggcggcggcggcggcggcggcggcggtggtggaggcggcggtggcggtggaacggccatgcgcatcctaggcggagtcatcagcgccatcagcgaggcggctgcgcagtacaacccggagcccccgcccccacgcacacattactccaacattgaggccaacgagagtgaggaggtccggcagttccggagactctttgcccagctggctggagatgacatggaggtcagcgccacagaactcatgaacattctcaataaggttgtgacacgacaccctgatctgaagactgatggttttggcattgacacatgtcgcagcatggtggccgtgatggatctgtcactcttcttaacaccctcccaccagagcgacaccacaggcaagctgggctttgaggaattcaagtacttgtggaacaacatcaaaaggtggcaggccatatacaaacagttcgacactgaccgatcagggaccatttgcagtagtgaactcccaggtgcctttgaggcagcagggttccacctgaatgagcatctctataacatgatcatccgacgctactcagatgaaagtgggaacatggattttgacaacttcatcagctgcttggtcaggctggacgccatgttccgtgccttcaaatctcttgacaaagatggcactggacaaatccaggtgaacatccaggagtggctgcagctgactatgtattcctgaactggagccccagacccgccccctcactgccttgctataggagtcacctggagcctcggtctctcccagggccgatcctgtctgcagtcacatctttgtggggcctgctgacccacaagcttttgttctctcagtacttgttacccagcttctc

SEQ ID NO: 113651 - DNA, 812 bp, Homo sapiens
  Payload ID: 2210
  Gene Symbol: CAPNS1
  Gene Name: calpain, small subunit 1
  ENST ID: ENST00000591041
  CDS Start-End: 322-812
tttgctccgcgcccatgacctgccaaggacctctacattcaggctgggctctggatctcacattctagcgcccagacatgtcgggaacgccttacgccaacttggggtccccaccaagagaacccccaccagatctgcaccctccccttcacgcgtgcacccagtccaggctccctcaagccccacgggtgccttttagacctgaggaggttgcaaacctgatcccccatacctgccccacccatccgcggacaacccgccctcgcaaactcagacccccacccggaggcttcagattcctcccagcagtgagtcgcagccatgttcctggttaactcgttcttgaagggcggcggcggcggcggcgggggaggcgggggcctgggtgggggcctgggaaatgtgcttggaggcctgatcagcggggccgggggcggcggcggcggcggcggcggcggcggcggtggtggaggcggcggtggcggtggaacggccatgcgcatcctaggcggagtcatcagcgccatcagcgaggcggctgcgcagtacaacccggagcccccgcccccacgcacacattactccaacattgaggccaacgagagtgaggaggtccggcagttccggagactctttgcccagctggctggagatgacatggaggtcagcgccacagaactcatgaacattctcaataaggttgtgacacgacaccctgatctgaagactgatggttttggcattgacacatgtcgcagcatggtggccgtgatggatagcgacaccacaggcaagctgggctttgaggaatt

SEQ ID NO: 113652 - DNA, 578 bp, Homo sapiens
  Payload ID: 2210
  Gene Symbol: CAPNS1
  Gene Name: calpain, small subunit 1
  ENST ID: ENST00000589146
  CDS Start-End: 221-505
atccagctagccgggcggtgtggggtgcgcatgcgcaatgtccgcttcggctctaggaccgcgcgggcgacagcagggccgcggtgcagtgtccgacccgagagttgcggcctgagtcaccggccccgccctccggagccggacgctgcgggaggcccgggagcggcagtggaaccgactcccagaactccggacgtgtgcggcgcagtgagtcgcagccatgttcctggttaactcgttcttgaagggcggcggcggcggcggcgggggaggcgggggcctgggtgcctttgaggcagcagggttccacctgaatgagcatctctataacatgatcatccgacgctactcagatgaaagtgggaacatggattttgacaacttcatcagctgcttggtcaggctggacgccatgttccgtgccttcaaatctcttgacaaagatggcactggacaaatccaggtgaacatccaggagtggctgcagctgactatgtattcctgaactggagccccagacccgccccctcactgccttgctataggagtcacctggagcctcggtctctcccagggcc

SEQ ID NO: 113653 - DNA, 1558 bp, Homo sapiens
  Payload ID: 2210
  Gene Symbol: CAPNS1
  Gene Name: calpain, small subunit 1
  ENST ID: ENST00000587718
  CDS Start-End: 66-1034
cccgggagcggcagtggaaccgactcccagaactccggacgtgtgcggcgcagtgagtcgcagccatgttcctggttaactcgttcttgaagggcggcggcggcggcggcgggggaggcgggggcctgggtgggggcctgggaaatgtgcttggaggcctgatcagcggggccgggggcggcggcggcggcggcggcggcggcggcggtggtggaggcggcggtggcggtggaacggccatgcgcatcctaggcggagtcatcagcgccatcagcgaggcggctgcgcagtacaacccggagcccccgcccccacgcacacattactccaacattgaggccaacgagagtgaggaggtccggcagttccggagactctttgcccagctggctggagatgacatggaggtcagcgccacagaactcatgaacattctcaataaggttgtgacacgacaccctgatctgaagactgatggttttggcattgacacatgtcgcagcatggtggccgtgatggatagcgacaccacaggcaagctgggctttgaggaattcaagtacttgtggaacaacatcaaaaggtggcaggccatatacaaacagttcgacactgaccgatcagggaccatttgcagtagtgaactcccaggtgcctttgaggcagcagggttccacctgaatgagcatctctataacatgatcatccgacgctactcagatgaaagtgggaacatggattttgacaacttcatcagctgcttggtcaggctggacgccatgttccgtgccttcaaatctcttgacaaagatggcactggacaaatccaggtgaacatccaggaggtaaggacccccatattggggtatgggtgcctgggaggaccccacccctcagcccttcataccagctctgagctgcagtccccttcctcctattttgccagccgtccctgggtgagggcaaaggggctggtgctcttggggttccctgtcctcactctccaccctcctctccccagtggctgcagctgactatgtattcctgaactggagccccagacccgccccctcactgccttgctataggagtcacctggagcctcggtctctcccagggccgatcctgtctgcagtcacatctttgtggggcctgctgacccacaagcttttgttctctcagtacttgttacccagcttctcaacatccagggcccaatttgccctgcctggagttccccctggctctaggacactctaacaagctctgtccacgggtctccccattcccaccaggccctgcacacacccactccgtaacctctcccctgtacctgtgccaagcctagcacttgtgatgcctccatgccccgagggccctctctcagttctgggaggatgactccagtccctgcacgccctggcacacccttcacggttgctacccaggcggccaagctccagaccgtgccagacccaggtgccccagtgcctttgtctatattctgctcccagcctgccaggcccaggaggaaataaacatgccccagttgctgatc

SEQ ID NO: 113654 - DNA, 431 bp, Homo sapiens
  Payload ID: 2210
  Gene Symbol: CAPNS1
  Gene Name: calpain, small subunit 1
  ENST ID: ENST00000592483
  CDS Start-End: 215-431
cgggagcggcagtggaaccgactcccagaactccggacgtgtgcggcggcccataggtttcagagataccctgtgaattcttccttggggtgtcctgaaccgcgatcgtagatctgtgcccccagttccagcggggaaccccattgtccgggaacccagagctcacagccacgatcttagacccgagcccacagagccagagtgagtcgcagccatgttcctggttaactcgttcttgaagggcggcggcggcggcggcgggggaggcgggggcctgggtgggggcctgggaaatgtgcttggaggcctgatcagcggggccgggggcggcggcggcggcggcggcggcggcggcggtggtggaggcggcggtggcggtggaacggccatgcgcatcctaggcggagtcatcagcgccatcagcgaggcgg

SEQ ID NO: 113655 - DNA, 592 bp, Homo sapiens
  Payload ID: 2210
  Gene Symbol: CAPNS1
  Gene Name: calpain, small subunit 1
  ENST ID: ENST00000590049
  CDS Start-End: 1-592
ggaggcggcggtggcggtggaacggccatgcgcatcctaggcggagtcatcagcgccatcagcgaggcggctgcgcagtacaacccggagcccccgcccccacgcacacattactccaacattgaggccaacgagagtgaggaggtccggcagttccggagactctttgcccagctggctggagatgacatggaggtcagcgccacagaactcatgaacattctcaataaggttgtgacacgacaccctgatctgaagactgatggttttggcattgacacatgtcgcagcatggtggccgtgatggatagcgacaccacaggcaagctgggctttgaggaattcaagtacttgtggaacaacatcaaaaggtggcaggccatatacaaacagttcgacactgaccgatcagggaccatttgcagtagtgaactcccaggtgcctttgaggcagcagggttccacctgaatgagcatctctataacatgatcatccgacgctactcagatgaaagtgggaacatggattttgacaacttcatcagctgcttggcccaggaggaaataaacatgccccagttgctgatctcta

SEQ ID NO: 113656 - DNA, 403 bp, Homo sapiens
  Payload ID: 2210
  Gene Symbol: CAPNS1
  Gene Name: calpain, small subunit 1
  ENST ID: ENST00000590211
  CDS Start-End: 1-164
gcatcctaggcggagtcatcagcgccatcagcgaggcggctgcgcagtacaacccggagcccccgcccccacgcacacattactccaacattgaggacactctaacaagctctgtccacgggtctccccattcccaccaggccctgcacacacccactccgtaacctctcccctgtacctgtgccaagcctagcacttgtgatgcctccatgccccgagggccctctctcagttctgggaggatgactccagtccctgcacgccctggcacacccttcacggttgctacccaggcggccaagctccagaccgtgccagacccaggtgccccagtgcctttgtctatattctgctcccagcctgccaggcccaggaggaaataaacatgccccagttgctgatc

SEQ ID NO: 113657 - DNA, 690 bp, Homo sapiens
  Payload ID: 2210
  Gene Symbol: CAPNS1
  Gene Name: calpain, small subunit 1
  ENST ID: ENST00000592354
  CDS Start-End: 390-690
aaaatagaataggattaacctggaggctaacctgggtacatgaattaggccggggaggcctggtttgagagttctgctgtaagggggtggaccccagtgaggcggatatcagtcattgggggcggtgcttgatatgggagtagtctgattgtgtgggaccaggacaatgtggtcctgaggggactgatgtggagttttggcgggtggggcttatgggtctgggctcagcctgcattggctaacctggagatgaacgttaaagcgaggcggctgcgcagtacaacccggagcccccgcccccacgcacacattactccaacattgaggccaacgagagtgaggaggtccggcagttccggagactctttgcccagctggctggagatgacatggaggtcagcgccacagaactcatgaacattctcaataaggttgtgacacgacaccctgatctgaagactgatggttttggcattgacacatgtcgcagcatggtggccgtgatggatagcgacaccacaggcaagctgggctttgaggaattcaagtacttgtggaacaacatcaaaaggtggcaggccatatacaaacagttcgacactgaccgatcagggaccatttgcagtagtgaactcccaggtgcctttgaggcagcagggttccacctgaatgagcatctctataacatga

SEQ ID NO: 113658 - DNA, 570 bp, Homo sapiens
  Payload ID: 2210
  Gene Symbol: CAPNS1
  Gene Name: calpain, small subunit 1
  ENST ID: ENST00000586963
  CDS Start-End: 87-570
tttacggaaggggcttgacttatgagtgtggtcagaggttttaggtgggttaatgaggaggtgagcccaggaggaagcaagacctaatgggcgaggcggctgcgcagtacaacccggagcccccgcccccacgcacacattactccaacattgaggccaacgagagtgaggaggtccggcagttccggagactctttgcccagctggctggagatgacatggaggtcagcgccacagaactcatgaacattctcaataaggttgtgacacgacaccctgatctgaagactgatggttttggcattgacacatgtcgcagcatggtggccgtgatggatagcgacaccacaggcaagctgggctttgaggaattcaagtacttgtggaacaacatcaaaaggtggcaggccatatacaaacagttcgacactgaccgatcagggaccatttgcagtagtgaactcccaggtgcctttgaggcagcagggttccacctgaatgagcatctctataacatgatcatccgacgctactcagatgaaagtgggaacatggattttgacaacttca

SEQ ID NO: 113659 - DNA, 799 bp, Homo sapiens
  Payload ID: 2210
  Gene Symbol: CAPNS1
  Gene Name: calpain, small subunit 1
  ENST ID: ENST00000629983
  CDS Start-End: 1-285
atgttcctggttaactcgttcttgaagggcggcggcggcggcggcgggggaggcgggggcctgggtgcctttgaggcagcagggttccacctgaatgagcatctctataacatgatcatccgacgctactcagatgaaagtgggaacatggattttgacaacttcatcagctgcttggtcaggctggacgccatgttccgtgccttcaaatctcttgacaaagatggcactggacaaatccaggtgaacatccaggagtggctgcagctgactatgtattcctgaactggagccccagacccgccccctcactgccttgctataggagtcacctggagcctcggtctctcccagggccgatcctgtctgcagtcacatctttgtggggcctgctgacccacaagcttttgttctctcagtacttgttacccagcttctcaacatccagggcccaatttgccctgcctggagttccccctggctctaggacactctaacaagctctgtccacgggtctccccattcccaccaggccctgcacacacccactccgtaacctctcccctgtacctgtgccaagcctagcacttgtgatgcctccatgccccgagggccctctctcagttctgggaggatgactccagtccctgcacgccctggcacacccttcacggttgctacccaggcggccaagctccagaccgtgccagacccaggtgccccagtgcctttgtctatattctgctcccagcctgccaggcccaggaggaaataaacatgccccagttgctgatctcta

SEQ ID NO: 113660 - DNA, 1389 bp, Homo sapiens
  Payload ID: 2210
  Gene Symbol: CAPNS1
  Gene Name: calpain, small subunit 1
  ENST ID: ENST00000628306
  CDS Start-End: 159-875
gcgggcgacagcagggccgcggtgcagtgtccgacccgagagttgcggcctgagtcaccggccccgccctccggagccggacgctgcgggaggcccgggagcggcagtggaaccgactcccagaactccggacgtgtgcggcgcagtgagtcgcagccatgttcctggttaactcgttcttgaagggcggcggcggcggcggcgggggaggcgggggcctgggtgggggcctgggaaatgtgcttggaggcctgatcagcggggccgggggcggcggcggcggcggcggcggcggcggcggtggtggaggcggcggtggcggtggaacggccatgcgcatcctaggcggagtcatcagcgccatcagcgaggcggctgcgcagtacaacccggagcccccggacatggaggtcagcgccacagaactcatgaacattctcaataaggttgtgacacgacaccctgatctgaagactgatggttttggcattgacacatgtcgcagcatggtggccgtgatggatagcgacaccacaggcaagctgggctttgaggaattcaagtacttgtggaacaacatcaaaaggtggcaggccatatacaaacagttcgacactgaccgatcagggaccatttgcagtagtgaactcccaggtgcctttgaggcagcagggttccacctgaatgagcatctctataacatgatcatccgacgctactcagatgaaagtgggaacatggattttgacaacttcatcagctgcttggtcaggctggacgccatgttccgtgccttcaaatctcttgacaaagatggcactggacaaatccaggtgaacatccaggagtggctgcagctgactatgtattcctgaactggagccccagacccgccccctcactgccttgctataggagtcacctggagcctcggtctctcccagggccgatcctgtctgcagtcacatctttgtggggcctgctgacccacaagcttttgttctctcagtacttgttacccagcttctcaacatccagggcccaatttgccctgcctggagttccccctggctctaggacactctaacaagctctgtccacgggtctccccattcccaccaggccctgcacacacccactccgtaacctctcccctgtacctgtgccaagcctagcacttgtgatgcctccatgccccgagggccctctctcagttctgggaggatgactccagtccctgcacgccctggcacacccttcacggttgctacccaggcggccaagctccagaccgtgccagacccaggtgccccagtgcctttgtctatattctgctcccagcctgccaggcccaggaggaaataaacatgccccagttgctgatctcta

SEQ ID NO: 113661 - DNA, 1509 bp, Homo sapiens
  Payload ID: 2210
  Gene Symbol: CAPNS1
  Gene Name: calpain, small subunit 1
  ENST ID: ENST00000628018
  CDS Start-End: 159-995
gcgggcgacagcagggccgcggtgcagtgtccgacccgagagttgcggcctgagtcaccggccccgccctccggagccggacgctgcgggaggcccgggagcggcagtggaaccgactcccagaactccggacgtgtgcggcgcagtgagtcgcagccatgttcctggttaactcgttcttgaagggcggcggcggcggcggcgggggaggcgggggcctgggtgggggcctgggaaatgtgcttggaggcctgatcagcggggccgggggcggcggcggcggcggcggcggcggcggcggtggtggaggcggcggtggcggtggaacggccatgcgcatcctaggcggagtcatcagcgccatcagcgaggcggctgcgcagtacaacccggagcccccgcccccacgcacacattactccaacattgaggccaacgagagtgaggaggtccggcagttccggagactctttgcccagctggctggagatgacatggaggtcagcgccacagaactcatgaacattctcaataaggttgtgacacgacaccctgatctgaagactgatggttttggcattgacacatgtcgcagcatggtggccgtgatggatctgtcactcttcttaacaccctcccaccagagcgacaccacaggcaagctgggctttgaggaattcaagtacttgtggaacaacatcaaaaggtggcaggccatatacaaacagttcgacactgaccgatcagggaccatttgcagtagtgaactcccaggtgcctttgaggcagcagggttccacctgaatgagcatctctataacatgatcatccgacgctactcagatgaaagtgggaacatggattttgacaacttcatcagctgcttggtcaggctggacgccatgttccgtgccttcaaatctcttgacaaagatggcactggacaaatccaggtgaacatccaggagtggctgcagctgactatgtattcctgaactggagccccagacccgccccctcactgccttgctataggagtcacctggagcctcggtctctcccagggccgatcctgtctgcagtcacatctttgtggggcctgctgacccacaagcttttgttctctcagtacttgttacccagcttctcaacatccagggcccaatttgccctgcctggagttccccctggctctaggacactctaacaagctctgtccacgggtctccccattcccaccaggccctgcacacacccactccgtaacctctcccctgtacctgtgccaagcctagcacttgtgatgcctccatgccccgagggccctctctcagttctgggaggatgactccagtccctgcacgccctggcacacccttcacggttgctacccaggcggccaagctccagaccgtgccagacccaggtgccccagtgcctttgtctatattctgctcccagcctgccaggcccaggaggaaataaacatgccccagttgctgatctcta

SEQ ID NO: 113662 - DNA, 1016 bp, Homo sapiens
  Payload ID: 2211
  Gene Symbol: CAPNS2
  Gene Name: calpain, small subunit 2
  Uniprot ID: Q96L46
  ENST ID: ENST00000457326
  CDS Start-End: 86-832
cacatgtaaactacttgaactccatttcatcttttttcataccatctctaagattgctgccgcatttgcttgttaaactgaaagcatgtttcttgcaaaggctctattggaaggagcagatcgaggtcttggagaagctcttggaggcctctttggaggaggtggtcagagaagagaaggaggaggaagaaatattggagggatagttggaggaattgtgaattttatcagtgaggctgcagcagctcagtatactccagaaccgcctcccactcagcagcatttcaccagtgtggaggcctcagaaagtgaggaagttaggcgatttcggcaacaatttacacagctggctggaccagacatggaggtgggtgccactgatctgatgaatattctcaacaaagtcctttctaagcacaaagatcttaagactgacggttttagtcttgacacctgccggagcattgtgtctgtcatggacagtgacacgactggtaagctgggctttgaagaatttaagtatctgtggaacaacatcaagaaatggcagtgtgtttataagcagtatgacagggaccattctgggtctctgggaagttctcagctgcggggagctctgcaggccgcaggcttccagctaaatgaacaactttaccaaatgattgtccgccggtatgctaatgaagatggagatatggattttaacaatttcatcagctgcttggtccgcctggatgccatgtttcgtgccttcaagtctctggatagagatagagatggcctgattcaagtgtctatcaaagaatggctgcagttgaccatgtattcctgaagtgggaactgagaagtcaagatcctccctggaggacaggactgaaaaccttgccaagctgtacacagttgctgataccctgtgcaacagctctcatttcctggcaagctctttcacaaccctacatatttctgatcatgtgctgccttttactgctgaattaaaacagatatttcacgaaaaa

SEQ ID NO: 113663 - DNA, 4282 bp, Homo sapiens
  Payload ID: 2212
  Gene Symbol: CAST
  Gene Name: calpastatin
  Uniprot ID: P20810
  ENST ID: ENST00000309190
  CDS Start-End: 155-2215
cactcagagagctgggctggagctccaagcggaaaccgcgggagccgagcccagctaggaatgcagacctcctgaaaaccaagccgaggactgcggggtccggtgtccacgcagagtgtcagcttcctctggtgcaaccagcaagtcttccagtatgaatcccacagaaaccaaggctgtaaaaacagaacctgagaagaagtcacagtcaaccaagctgtctgtggttcatgagaaaaaatcccaagaaggaaagccaaaagaacacacagagccaaaaagcctacccaagcaggcatcagatacaggaagtaacgatgctcacaataaaaaagcagtttccagatcagctgaacagcagccatcagagaaatcaacagaaccaaagactaaaccacaagacatgatttctgctggtggagagagtgttgctggtatcactgcaatatctggcaagccgggtgacaagaaaaaagaaaagaaatcattaaccccagctgtgccagttgaatctaaaccggataaaccatcgggaaagtcaggcatggatgctgctttggatgacttaatagatactttaggaggacctgaagaaactgaagaagaaaatacaacgtatactggaccagaagtttcagatccaatgagttccacctacatagaggaattgggtaaaagagaagtcacaattcctccaaaatatagggaactattggctaaaaaggaagggatcacagggcctcctgcagactcttcgaaacccatagggccagatgatgctatagacgccttgtcatctgacttcacctgtgggtcgcctacagctgctggaaagaaaactgaaaaagaggaatctacagaagttttaaaagctcagtcagcagggacagtcagaagtgctgctccaccccaagagaagaaaagaaaggtggagaaggatacaatgagtgatcaagcactcgaggctctgtcggcttcactgggcacccggcaagcagaacctgagctcgacctccgctcaattaaggaagtcgatgaggcaaaagctaaagaagaaaaactagagaagtgtggtgaggatgatgaaacaatcccatctgagtacagattaaaaccagccacggataaagatggaaaaccactattgccagagcctgaagaaaaacccaagcctcggagtgaatcagaactcattgatgaactttcagaagattttgaccggtctgaatgtaaagagaaaccatctaagccaactgaaaagacagaagaatctaaggccgctgctccagctcctgtgtcggaggctgtgtgtcggacctccatgtgtagtatacagtcagcaccccctgagccggctaccttgaagggcacagtgccagatgatgctgtagaagccttggctgatagcctggggaaaaaggaagcagatccagaagatggaaaacctgtgatggataaagtcaaggagaaggccaaagaagaagaccgtgaaaagcttggtgaaaaagaagaaacaattcctcctgattatagattagaagaggtcaaggataaagatggaaagccactcctgccaaaagagtctaaggaacagcttccacccatgagtgaagacttccttctggatgctttgtctgaggacttctctggtccacaaaatgcttcatctcttaaatttgaagatgctaaacttgctgctgccatctctgaagtggtttcccaaaccccagcttcaacgacccaagctggagccccaccccgtgatacctcgcagagtgacaaagacctcgatgatgccttggataaactctctgacagtctaggacaaaggcagcctgacccagatgagaacaaaccaatggaagataaagtaaaggaaaaagctaaagctgaacatagagacaagcttggagaaagagatgacactatcccacctgaatacagacatctcctggatgataatggacaggacaaaccagtgaagccacctacaaagaaatcagaggattcaaagaaacctgcagatgaccaagaccccattgatgctctctcaggagatctggacagctgtccctccactacagaaacctcacagaacacagcaaaggataagtgcaagaaggctgcttccagctccaaagcacctaagaatggaggtaaagcgaaggattcagcaaagacaacagaggaaacttccaagccaaaagatgactaaagaaatacaagttaaggtatctggtatctgcatgtaaaatcttcagctggtggatggtgacttttgaagaacaaaaggctttggcaacagaaaacaattgttctgggtgatttctagaatggtttttgttgagtctctgaacatcctaaatattggtttgttattcttttccagaaagaaaatgaatttgactggttcacctgtgtactgagtattgataaactttgaatttttttaattgccttcaattgggagagaaagctttatatttgtaagaaatatatttgataaagtttcttaaagcaacaccaaaaaaacaaaagaaaagctaagtgaatttttgcacattctacacacagtgcctgtaaatctcatttgtattttcagtttgcccttaattttttttgttagtgtttagaaaacaatgttttaaacattcttcagtgttctgatttcttattaccccctttcctcttgggcttttgaactgtatttgatgttgctttgggataatgtttataagtcaaacataagatattgtacattgggcacatatctcctcttgggctgctaataataaattaataacaggtaacctggacaaaccaggaagcaccaaaccccttttcagtttgaactcttctttgccaggtgtgaggacttctgcatcttacagtcagcacagaacacactgagacttgaatcaagtcagcaacagagcaaaataaaggttagataagtccttgtgtagcaaatttcgagcataagaaataaaatctaattaattcttagggtactcatctgacttgaactctgttggtttactgtgttagtaaactgtgctttctattatctatacataaaacctgagcagcaactgtgtctttagagctattgccacattagcctttgcactgtatagcgtctggctttatggaacttaagtttaccaaatataaaaagaaacttctgcttttaaaaaaattatatatatatattaaatttgaaacctgcatttctcccacagcaatgtaagaagtaggctctgatgtcctaccactttgaatggttttctaatatcttaatgaatagttcctgaacattgcactgatatcatcgattagaattttgatatttaatttcatctttatttcctggtagagaatgcaggaaaagatgtcaggtacataacataaaacagattgggaatttattgtttccaaagggcatggccttccttagcatcagtttgaagcttttgttatgacttagctgacttgtggcagcggggcaagcaaaaacaataacactgcttataaatggcaccacatcttgttaacctcccccccaaatactctctgaaagtcatgcacatacctatgggattttacacaccaccagcttaaaatgctatgtctctatccatcagaaatagtcattattctatttttaaggcagcaacaagaaaagaaaaaacacttttcctgagggatttctaaccatgtatctaatcctcccatttgggcagtataggtgtttgcttttttgttttctttttttaagaaaaaccttgaaacctttgacactgacagatgtgtttgcaaggatacggcttcagtattactaatttccatgtgtatctggaagtatttttaaatggcataccaaaatccagaagtttaaagatgcctataaaagtaaacaacatttatttaaaaagaactctgaatatgccttcttttttaattagaaatatcttcgagacttgggtgtttgttaataactaataactggagtaagctacaggatctaaagcagccctttttacagtctagttaggagagagaaaataattgcaaatatccacttagaggcaaagaacaattttttattatcaaaaaggtttctgcacattgttgtggcaatattgtatctgtttagaaaatgggcttttccaaaagcaaacaaagataggttcctcaggtgaccaaaactgaaaatcaatatttccatgtttcattaatcaaggcataaaatacaattaaagcaaaatattttacattaaaa

SEQ ID NO: 113664 - DNA, 3356 bp, Homo sapiens
  Payload ID: 2212
  Gene Symbol: CAST
  Gene Name: calpastatin
  ENST ID: ENST00000325674
  CDS Start-End: 1-1293
atgggccagtttctatcttcgactttcttggagggctcaccggccacagtgtggcacgataagctttgtgacggtgaacgcagaggagcaagagaagcagttcgtatcttccaggaccaagcaaaagctaaagaagaaaaactagagaagtgtggtgaggatgatgaaacaatcccatctgagtacagattaaaaccagccacggataaagatggaaaaccactattgccagagcctgaagaaaaacccaagcctcggagtgaatcagaactcattgatgaactttcagaagattttgaccggtctgaatgtaaagagaaaccatctaagccaactgaaaagacagaagaatctaaggccgctgctccagctcctgtgtcggaggctgtgtgtcggacctccatgtgtagtatacagtcagcaccccctgagccggctaccttgaagggcacagtgccagatgatgctgtagaagccttggctgatagcctggggaaaaaggaagcagatccagaagatggaaaacctgtgatggataaagtcaaggagaaggccaaagaagaagaccgtgaaaagcttggtgaaaaagaagaaacaattcctcctgattatagattagaagaggtcaaggataaagatggaaagccactcctgccaaaagagtctaaggaacagcttccacccatgagtgaagacttccttctggatgctttgtctgaggacttctctggtccacaaaatgcttcatctcttaaatttgaagatgctaaacttgctgctgccatctctgaagtggtttcccaaaccccagcttcaacgacccaagctggagccccaccccgtgatacctcgagtgacaaagacctcgatgatgccttggataaactctctgacagtctaggacaaaggcagcctgacccagatgagaacaaaccaatggaagataaagtaaaggaaaaagctaaagctgaacatagagacaagcttggagaaagagatgacactatcccacctgaatacagacatctcctggatgataatggacaggacaaaccagtgaagccacctacaaagaaatcagaggattcaaagaaacctgcagatgaccaagaccccattgatgctctctcaggagatctggacagctgtccctccactacagaaacctcacagaacacagcaaaggataagtgcaagaaggctgcttccagctccaaagcacctaagaatggaggtaaagcgaaggattcagcaaagacaacagaggaaacttccaagccaaaagatgactaaagaaatacaagttaaggtatctggtatctgcatgtaaaatcttcagctggtggatggtgacttttgaagaacaaaaggctttggcaacagaaaacaattgttctgggtgatttctagaatggtttttgttgagtctctgaacatcctaaatattggtttgttattcttttccagaaagaaaatgaatttgactggttcacctgtgtactgagtattgataaactttgaatttttttaattgccttcaattgggagagaaagctttatatttgtaagaaatatatttgataaagtttcttaaagcaacaccaaaaaaacaaaagaaaagctaagtgaatttttgcacattctacacacagtgcctgtaaatctcatttgtattttcagtttgcccttaattttttttgttagtgtttagaaaacaatgttttaaacattcttcagtgttctgatttcttattaccccctttcctcttgggcttttgaactgtatttgatgttgctttgggataatgtttataagtcaaacataagatattgtacattgggcacatatctcctcttgggctgctaataataaattaataacaggtaacctggacaaaccaggaagcaccaaaccccttttcagtttgaactcttctttgccaggtgtgaggacttctgcatcttacagtcagcacagaacacactgagacttgaatcaagtcagcaacagagcaaaataaaggttagataagtccttgtgtagcaaatttcgagcataagaaataaaatctaattaattcttagggtactcatctgacttgaactctgttggtttactgtgttagtaaactgtgctttctattatctatacataaaacctgagcagcaactgtgtctttagagctattgccacattagcctttgcactgtatagcgtctggctttatggaacttaagtttaccaaatataaaaagaaacttctgcttttaaaaaaattatatatatatattaaatttgaaacctgcatttctcccacagcaatgtaagaagtaggctctgatgtcctaccactttgaatggttttctaatatcttaatgaatagttcctgaacattgcactgatatcatcgattagaattttgatatttaatttcatctttatttcctggtagagaatgcaggaaaagatgtcaggtacataacataaaacagattgggaatttattgtttccaaagggcatggccttccttagcatcagtttgaagcttttgttatgacttagctgacttgtggcagcggggcaagcaaaaacaataacactgcttataaatggcaccacatcttgttaacctcccccccaaatactctctgaaagtcatgcacatacctatgggattttacacaccaccagcttaaaatgctatgtctctatccatcagaaatagtcattattctatttttaaggcagcaacaagaaaagaaaaaacacttttcctgagggatttctaaccatgtatctaatcctcccatttgggcagtataggtgtttgcttttttgttttctttttttaagaaaaaccttgaaacctttgacactgacagatgtgtttgcaaggatacggcttcagtattactaatttccatgtgtatctggaagtatttttaaatggcataccaaaatccagaagtttaaagatgcctataaaagtaaacaacatttatttaaaaagaactctgaatatgccttcttttttaattagaaatatcttcgagacttgggtgtttgttaataactaataactggagtaagctacaggatctaaagcagccctttttacagtctagttaggagagagaaaataattgcaaatatccacttagaggcaaagaacaattttttattatcaaaaaggtttctgcacattgttgtggcaatattgtatctgtttagaaaatgggcttttccaaaagcaaacaaagataggttcctcaggtgaccaaaactgaaaatcaatatttccatgtttcattaatcaaggcataaaatacaattaaagcaaaatattttacatt

SEQ ID NO: 113665 - DNA, 2487 bp, Homo sapiens
  Payload ID: 2212
  Gene Symbol: CAST
  Gene Name: calpastatin
  Uniprot ID: P20810
  ENST ID: ENST00000341926
  CDS Start-End: 163-2289
acattggtaaggtgttttcccccattgaaactaatattttctattttcaagaaaaaagcagcaagcctcggcagcagtcaatcctccagaacctatgctggtggaacagcctcggccaccaaggtgtcagcttcctctggtgcaaccagcaagtcttccagtatgaatcccacagaaaccaaggccattccagtcagccaacagatggaaggaccacatcttcctaacaagaaaaaacacaaaaaacaggctgtaaaaacagaacctgagaagaagtcacagtcaaccaagctgtctgtggttcatgagaaaaaatcccaagaaggaaagccaaaagaacacacagagccaaaaagcctacccaagcaggcatcagatacaggaagtaacgatgctcacaataaaaaagcagtttccagatcagctgaacagcagccatcagagaaatcaacagaaccaaagactaaaccacaagacatgatttctgctggtggagagagtgttgctggtatcactgcaatatctggcaagccgggtgacaagaaaaaagaaaagaaatcattaaccccagctgtgccagttgaatctaaaccggataaaccatcgggaaagtcaggcatggatgctgctttggatgacttaatagatactttaggaggacctgaagaaactgaagaagaaaatacaacgtatactggaccagaagtttcagatccaatgagttccacctacatagaggaattgggtaaaagagaagtcacaattcctccaaaatatagggaactattggctaaaaaggaagggatcacagggcctcctgcagactcttcgaaacccatagggccagatgatgctatagacgccttgtcatctgacttcacctgtgggtcgcctacagctgctggaaagaaaactgaaaaagaggaatctacagaagttttaaaagctcagtcagcagggacagtcagaagtgctgctccaccccaagagaagaaaagaaaggtggagaaggatacaatgagtgatcaagcactcgaggctctgtcggcttcactgggcacccggcaagcagaacctgagctcgacctccgctcaattaaggaagtcgatgaggcaaaagctaaagaagaaaaactagagaagtgtggtgaggatgatgaaacaatcccatctgagtacagattaaaaccagccacggataaagatggaaaaccactattgccagagcctgaagaaaaacccaagcctcggagtgaatcagaactcattgatgaactttcagaagattttgaccggtctgaatgtaaagagaaaccatctaagccaactgaaaagacagaagaatctaaggccgctgctccagctcctgtgtcggaggctgtgtgtcggacctccatgtgtagtatacagtcagcaccccctgagccggctaccttgaagggcacagtgccagatgatgctgtagaagccttggctgatagcctggggaaaaaggaagcagatccagaagatggaaaacctgtgatggataaagtcaaggagaaggccaaagaagaagaccgtgaaaagcttggtgaaaaagaagaaacaattcctcctgattatagattagaagaggtcaaggataaagatggaaagccactcctgccaaaagagtctaaggaacagcttccacccatgagtgaagacttccttctggatgctttgtctgaggacttctctggtccacaaaatgcttcatctcttaaatttgaagatgctaaacttgctgctgccatctctgaagtggtttcccaaaccccagcttcaacgacccaagctggagccccaccccgtgatacctcgcagagtgacaaagacctcgatgatgccttggataaactctctgacagtctaggacaaaggcagcctgacccagatgagaacaaaccaatggaagataaagtaaaggaaaaagctaaagctgaacatagagacaagcttggagaaagagatgacactatcccacctgaatacagacatctcctggatgataatggacaggacaaaccagtgaagccacctacaaagaaatcagaggattcaaagaaacctgcagatgaccaagaccccattgatgctctctcaggagatctggacagctgtccctccactacagaaacctcacagaacacagcaaaggataagtgcaagaaggctgcttccagctccaaagcacctaagaatggaggtaaagcgaaggattcagcaaagacaacagaggaaacttccaagccaaaagatgactaaagaaatacaagttaaggtatctggtatctgcatgtaaaatcttcagctggtggatggtgacttttgaagaacaaaaggctttggcaacagaaaacaattgttctgggtgatttctagaatggtttttgttgagtctctgaacatcctaaatattggtttgttattcttttccagaaagaaaatgaatttgactggttc

SEQ ID NO: 113666 - DNA, 2972 bp, Homo sapiens
  Payload ID: 2212
  Gene Symbol: CAST
  Gene Name: calpastatin
  Uniprot ID: P20810
  ENST ID: ENST00000338252
  CDS Start-End: 268-2355
tctgggcatcgaaggaggaacgctgcaacctccaaccccttctttctgaccaaccgggaccagagcagtgctggggccggggcgggtcaccggcatgtcagtgaaaaaaccagtgaatcgccttccaaaccaggagaaaagaaaggatcagatgagaaaaaagcagcaagcctcggcagcagtcaatcctccagaacctatgctggtggaacagcctcggccaccaaggtgtcagcttcctctggtgcaaccagcaagtcttccagtatgaatcccacagaaaccaaggccattccagtcagccaacagatggaaggaccacatcttcctaacaagaaaaaacacaaaaaacaggctgtaaaaacagaacctgagaagaagtcacagtcaaccaagctgtctgtggttcatgagaaaaaatcccaagaaggaaagccaaaagaacacacagagccaaaaagcctacccaagcaggcatcagatacaggaagtaacgatgctcacaataaaaaagcagtttccagatcagctgaacagcagccatcagagaaatcaacagaaccaaagactaaaccacaagacatgatttctgctggtggagagagtgttgctggtatcactgcaatatctggcaagccgggtgacaagaaaaaagaaaagaaatcattaaccccagctgtgccagttgaatctaaaccggataaaccatcgggaaagtcaggcatggatgctgctttggatgacttaatagatactttaggaggacctgaagaaactgaagaagaaaatacaacgtatactggaccagaagtttcagatccaatgagttccacctacatagaggaattgggtaaaagagaagtcacaattcctccaaaatatagggaactattggctaaacccatagggccagatgatgctatagacgccttgtcatctgacttcacctgtgggtcgcctacagctgctggaaagaaaactgaaaaagaggaatctacagaagttttaaaagctcagtcagcagggacagtcagaagtgctgctccaccccaagagaagaaaagaaaggtggagaaggatacaatgagtgatcaagcactcgaggctctgtcggcttcactgggcacccggcaagcagaacctgagctcgacctccgctcaattaaggaagtcgatgaggcaaaagctaaagaagaaaaactagagaagtgtggtgaggatgatgaaacaatcccatctgagtacagattaaaaccagccacggataaagatggaaaaccactattgccagagcctgaagaaaaacccaagcctcggagtgaatcagaactcattgatgaactttcagaagattttgaccggtctgaatgtaaagagaaaccatctaagccaactgaaaagacagaagaatctaaggccgctgctccagctcctgtgtcggaggctgtgtgtcggacctccatgtgtagtatacagtcagcaccccctgagccggctaccttgaagggcacagtgccagatgatgctgtagaagccttggctgatagcctggggaaaaaggaagcagatccagaagatggaaaacctgtgatggataaagtcaaggagaaggccaaagaagaagaccgtgaaaagcttggtgaaaaagaagaaacaattcctcctgattatagattagaagaggtcaaggataaagatggaaagccactcctgccaaaagagtctaaggaacagcttccacccatgagtgaagacttccttctggatgctttgtctgaggacttctctggtccacaaaatgcttcatctcttaaatttgaagatgctaaacttgctgctgccatctctgaagtggtttcccaaaccccagcttcaacgacccaagctggagccccaccccgtgatacctcgcagagtgacaaagacctcgatgatgccttggataaactctctgacagtctaggacaaaggcagcctgacccagatgagaacaaaccaatggaagataaagtaaaggaaaaagctaaagctgaacatagagacaagcttggagaaagagatgacactatcccacctgaatacagacatctcctggatgataatggacaggacaaaccagtgaagccacctacaaagaaatcagaggattcaaagaaacctgcagatgaccaagaccccattgatgctctctcaggagatctggacagctgtccctccactacagaaacctcacagaacacagcaaaggataagtgcaagaaggctgcttccagctccaaagcacctaagaatggaggtaaagcgaaggattcagcaaagacaacagaggaaacttccaagccaaaagatgactaaagaaatacaagttaaggtatctggtatctgcatgtaaaatcttcagctggtggatggtgacttttgaagaacaaaaggctttggcaacagaaaacaattgttctgggtgatttctagaatggtttttgttgagtctctgaacatcctaaatattggtttgttattcttttccagaaagaaaatgaatttgactggttcacctgtgtactgagtattgataaactttgaatttttttaattgccttcaattgggagagaaagctttatatttgtaagaaatatatttgataaagtttcttaaagcaacaccaaaaaaacaaaagaaaagctaagtgaatttttgcacattctacacacagtgcctgtaaatctcatttgtattttcagtttgcccttaattttttttgttagtgtttagaaaacaatgttttaaacattcttcagtgttctgatttcttattaccccctttcctcttgggcttttgaactgtatttgatgttgctttgggataatgtttataagtcaaacataagatattgtacattgggcacatatctcctcttgggctgctaataataaattaataacaggtaacctggacaaaccaggaagcacc

SEQ ID NO: 113667 - DNA, 4506 bp, Homo sapiens
  Payload ID: 2212
  Gene Symbol: CAST
  Gene Name: calpastatin
  Uniprot ID: P20810
  ENST ID: ENST00000395812
  CDS Start-End: 187-2439
ggcccatcggggctaggggaaccccggcgcagacctggggtggggtcggaaaagctgtttcatcgcccgctcccgggccctccgctccctccctccctccctctctccctggcaggactccccgccaggcctccccgccactctccgcggcgcattccgggaggcagcggccgcagcggcctcgccatgtcccagcccggccagaagcccgccgcctccccgcggccccggcgagcagccgccgcccgccgcacccatgagcatgtcagtgaaaaaaccagtgaatcgccttccaaaccaggagaaaagaaaggatcagatgagaaaaaagcagcaagcctcggcagcagtcaatcctccagaacctatgctggtggaacagcctcggccaccaaggtgtcagcttcctctggtgcaaccagcaagtcttccagtatgaatcccacagaaaccaaggctgtaaaaacagaacctgagaagaagtcacagtcaaccaagccaaaaagcctacccaagcaggcatcagatacaggaagtaacgatgctcacaataaaaaagcagtttccagatcagctgaacagcagccatcagagaaatcaacagaaccaaagactaaaccacaagacatgatttctgctggtggagagagtgttgctggtatcactgcaatatctggcaagccgggtgacaagaaaaaagaaaagaaatcattaaccccagctgtgccagttgaatctaaaccggataaaccatcgggaaagtcaggcatggatgctgctttggatgacttaatagatactttaggaggacctgaagaaactgaagaagaaaatacaacgtatactggaccagaagtttcagatccaatgagttccacctacatagaggaattgggtaaaagagaagtcacaattcctccaaaatatagggaactattggctaaaaaggaagggatcacagggcctcctgcagactcttcgaaacccatagggccagatgatgctatagacgccttgtcatctgacttcacctgtgggtcgcctacagctgctggaaagaaaactgaaaaagaggaatctacagaagttttaaaagctcagtcagcagggacagtcagaagtgctgctccaccccaagagaagaaaagaaaggtggagaaggatacaatgagtgatcaagcactcgaggctctgtcggcttcactgggcacccggcaagcagaacctgagctcgacctccgctcaattaaggaagtcgatgaggcaaaagctaaagaagaaaaactagagaagtgtggtgaggatgatgaaacaatcccatctgagtacagattaaaaccagccacggataaagatggaaaaccactattgccagagcctgaagaaaaacccaagcctcggagtgaatcagaactcattgatgaactttcagaagattttgaccggtctgaatgtaaagagaaaccatctaagccaactgaaaagacagaagaatctaaggccgctgctccagctcctgtgtcggaggctgtgtgtcggacctccatgtgtagtatacagtcagcaccccctgagccggctaccttgaagggcacagtgccagatgatgctgtagaagccttggctgatagcctggggaaaaaggaagcagatccagaagatggaaaacctgtgatggataaagtcaaggagaaggccaaagaagaagaccgtgaaaagcttggtgaaaaagaagaaacaattcctcctgattatagattagaagaggtcaaggataaagatggaaagccactcctgccaaaagagtctaaggaacagcttccacccatgagtgaagacttccttctggatgctttgtctgaggacttctctggtccacaaaatgcttcatctcttaaatttgaagatgctaaacttgctgctgccatctctgaagtggtttcccaaaccccagcttcaacgacccaagctggagccccaccccgtgatacctcgcagagtgacaaagacctcgatgatgccttggataaactctctgacagtctaggacaaaggcagcctgacccagatgagaacaaaccaatggaagataaagtaaaggaaaaagctaaagctgaacatagagacaagcttggagaaagagatgacactatcccacctgaatacagacatctcctggatgataatggacaggacaaaccagtgaagccacctacaaagaaatcagaggattcaaagaaacctgcagatgaccaagaccccattgatgctctctcaggagatctggacagctgtccctccactacagaaacctcacagaacacagcaaaggataagtgcaagaaggctgcttccagctccaaagcacctaagaatggaggtaaagcgaaggattcagcaaagacaacagaggaaacttccaagccaaaagatgactaaagaaatacaagttaaggtatctggtatctgcatgtaaaatcttcagctggtggatggtgacttttgaagaacaaaaggctttggcaacagaaaacaattgttctgggtgatttctagaatggtttttgttgagtctctgaacatcctaaatattggtttgttattcttttccagaaagaaaatgaatttgactggttcacctgtgtactgagtattgataaactttgaatttttttaattgccttcaattgggagagaaagctttatatttgtaagaaatatatttgataaagtttcttaaagcaacaccaaaaaaacaaaagaaaagctaagtgaatttttgcacattctacacacagtgcctgtaaatctcatttgtattttcagtttgcccttaattttttttgttagtgtttagaaaacaatgttttaaacattcttcagtgttctgatttcttattaccccctttcctcttgggcttttgaactgtatttgatgttgctttgggataatgtttataagtcaaacataagatattgtacattgggcacatatctcctcttgggctgctaataataaattaataacaggtaacctggacaaaccaggaagcaccaaaccccttttcagtttgaactcttctttgccaggtgtgaggacttctgcatcttacagtcagcacagaacacactgagacttgaatcaagtcagcaacagagcaaaataaaggttagataagtccttgtgtagcaaatttcgagcataagaaataaaatctaattaattcttagggtactcatctgacttgaactctgttggtttactgtgttagtaaactgtgctttctattatctatacataaaacctgagcagcaactgtgtctttagagctattgccacattagcctttgcactgtatagcgtctggctttatggaacttaagtttaccaaatataaaaagaaacttctgcttttaaaaaaattatatatatatattaaatttgaaacctgcatttctcccacagcaatgtaagaagtaggctctgatgtcctaccactttgaatggttttctaatatcttaatgaatagttcctgaacattgcactgatatcatcgattagaattttgatatttaatttcatctttatttcctggtagagaatgcaggaaaagatgtcaggtacataacataaaacagattgggaatttattgtttccaaagggcatggccttccttagcatcagtttgaagcttttgttatgacttagctgacttgtggcagcggggcaagcaaaaacaataacactgcttataaatggcaccacatcttgttaacctcccccccaaatactctctgaaagtcatgcacatacctatgggattttacacaccaccagcttaaaatgctatgtctctatccatcagaaatagtcattattctatttttaaggcagcaacaagaaaagaaaaaacacttttcctgagggatttctaaccatgtatctaatcctcccatttgggcagtataggtgtttgcttttttgttttctttttttaagaaaaaccttgaaacctttgacactgacagatgtgtttgcaaggatacggcttcagtattactaatttccatgtgtatctggaagtatttttaaatggcataccaaaatccagaagtttaaagatgcctataaaagtaaacaacatttatttaaaaagaactctgaatatgccttcttttttaattagaaatatcttcgagacttgggtgtttgttaataactaataactggagtaagctacaggatctaaagcagccctttttacagtctagttaggagagagaaaataattgcaaatatccacttagaggcaaagaacaattttttattatcaaaaaggtttctgcacattgttgtggcaatattgtatctgtttagaaaatgggcttttccaaaagcaaacaaagataggttcctcaggtgaccaaaactgaaaatcaatatttccatgtttcattaatcaaggcataaaatacaattaaagcaaaatattttacattaaaa

SEQ ID NO: 113668 - DNA, 4356 bp, Homo sapiens
  Payload ID: 2212
  Gene Symbol: CAST
  Gene Name: calpastatin
  Uniprot ID: P20810
  ENST ID: ENST00000395813
  CDS Start-End: 167-2293
cccgccccgtcgcactcagagagctgggctggagctccaagcggaaaccgcgggagccgagcccagctaggaatgcagacctcctgaaaaccaagccgaggactgcggggtccggtgtccacgcagagtgtcagcttcctctggtgcaaccagcaagtcttccagtatgaatcccacagaaaccaaggccattccagtcagccaacagatggaaggaccacatcttcctaacaagaaaaaacacaaaaaacaggctgtaaaaacagaacctgagaagaagtcacagtcaaccaagctgtctgtggttcatgagaaaaaatcccaagaaggaaagccaaaagaacacacagagccaaaaagcctacccaagcaggcatcagatacaggaagtaacgatgctcacaataaaaaagcagtttccagatcagctgaacagcagccatcagagaaatcaacagaaccaaagactaaaccacaagacatgatttctgctggtggagagagtgttgctggtatcactgcaatatctggcaagccgggtgacaagaaaaaagaaaagaaatcattaaccccagctgtgccagttgaatctaaaccggataaaccatcgggaaagtcaggcatggatgctgctttggatgacttaatagatactttaggaggacctgaagaaactgaagaagaaaatacaacgtatactggaccagaagtttcagatccaatgagttccacctacatagaggaattgggtaaaagagaagtcacaattcctccaaaatatagggaactattggctaaaaaggaagggatcacagggcctcctgcagactcttcgaaacccatagggccagatgatgctatagacgccttgtcatctgacttcacctgtgggtcgcctacagctgctggaaagaaaactgaaaaagaggaatctacagaagttttaaaagctcagtcagcagggacagtcagaagtgctgctccaccccaagagaagaaaagaaaggtggagaaggatacaatgagtgatcaagcactcgaggctctgtcggcttcactgggcacccggcaagcagaacctgagctcgacctccgctcaattaaggaagtcgatgaggcaaaagctaaagaagaaaaactagagaagtgtggtgaggatgatgaaacaatcccatctgagtacagattaaaaccagccacggataaagatggaaaaccactattgccagagcctgaagaaaaacccaagcctcggagtgaatcagaactcattgatgaactttcagaagattttgaccggtctgaatgtaaagagaaaccatctaagccaactgaaaagacagaagaatctaaggccgctgctccagctcctgtgtcggaggctgtgtgtcggacctccatgtgtagtatacagtcagcaccccctgagccggctaccttgaagggcacagtgccagatgatgctgtagaagccttggctgatagcctggggaaaaaggaagcagatccagaagatggaaaacctgtgatggataaagtcaaggagaaggccaaagaagaagaccgtgaaaagcttggtgaaaaagaagaaacaattcctcctgattatagattagaagaggtcaaggataaagatggaaagccactcctgccaaaagagtctaaggaacagcttccacccatgagtgaagacttccttctggatgctttgtctgaggacttctctggtccacaaaatgcttcatctcttaaatttgaagatgctaaacttgctgctgccatctctgaagtggtttcccaaaccccagcttcaacgacccaagctggagccccaccccgtgatacctcgcagagtgacaaagacctcgatgatgccttggataaactctctgacagtctaggacaaaggcagcctgacccagatgagaacaaaccaatggaagataaagtaaaggaaaaagctaaagctgaacatagagacaagcttggagaaagagatgacactatcccacctgaatacagacatctcctggatgataatggacaggacaaaccagtgaagccacctacaaagaaatcagaggattcaaagaaacctgcagatgaccaagaccccattgatgctctctcaggagatctggacagctgtccctccactacagaaacctcacagaacacagcaaaggataagtgcaagaaggctgcttccagctccaaagcacctaagaatggaggtaaagcgaaggattcagcaaagacaacagaggaaacttccaagccaaaagatgactaaagaaatacaagttaaggtatctggtatctgcatgtaaaatcttcagctggtggatggtgacttttgaagaacaaaaggctttggcaacagaaaacaattgttctgggtgatttctagaatggtttttgttgagtctctgaacatcctaaatattggtttgttattcttttccagaaagaaaatgaatttgactggttcacctgtgtactgagtattgataaactttgaatttttttaattgccttcaattgggagagaaagctttatatttgtaagaaatatatttgataaagtttcttaaagcaacaccaaaaaaacaaaagaaaagctaagtgaatttttgcacattctacacacagtgcctgtaaatctcatttgtattttcagtttgcccttaattttttttgttagtgtttagaaaacaatgttttaaacattcttcagtgttctgatttcttattaccccctttcctcttgggcttttgaactgtatttgatgttgctttgggataatgtttataagtcaaacataagatattgtacattgggcacatatctcctcttgggctgctaataataaattaataacaggtaacctggacaaaccaggaagcaccaaaccccttttcagtttgaactcttctttgccaggtgtgaggacttctgcatcttacagtcagcacagaacacactgagacttgaatcaagtcagcaacagagcaaaataaaggttagataagtccttgtgtagcaaatttcgagcataagaaataaaatctaattaattcttagggtactcatctgacttgaactctgttggtttactgtgttagtaaactgtgctttctattatctatacataaaacctgagcagcaactgtgtctttagagctattgccacattagcctttgcactgtatagcgtctggctttatggaacttaagtttaccaaatataaaaagaaacttctgcttttaaaaaaattatatatatatattaaatttgaaacctgcatttctcccacagcaatgtaagaagtaggctctgatgtcctaccactttgaatggttttctaatatcttaatgaatagttcctgaacattgcactgatatcatcgattagaattttgatatttaatttcatctttatttcctggtagagaatgcaggaaaagatgtcaggtacataacataaaacagattgggaatttattgtttccaaagggcatggccttccttagcatcagtttgaagcttttgttatgacttagctgacttgtggcagcggggcaagcaaaaacaataacactgcttataaatggcaccacatcttgttaacctcccccccaaatactctctgaaagtcatgcacatacctatgggattttacacaccaccagcttaaaatgctatgtctctatccatcagaaatagtcattattctatttttaaggcagcaacaagaaaagaaaaaacacttttcctgagggatttctaaccatgtatctaatcctcccatttgggcagtataggtgtttgcttttttgttttctttttttaagaaaaaccttgaaacctttgacactgacagatgtgtttgcaaggatacggcttcagtattactaatttccatgtgtatctggaagtatttttaaatggcataccaaaatccagaagtttaaagatgcctataaaagtaaacaacatttatttaaaaagaactctgaatatgccttcttttttaattagaaatatcttcgagacttgggtgtttgttaataactaataactggagtaagctacaggatctaaagcagccctttttacagtctagttaggagagagaaaataattgcaaatatccacttagaggcaaagaacaattttttattatcaaaaaggtttctgcacattgttgtggcaatattgtatctgtttagaaaatgggcttttccaaaagcaaacaaagataggttcctcaggtgaccaaaactgaaaatcaatatttccatgtttcattaatcaaggcataaaatacaattaaagcaaaatattttacatt

SEQ ID NO: 113669 - DNA, 913 bp, Homo sapiens
  Payload ID: 2212
  Gene Symbol: CAST
  Gene Name: calpastatin
  ENST ID: ENST00000421689
  CDS Start-End: 1-913
atgtcccagcccggccagaagcccgccgcctccccgcggccccggcgagcagccgccgcccgccgcacccatgagcatgtcagtgaaaaaaccagtgaatcgccttccaaaccaggagaaaagaaaggatcagatgagaaaaaagcagcaagcctcggcagcagtcaatcctccagaacctatgctggtggaacagcctcggccaccaaggtgtcagcttcctctggtgcaaccagcaagtcttccagtatgaatcccacagaaaccaaggccattccagtcagccaacagatggaaggaccacatcttcctaacaagaaaaaacacaaaaaacaggctgtaaaaacagaacctgagaagaagtcacagtcaaccaagccaaaaagcctacccaagcaggcatcagatacaggaagtaacgatgctcacaataaaaaagcagtttccagatcagctgaacagcagccatcagagaaatcaacagaaccaaagactaaaccacaagacatgatttctgctggtggagagagtgttgctggtatcactgcaatatctggcaagccgggtgacaagaaaaaagaaaagaaatcattaaccccagctgtgccagttgaatctaaaccggataaaccatcgggaaagtcaggcatggatgctgctttggatgacttaatagatactttaggaggacctgaagaaactgaagaagaaaatacaacgtatactggaccagaagtttcagatccaatgagttccacctacatagaggaattgggtaaaagagaagtcacaattcctccaaaatatagggaactattggctaaaaaggaagggatcacagggcctcctgcagactcttcgaaacccatagggccagatgatgctatagacgccttgtcatctgacttcacct

SEQ ID NO: 113670 - DNA, 3377 bp, Homo sapiens
  Payload ID: 2212
  Gene Symbol: CAST
  Gene Name: calpastatin
  ENST ID: ENST00000437034
  CDS Start-End: 1-1310
agaaaactgaaaaagaggaatctacagaagttttaaaagctcagtcagcagggacagtcagaagtgctgctccaccccaagagaagaaaagaaaggtggagaaggatacaatgagtgatcaagcactcgaggctctgtcggcttcactgggcacccggcaagcagaacctgagctcgacctccgctcaattaaggaagtcgatgaggcaaaagctaaagaagaaaaactagagaagtgtggtgaggatgatgaaacaatcccatctgagtacagattaaaaccagccacggataaagatggaaaaccactattgccagagcctgaagaaaaacccaagcctcggagtgaatcagaactcattgatgaactttcagaagattttgaccggtctgaatgtaaagagaaaccatctaagccaactgaaaagacagaagaatctaaggccgctgctccagctcctgtgtcggaggctgtgtgtcggacctccatgtgtagtatacagtcagcaccccctgagccggctaccttgaagggcacagtgccagatgatgctgtagaagccttggctgatagcctggggaaaaaggaagcagatccagaagatggaaaacctgtgatggataaagtcaaggagaaggccaaagaagaagaccgtgaaaagcttggtgaaaaagaagaaacaattcctcctgattatagattagaagaggtcaaggataaagatggaaagccactcctgccaaaagagtctaaggaacagcttccacccatgagtgaagacttccttctggatgctttgtctgaggacttctctggtccacaaaatgcttcatctcttaaatttgaagatgctaaacttgctgctgccatctctgaagtggtttcccaaaccccagcttcaacgacccaagctggagccccaccccgtgatacctcgcagagtgacaaagacctcgatgatgccttggataaactctctgacagtctaggacaaaggcagcctgacccagatgagaacaaaccaatggaagataaagtaaaggaaaaagctaaagctgaacatagagacaagcttggagaaagagatgacactatcccacctgaatacagacatctcctggatgataatggacaggacaaaccagtgaagccacctacaaagaaatcagaggattcaaagaaacctgcagatgaccaagaccccattgatgctctctcaggagatctggacagctgtccctccactacagaaacctcacagaacacagcaaagacaacagaggaaacttccaagccaaaagatgactaaagaaatacaagttaaggtatctggtatctgcatgtaaaatcttcagctggtggatggtgacttttgaagaacaaaaggctttggcaacagaaaacaattgttctgggtgatttctagaatggtttttgttgagtctctgaacatcctaaatattggtttgttattcttttccagaaagaaaatgaatttgactggttcacctgtgtactgagtattgataaactttgaatttttttaattgccttcaattgggagagaaagctttatatttgtaagaaatatatttgataaagtttcttaaagcaacaccaaaaaaacaaaagaaaagctaagtgaatttttgcacattctacacacagtgcctgtaaatctcatttgtattttcagtttgcccttaattttttttgttagtgtttagaaaacaatgttttaaacattcttcagtgttctgatttcttattaccccctttcctcttgggcttttgaactgtatttgatgttgctttgggataatgtttataagtcaaacataagatattgtacattgggcacatatctcctcttgggctgctaataataaattaataacaggtaacctggacaaaccaggaagcaccaaaccccttttcagtttgaactcttctttgccaggtgtgaggacttctgcatcttacagtcagcacagaacacactgagacttgaatcaagtcagcaacagagcaaaataaaggttagataagtccttgtgtagcaaatttcgagcataagaaataaaatctaattaattcttagggtactcatctgacttgaactctgttggtttactgtgttagtaaactgtgctttctattatctatacataaaacctgagcagcaactgtgtctttagagctattgccacattagcctttgcactgtatagcgtctggctttatggaacttaagtttaccaaatataaaaagaaacttctgcttttaaaaaaattatatatatatattaaatttgaaacctgcatttctcccacagcaatgtaagaagtaggctctgatgtcctaccactttgaatggttttctaatatcttaatgaatagttcctgaacattgcactgatatcatcgattagaattttgatatttaatttcatctttatttcctggtagagaatgcaggaaaagatgtcaggtacataacataaaacagattgggaatttattgtttccaaagggcatggccttccttagcatcagtttgaagcttttgttatgacttagctgacttgtggcagcggggcaagcaaaaacaataacactgcttataaatggcaccacatcttgttaacctcccccccaaatactctctgaaagtcatgcacatacctatgggattttacacaccaccagcttaaaatgctatgtctctatccatcagaaatagtcattattctatttttaaggcagcaacaagaaaagaaaaaacacttttcctgagggatttctaaccatgtatctaatcctcccatttgggcagtataggtgtttgcttttttgttttctttttttaagaaaaaccttgaaacctttgacactgacagatgtgtttgcaaggatacggcttcagtattactaatttccatgtgtatctggaagtatttttaaatggcataccaaaatccagaagtttaaagatgcctataaaagtaaacaacatttatttaaaaagaactctgaatatgccttcttttttaattagaaatatcttcgagacttgggtgtttgttaataactaataactggagtaagctacaggatctaaagcagccctttttacagtctagttaggagagagaaaataattgcaaatatccacttagaggcaaagaacaattttttattatcaaaaaggtttctgcacattgttgtggcaatattgtatctgtttagaaaatgggcttttccaaaagcaaacaaagataggttcctcaggtgaccaaaactgaaaatcaatatttccatgtttcattaatcaaggcataaaatacaattaaagcaaaatattttacattaaaa

SEQ ID NO: 113671 - DNA, 3273 bp, Homo sapiens
  Payload ID: 2212
  Gene Symbol: CAST
  Gene Name: calpastatin
  ENST ID: ENST00000511049
  CDS Start-End: 238-2319
gcactcagagagctgggctggagctccaagcggaaaccgcgggagccgagcccagctaggaatgcagacctcctgaaaaccaagccgaggactgcggggtccggtgtccacgcagagtgtcagcttcctctggtgcaaccagcaagtcttccagtatgaatcccacagaaaccaagataaaataaaattatacctggggctgtgctcttatattaggccattccagtcagccaacagatggaaggaccacatcttcctaacaagaaaaaacacaaaaaacaggctgtaaaaacagaacctgagaagaagtcacagtcaaccaagctgtctgtggttcatgagaaaaaatcccaagaaggaaagccaaaagaacacacagagccaaaaagcctacccaagcaggcatcagatacaggaagtaacgatgctcacaataaaaaagcagtttccagatcagctgaacagcagccatcagagaaatcaacagaaccaaagactaaaccacaagacatgatttctgctggtggagagagtgttgctggtatcactgcaatatctggcaagccgggtgacaagaaaaaagaaaagaaatcattaaccccagctgtgccagttgaatctaaaccggataaaccatcgggaaagtcaggcatggatgctgctttggatgacttaatagatactttaggaggacctgaagaaactgaagaagaaaatacaacgtatactggaccagaagtttcagatccaatgagttccacctacatagaggaattgggtaaaagagaagtcacaattcctccaaaatatagggaactattggctaaaaaggaagggatcacagggcctcctgcagactcttcgaaacccatagggccagatgatgctatagacgccttgtcatctgacttcacctgtgggtcgcctacagctgctggaaagaaaactgaaaaagaggaatctacagaagttttaaaagctcagtcagcagggacagtcagaagtgctgctccaccccaagagaagaaaagaaaggtggagaaggatacaatgagtgatcaagcactcgaggctctgtcggcttcactgggcacccggcaagcagaacctgagctcgacctccgctcaattaaggaagtcgatgaggcaaaagctaaagaagaaaaactagagaagtgtggtgaggatgatgaaacaatcccatctgagtacagattaaaaccagccacggataaagatggaaaaccactattgccagagcctgaagaaaaacccaagcctcggagtgaatcagaactcattgatgaactttcagaagattttgaccggtctgaatgtaaagagaaaccatctaagccaactgaaaagacagaagaatctaaggccgctgctccagctcctgtgtcggaggctgtgtgtcggacctccatgtgtagtatacagtcagcaccccctgagccggctaccttgaagggcacagtgccagatgatgctgtagaagccttggctgatagcctggggaaaaaggaagcagatccagaagatggaaaacctgtgatggataaagtcaaggagaaggccaaagaagaagaccgtgaaaagcttggtgaaaaagaagaaacaattcctcctgattatagattagaagaggtcaaggataaagatggaaagccactcctgccaaaagagtctaaggaacagcttccacccatgagtgaagacttccttctggatgctttgtctgaggacttctctggtccacaaaatgcttcatctcttaaatttgaagatgctaaacttgctgctgccatctctgaagtggtttcccaaaccccagcttcaacgacccaagctggagccccaccccgtgatacctcgagtgacaaagacctcgatgatgccttggataaactctctgacagtctaggacaaaggcagcctgacccagatgagaacaaaccaatggaagataaagtaaaggaaaaagctaaagctgaacatagagacaagcttggagaaagagatgacactatcccacctgaatacagacatctcctggatgataatggacaggacaaaccagtgaagccacctacaaagaaatcagaggattcaaagaaacctgcagatgaccaagaccccattgatgctctctcaggagatctggacagctgtccctccactacagaaacctcacagaacacagcaaaggataagtgcaagaaggctgcttccagctccaaagcacctaagaatggaggtaaagcgaaggattcagcaaagacaacagaggaaacttccaagccaaaagatgactaaagaaatacaagttaaggtatctggtatctgcatgtaaaatcttcagctggtggatggtgacttttgaagaacaaaaggctttggcaacagaaaacaattgttctgggtgatttctagaatggtttttgttgagtctctgaacatcctaaatattggtttgttattcttttccagaaagaaaatgaatttgactggttcacctgtgtactgagtattgataaactttgaatttttttaattgccttcaattgggagagaaagctttatatttgtaagaaatatatttgataaagtttcttaaagcaacaccaaaaaaacaaaagaaaagctaagtgaatttttgcacattctacacacagtgcctgtaaatctcatttgtattttcagtttgcccttaattttttttgttagtgtttagaaaacaatgttttaaacattcttcagtgttctgatttcttattaccccctttcctcttgggcttttgaactgtatttgatgttgctttgggataatgtttataagtcaaacataagatattgtacattgggcacatatctcctcttgggctgctaataataaattaataacaggtaacctggacaaaccaggaagcaccaaaccccttttcagtttgaactcttctttgccaggtgtgaggacttctgcatcttacagtcagcacagaacacactgagacttgaatcaagtcagcaacagagcaaaataaaggttagataagtccttgtgtagcaaatttcgagcataagaaataaaatctaattaattcttagggtactcatctgacttgaactctgttggtttactgtgttagtaaactgtgctttctattatctatacataaaacctgagcagcaactgtgtctttagagctattgccacattagcctttgcactgtatagcgtctggctttatggaacttaagtttaccaaa

SEQ ID NO: 113672 - DNA, 559 bp, Homo sapiens
  Payload ID: 2212
  Gene Symbol: CAST
  Gene Name: calpastatin
  ENST ID: ENST00000514055
  CDS Start-End: 113-559
agtgccagcccggtcccggccaagcggagtgtgagcccggcgcctccaacgcaacaccccgcgccctcgccggctcccccgccgtgcggatcggagccagccggttgttgccatggcattcgccagctggtggtacaagacgcatgtcagtgaaaaaaccagtgaatcgccttccaaaccaggagaaaagaaaggatcagatgagaaaaaagcagcaagcctcggcagcagtcaatcctccagaacctatgctggtggaacagcctcggccaccaaggtgtcagcttcctctggtgcaaccagcaagtcttccagtatgaatcccacagaaaccaaggccattccagtcagccaacagatggaaggaccacatcttcctaacaagaaaaaacacaaaaaacaggctgtaaaaacagaacctgagaagaagtcacagtcaaccaagccaaaaagcctacccaagcaggcatcagatacaggaagtaacgatgctcacaataaaaaagcagtttccagatcagctgaacagcagccatcagagaaatcaacagaaccaaag

SEQ ID NO: 113673 - DNA, 2310 bp, Homo sapiens
  Payload ID: 2212
  Gene Symbol: CAST
  Gene Name: calpastatin
  Uniprot ID: P20810
  ENST ID: ENST00000510756
  CDS Start-End: 1-2310
atgtcccagcccggccagaagcccgccgcctccccgcggccccggcgagcagccgccgcccgccgcacccatgagcatgtcagtgaaaaaaccagtgaatcgccttccaaaccaggagaaaagaaaggatcagatgagaaaaaagcagcaagcctcggcagcagtcaatcctccagaacctatgctggtggaacagcctcggccaccaaggtgtcagcttcctctggtgcaaccagcaagtcttccagtatgaatcccacagaaaccaaggctgtaaaaacagaacctgagaagaagtcacagtcaaccaagctgtctgtggttcatgagaaaaaatcccaagaaggaaagccaaaagaacacacagagccaaaaagcctacccaagcaggcatcagatacaggaagtaacgatgctcacaataaaaaagcagtttccagatcagctgaacagcagccatcagagaaatcaacagaaccaaagactaaaccacaagacatgatttctgctggtggagagagtgttgctggtatcactgcaatatctggcaagccgggtgacaagaaaaaagaaaagaaatcattaaccccagctgtgccagttgaatctaaaccggataaaccatcgggaaagtcaggcatggatgctgctttggatgacttaatagatactttaggaggacctgaagaaactgaagaagaaaatacaacgtatactggaccagaagtttcagatccaatgagttccacctacatagaggaattgggtaaaagagaagtcacaattcctccaaaatatagggaactattggctaaaaaggaagggatcacagggcctcctgcagactcttcgaaacccatagggccagatgatgctatagacgccttgtcatctgacttcacctgtgggtcgcctacagctgctggaaagaaaactgaaaaagaggaatctacagaagttttaaaagctcagtcagcagggacagtcagaagtgctgctccaccccaagagaagaaaagaaaggtggagaaggatacaatgagtgatcaagcactcgaggctctgtcggcttcactgggcacccggcaagcagaacctgagctcgacctccgctcaattaaggaagtcgatgaggcaaaagctaaagaagaaaaactagagaagtgtggtgaggatgatgaaacaatcccatctgagtacagattaaaaccagccacggataaagatggaaaaccactattgccagagcctgaagaaaaacccaagcctcggagtgaatcagaactcattgatgaactttcagaagattttgaccggtctgaatgtaaagagaaaccatctaagccaactgaaaagacagaagaatctaaggccgctgctccagctcctgtgtcggaggctgtgtgtcggacctccatgtgtagtatacagtcagcaccccctgagccggctaccttgaagggcacagtgccagatgatgctgtagaagccttggctgatagcctggggaaaaaggaagcagatccagaagatggaaaacctgtgatggataaagtcaaggagaaggccaaagaagaagaccgtgaaaagcttggtgaaaaagaagaaacaattcctcctgattatagattagaagaggtcaaggataaagatggaaagccactcctgccaaaagagtctaaggaacagcttccacccatgagtgaagacttccttctggatgctttgtctgaggacttctctggtccacaaaatgcttcatctcttaaatttgaagatgctaaacttgctgctgccatctctgaagtggtttcccaaaccccagcttcaacgacccaagctggagccccaccccgtgatacctcgcagagtgacaaagacctcgatgatgccttggataaactctctgacagtctaggacaaaggcagcctgacccagatgagaacaaaccaatggaagataaagtaaaggaaaaagctaaagctgaacatagagacaagcttggagaaagagatgacactatcccacctgaatacagacatctcctggatgataatggacaggacaaaccagtgaagccacctacaaagaaatcagaggattcaaagaaacctgcagatgaccaagaccccattgatgctctctcaggagatctggacagctgtccctccactacagaaacctcacagaacacagcaaaggataagtgcaagaaggctgcttccagctccaaagcacctaagaatggaggtaaagcgaaggattcagcaaagacaacagaggaaacttccaagccaaaagatgactaa

SEQ ID NO: 113674 - DNA, 2079 bp, Homo sapiens
  Payload ID: 2212
  Gene Symbol: CAST
  Gene Name: calpastatin
  ENST ID: ENST00000510156
  CDS Start-End: 154-2079
actcagagagctgggctggagctccaagcggaaaccgcgggagccgagcccagctaggaatgcagacctcctgaaaaccaagccgaggactgcggggtccggtgtccacgcagagtgtcagcttcctctggtgcaaccagcaagtcttccagtatgaatcccacagaaaccaaggccattccagtcagccaacagatggaaggaccacatcttcctaacaagaaaaaacacaaaaaacaggctgtaaaaacagaacctgagaagaagtcacagtcaaccaagctgtctgtggttcatgagaaaaaatcccaagaaggaaagccaaaagaacacacagagccaaaaagcctacccaagcaggcatcagatacaggaagtaacgatgctcacaataaaaaagcagtttccagatcagctgaacagcagccatcagagaaatcaacagaaccaaagactaaaccacaagacatgatttctgctggtggagagagtgttgctggtatcactgcaatatctggcaagccgggtgacaagaaaaaagaaaagaaatcattaaccccagctgtgccagttgaatctaaaccggataaaccatcgggaaagtcaggcatggatgctgctttggatgacttaatagatactttaggaggacctgaagaaactgaagaagaaaatacaacgtatactggaccagaagtttcagatccaatgagttccacctacatagaggaattgggtaaaagagaagtcacaattcctccaaaatatagggaactattggctaaaaaggaagggatcacagggcctcctgcagactcttcgaaacccatagggccagatgatgctatagacgccttgtcatctgacttcacctgtgggtcgcctacagctgctggaaagaaaactgaaaaagaggaatctacagaagttttaaaagctcagtcagcagggacagtcagaagtgctgctccaccccaagagaagaaaagaaaggtggagaaggatacaatgagtgatcaagcactcgaggctctgtcggcttcactgggcacccggcaagcagaacctgagctcgacctccgctcaattaaggaagtcgatgaggcaaaagctaaagaagaaaaactagagaagtgtggtgaggatgatgaaacaatcccatctgagtacagattaaaaccagccacggataaagatggaaaaccactattgccagagcctgaagaaaaacccaagcctcggagtgaatcagaactcattgatgaactttcagaagattttgaccggtctgaatgtaaagagaaaccatctaagccaactgaaaagacagaagaatctaaggccgctgctccagctcctgtgtcggaggctgtgtgtcggacctccatgtgtagtatacagtcagcaccccctgagccggctaccttgaagggcacagtgccagatgatgctgtagaagccttggctgatagcctggggaaaaaggaagcagatccagaagatggaaaacctgtgatggataaagtcaaggagaaggccaaagaagaagaccgtgaaaagcttggtgaaaaagaagaaacaattcctcctgattatagattagaagaggtcaaggataaagatggaaagccactcctgccaaaagagtctaaggaacagcttccacccatgagtgaagacttccttctggatgctttgtctgaggacttctctggtccacaaaatgcttcatctcttaaatttgaagatgctaaacttgctgctgccatctctgaagtggtttcccaaaccccagcttcaacgacccaagctggagccccaccccgtgatacctcgcagagtgacaaagacctcgatgatgccttggataaactctctgacagtctaggacaaaggcagcctgacccagatgagaacaaaccaatggaagataaagtaaaggaaaaagctaaagctgaacatagagacaagcttggagaaagagatgacactatcccacctgaatacagacatctcctggatgataatggacaggacaaaccagtgaagccacctacaaagaaatcagaggattcaaag

SEQ ID NO: 113675 - DNA, 571 bp, Homo sapiens
  Payload ID: 2212
  Gene Symbol: CAST
  Gene Name: calpastatin
  ENST ID: ENST00000508117
  CDS Start-End: 153-401
ctcagagagctgggctggagctccaagcggaaaccgcgggagccgagcccagctaggaatgcagacctcctgaaaaccaagccgaggactgcggggtccggtgtccacgcagagtgtcagcttcctctggtgcaaccagcaagtcttccagtatgaatcccacagaaaccaaggccattccagtcagccaacagatggaaggaccacatcttcctaacaagaaaaaacacaaaaaacaggctgtaaaaacagaacctgagaagaagtcacagtcaaccaagctgtctgtggttcatgagaaaaaatcccaagaaggaaagccaaaagaacacacagaggcacctgtgtgtgtactttcagccaaaaagcctacccaagcaggcatcagatacaggaagtaacgatgctcacaataaaaaagcagtttccagatcagctgaacagcagccatcagagaaatcaacagaaccaaagactaaaccacaagacatgatttctgctggtggagagagtgttgctggtatcactgcaatatctggcaagccgggtgacaagaaaaaagaaaagaaat

SEQ ID NO: 113676 - DNA, 588 bp, Homo sapiens
  Payload ID: 2212
  Gene Symbol: CAST
  Gene Name: calpastatin
  ENST ID: ENST00000514845
  CDS Start-End: 138-588
agccgccttgggatgtgcggagctcagtgccagcccggtcccggccaagcggagtgtgagcccggcgcctccaacgcaacaccccgcgccctcgccggctcccccgccgtgcggatcggagccagccggttgttgccatggcattcgccagctggtggtacaagacgcatgtcagtgaaaaaaccagtgaatcgccttccaaaccaggagaaaagaaaggatcagatgagaaaaaagcagcaagcctcggcagcagtcaatcctccagaacctatgctggtggaacagcctcggccaccaaggtgtcagcttcctctggtgcaaccagcaagtcttccagtatgaatcccacagaaaccaaggctgtaaaaacagaacctgagaagaagtcacagtcaaccaagccaaaaagcctacccaagcaggcatcagatacaggaagtaacgatgctcacaataaaaaagcagtttccagatcagctgaacagcagccatcagagaaatcaacagaaccaaagactaaaccacaagacatgatttctgctggtggagagagtgttgctggtatcactgcaatatctggcaagc

SEQ ID NO: 113677 - DNA, 2425 bp, Homo sapiens
  Payload ID: 2212
  Gene Symbol: CAST
  Gene Name: calpastatin
  ENST ID: ENST00000508608
  CDS Start-End: 85-2349
gtgtgagcccggcgcctccaacgcaacaccccgcgccctcgccggctcccccgccgtgcggatcggagccagccggttgttgccatggcattcgccagctggtggtacaagacgcatgtcagtgaaaaaaccagtgaatcgccttccaaaccaggagaaaagaaaggatcagatgagaaaaaagcagcaagcctcggcagcagtcaatcctccagaacctatgctggtggaacagcctcggccaccaaggtgtcagcttcctctggtgcaaccagcaagtcttccagtatgaatcccacagaaaccaaggctgtaaaaacagaacctgagaagaagtcacagtcaaccaagctgtctgtggttcatgagaaaaaatcccaagaaggaaagccaaaagaacacacagagccaaaaagcctacccaagcaggcatcagatacaggaagtaacgatgctcacaataaaaaagcagtttccagatcagctgaacagcagccatcagagaaatcaacagaaccaaagactaaaccacaagacatgatttctgctggtggagagagtgttgctggtatcactgcaatatctggcaagccgggtgacaagaaaaaagaaaagaaatcattaaccccagctgtgccagttgaatctaaaccggataaaccatcgggaaagtcaggcatggatgctgctttggatgacttaatagatactttaggaggacctgaagaaactgaagaagaaaatacaacgtatactggaccagaagtttcagatccaatgagttccacctacatagaggaattgggtaaaagagaagtcacaattcctccaaaatatagggaactattggctaaaaaggaagggatcacagggcctcctgcagactcttcgaaacccatagggccagatgatgctatagacgccttgtcatctgacttcacctgtgggtcgcctacagctgctggaaagaaaactgaaaaagaggaatctacagaagttttaaaagctcagtcagcagggacagtcagaagtgctgctccaccccaagagaagaaaagaaaggtggagaaggatacaatgagtgatcaagcactcgaggctctgtcggcttcactgggcacccggcaagcagaacctgagctcgacctccgctcaattaaggaagtcgatgaggcaaaagctaaagaagaaaaactagagaagtgtggtgaggatgatgaaacaatcccatctgagtacagattaaaaccagccacggataaagatggaaaaccactattgccagagcctgaagaaaaacccaagcctcggagtgaatcagaactcattgatgaactttcagaagattttgaccggtctgaatgtaaagagaaaccatctaagccaactgaaaagacagaagaatctaaggccgctgctccagctcctgtgtcggaggctgtgtgtcggacctccatgtgtagtatacagtcagcaccccctgagccggctaccttgaagggcacagtgccagatgatgctgtagaagccttggctgatagcctggggaaaaaggaagcagatccagaagatggaaaacctgtgatggataaagtcaaggagaaggccaaagaagaagaccgtgaaaagcttggtgaaaaagaagaaacaattcctcctgattatagattagaagaggtcaaggataaagatggaaagccactcctgccaaaagagtctaaggaacagcttccacccatgagtgaagacttccttctggatgctttgtctgaggacttctctggtccacaaaatgcttcatctcttaaatttgaagatgctaaacttgctgctgccatctctgaagtggtttcccaaaccccagcttcaacgacccaagctggagccccaccccgtgatacctcgcagagtgacaaagacctcgatgatgccttggataaactctctgacagtctaggacaaaggcagcctgacccagatgagaacaaaccaatggaagataaagtaaaggaaaaagctaaagctgaacatagagacaagcttggagaaagagatgacactatcccacctgaatacagacatctcctggatgataatggacaggacaaaccagtgaagccacctacaaagaaatcagaggattcaaagaaacctgcagatgaccaagaccccattgatgctctctcaggagatctggacagctgtccctccactacagaaacctcacagaacacagcaaaggataagtgcaagaaggctgcttccagctccaaagcacctaagaatggaggtaaagcgaaggattcagcaaagacaacagaggaaacttccaagccaaaagatgactaaagaaatacaagttaaggtatctggtatctgcatgtaaaatcttcagctggtggatggtgacttttgaagaacaaaa

SEQ ID NO: 113678 - DNA, 499 bp, Homo sapiens
  Payload ID: 2212
  Gene Symbol: CAST
  Gene Name: calpastatin
  ENST ID: ENST00000503828
  CDS Start-End: 265-499
aaggcagcaggggccacttcaagcttccctgcttcctaagcttaggttgtcagaagcctttttagagatacatttttagaaaaagaaaaatagtgtggtaacagtttactacttgcttcttttttttttgtttgtttagagtattttatagtaatattactatagctttatgtctagcttaccaaataaggggtgaagtgtgccccagagaacgctgttactgtagaaacgtgtcttagccccaatttccactcattggatacaatgagtgatcaagcactcgaggctctgtcggcttcactgggcacccggcaagcagaacctgagctcgacctccgctcaattaaggaagtcgatgaggcaaaagctaaagaagaaaaactagagaagtgtggtgaggatgatgaaacaatcccatctgagtacagattaaaaccagccacggataaagatggaaaaccactattgccagagcctgaagaaaaacccaaggttagga

SEQ ID NO: 113679 - DNA, 567 bp, Homo sapiens
  Payload ID: 2212
  Gene Symbol: CAST
  Gene Name: calpastatin
  ENST ID: ENST00000508197
  CDS Start-End: 99-567
aggaatgcagacctcctgaaaaccaagccgaggactgcggggtccggtgtccacgcagagtgtcagcttcctctggtgcaaccagcaagtcttccagtatgaatcccacagaaaccaaggctgtaaaaacagaacctgagaagaagtcacagtcaaccaagctgtctgtggttcatgagaaaaaatcccaagaaggaaagccaaaagaacacacagagccaaaaagcctacccaagcaggcatcagatacaggaagtaacgatgctcacaataaaaaagcagtttccagatcagctgaacagcagccatcagagaaatcaacagaaccaaagaaaaaagaaaagaaatcattaaccccagctgtgccagttgaatctaaaccggataaaccatcgggaaagtcaggcatggatgctgctttggatgacttaatagatactttaggaggacctgaagaaactgaagaagaaaatacaacgtatactggaccagaagtttcagatccaatgagttccacctacatagaggaattgggtaaaagagaagtcacaattcctccaaaatata

SEQ ID NO: 113680 - DNA, 1473 bp, Homo sapiens
  Payload ID: 2212
  Gene Symbol: CAST
  Gene Name: calpastatin
  ENST ID: ENST00000515663
  CDS Start-End: 88-1383
gtcacttcctgttctgagtcatcagggaaggggagtctccctgacttccagcaacaatccttgagtctgggactgccctggcctaagatgggccagtttctatcttcgactttcttggagggctcaccggccacagtgtggcacgataagctttgtgacggtgaacgcagaggagcaagagaagcagttcgtatcttccaggaccaagcaaaagctaaagaagaaaaactagagaagtgtggtgaggatgatgaaacaatcccatctgagtacagattaaaaccagccacggataaagatggaaaaccactattgccagagcctgaagaaaaacccaagcctcggagtgaatcagaactcattgatgaactttcagaagattttgaccggtctgaatgtaaagagaaaccatctaagccaactgaaaagacagaagaatctaaggccgctgctccagctcctgtgtcggaggctgtgtgtcggacctccatgtgtagtatacagtcagcaccccctgagccggctaccttgaagggcacagtgccagatgatgctgtagaagccttggctgatagcctggggaaaaaggaagcagatccagaagatggaaaacctgtgatggataaagtcaaggagaaggccaaagaagaagaccgtgaaaagcttggtgaaaaagaagaaacaattcctcctgattatagattagaagaggtcaaggataaagatggaaagccactcctgccaaaagagtctaaggaacagcttccacccatgagtgaagacttccttctggatgctttgtctgaggacttctctggtccacaaaatgcttcatctcttaaatttgaagatgctaaacttgctgctgccatctctgaagtggtttcccaaaccccagcttcaacgacccaagctggagccccaccccgtgatacctcgcagagtgacaaagacctcgatgatgccttggataaactctctgacagtctaggacaaaggcagcctgacccagatgagaacaaaccaatggaagataaagtaaaggaaaaagctaaagctgaacatagagacaagcttggagaaagagatgacactatcccacctgaatacagacatctcctggatgataatggacaggacaaaccagtgaagccacctacaaagaaatcagaggattcaaagaaacctgcagatgaccaagaccccattgatgctctctcaggagatctggacagctgtccctccactacagaaacctcacagaacacagcaaaggataagtgcaagaaggctgcttccagctccaaagcacctaagaatggaggtaaagcgaaggattcagcaaagacaacagaggaaacttccaagccaaaagatgactaaagaaatacaagttaaggtatctggtatctgcatgtaaaatcttcagctggtggatggtgacttttgaagaacaaaaggctttggcaacag

SEQ ID NO: 113681 - DNA, 1399 bp, Homo sapiens
  Payload ID: 2212
  Gene Symbol: CAST
  Gene Name: calpastatin
  ENST ID: ENST00000511097
  CDS Start-End: 221-1399
ggagcccgggtccctccgcgggcaggaaggggagggcccatcggggctaggggaaccccggcgcagacctggggtggggtcggaaaagctgtttcatcgcccgctcccgggccctccgctccctccctccctccctctctccctggcaggactccccgccaggcctccccgccactctccgcggcgcattccgggaggcagcggccgcagcggcctcgccatgtcccagcccggccagaagcccgccgcctccccgcggccccggcgagcagccgccgcccgccgcacccatgagcatgtcagtgaaaaaaccagtgaatcgccttccaaaccaggagaaaagaaaggatcagatgagaaaaaagcagcaagcctcggcagcagtcaatcctccagaacctatgctggtggaacagcctcggccaccaaggtgtcagcttcctctggtgcaaccagcaagtcttccagtatgaatcccacagaaaccaaggctgtaaaaacagaacctgagaagaagtcacagtcaaccaagctgtctgtggttcatgagaaaaaatcccaagaaggaaagccaaaagaacacacagagccaaaaagcctacccaagcaggcatcagatacaggaagtaacgatgctcacaataaaaaagcagtttccagatcagctgaacagcagccatcagagaaatcaacagaaccaaagactaaaccacaagacatgatttctgctggtggagagagtgttgctggtatcactgcaatatctggcaagccgggtgacaagaaaaaagaaaagaaatcattaaccccagctgtgccagttgaatctaaaccggataaaccatcgggaaagtcaggcatggatgctgctttggatgacttaatagatactttaggaggacctgaagaaactgaagaagaaaatacaacgtatactggaccagaagtttcagatccaatgagttccacctacatagaggaattgggtaaaagagaagtcacaattcctccaaaatatagggaactattggctaaacccatagggccagatgatgctatagacgccttgtcatctgacttcacctgtgggtcgcctacagctgctggaaagaaaactgaaaaagaggaatctacagaagttttaaaagctcagtcagcagggacagtcagaagtgctgctccaccccaagagaagaaaagaaaggtggagaaggatacaatgagtgatcaagcactcgaggctctgtcggcttcactgggcacccggcaagcagaacctgagctcgacctccgctcaattaaggaagtcgatgaggcaaaagctaaagaagaaaaactagagaagtgtggtgaggatgatgaaacaatcccatctgagtacagattaaaaccagccacg

SEQ ID NO: 113682 - DNA, 864 bp, Homo sapiens
  Payload ID: 2212
  Gene Symbol: CAST
  Gene Name: calpastatin
  ENST ID: ENST00000505143
  CDS Start-End: 1-864
ggagaggtgccttctgccatgattgtaagtttcctgaggccttcccagccattcagaactcatgtcagtgaaaaaaccagtgaatcgccttccaaaccaggagaaaagaaaggatcagatgagaaaaaagcagcaagcctcggcagcagtcaatcctccagaacctatgctggtggaacagcctcggccaccaaggtgtcagcttcctctggtgcaaccagcaagtcttccagtatgaatcccacagaaaccaaggccattccagtcagccaacagatggaaggaccacatcttcctaacaagaaaaaacacaaaaaacaggctgtaaaaacagaacctgagaagaagtcacagtcaaccaagctgtctgtggttcatgagaaaaaatcccaagaaggaaagccaaaagaacacacagagccaaaaagcctacccaagcaggcatcagatacaggaagtaacgatgctcacaataaaaaagcagtttccagatcagctgaacagcagccatcagagaaatcaacagaaccaaagactaaaccacaagacatgatttctgctggtggagagagtgttgctggtatcactgcaatatctggcaagccgggtgacaagaaaaaagaaaagaaatcattaaccccagctgtgccagttgaatctaaaccggataaaccatcgggaaagtcaggcatggatgctgctttggatgacttaatagatactttaggaggacctgaagaaactgaagaagaaaatacaacgtatactggaccagaagtttcagatccaatgagttccacctacatagaggaattgggtaaaagagaagtcacaattcctccaaaatatagggaactattggct

SEQ ID NO: 113683 - DNA, 2466 bp, Homo sapiens
  Payload ID: 2212
  Gene Symbol: CAST
  Gene Name: calpastatin
  ENST ID: ENST00000511782
  CDS Start-End: 212-2296
agagagctgggctggagctccaagcggaaaccgcgggagccgagcccagctaggaatgcagacctcctgaaaaccaagccgaggactgcggggtccggtgtccacgcagagtgtcagcttcctctggtgcaaccagcaagtcttccagtatgaatcccacagaaaccaaggtatgaagaatgctaattgagccattccagtcagccaacagatggaaggaccacatcttcctaacaagaaaaaacacaaaaaacaggctgtaaaaacagaacctgagaagaagtcacagtcaaccaagctgtctgtggttcatgagaaaaaatcccaagaaggaaagccaaaagaacacacagagccaaaaagcctacccaagcaggcatcagatacaggaagtaacgatgctcacaataaaaaagcagtttccagatcagctgaacagcagccatcagagaaatcaacagaaccaaagactaaaccacaagacatgatttctgctggtggagagagtgttgctggtatcactgcaatatctggcaagccgggtgacaagaaaaaagaaaagaaatcattaaccccagctgtgccagttgaatctaaaccggataaaccatcgggaaagtcaggcatggatgctgctttggatgacttaatagatactttaggaggacctgaagaaactgaagaagaaaatacaacgtatactggaccagaagtttcagatccaatgagttccacctacatagaggaattgggtaaaagagaagtcacaattcctccaaaatatagggaactattggctaaaaaggaagggatcacagggcctcctgcagactcttcgaaacccatagggccagatgatgctatagacgccttgtcatctgacttcacctgtgggtcgcctacagctgctggaaagaaaactgaaaaagaggaatctacagaagttttaaaagctcagtcagcagggacagtcagaagtgctgctccaccccaagagaagaaaagaaaggtggagaaggatacaatgagtgatcaagcactcgaggctctgtcggcttcactgggcacccggcaagcagaacctgagctcgacctccgctcaattaaggaagtcgatgaggcaaaagctaaagaagaaaaactagagaagtgtggtgaggatgatgaaacaatcccatctgagtacagattaaaaccagccacggataaagatggaaaaccactattgccagagcctgaagaaaaacccaagcctcggagtgaatcagaactcattgatgaactttcagaagattttgaccggtctgaatgtaaagagaaaccatctaagccaactgaaaagacagaagaatctaaggccgctgctccagctcctgtgtcggaggctgtgtgtcggacctccatgtgtagtatacagtcagcaccccctgagccggctaccttgaagggcacagtgccagatgatgctgtagaagccttggctgatagcctggggaaaaaggaagcagatccagaagatggaaaacctgtgatggataaagtcaaggagaaggccaaagaagaagaccgtgaaaagcttggtgaaaaagaagaaacaattcctcctgattatagattagaagaggtcaaggataaagatggaaagccactcctgccaaaagagtctaaggaacagcttccacccatgagtgaagacttccttctggatgctttgtctgaggacttctctggtccacaaaatgcttcatctcttaaatttgaagatgctaaacttgctgctgccatctctgaagtggtttcccaaaccccagcttcaacgacccaagctggagccccaccccgtgatacctcgcagagtgacaaagacctcgatgatgccttggataaactctctgacagtctaggacaaaggcagcctgacccagatgagaacaaaccaatggaagataaagtaaaggaaaaagctaaagctgaacatagagacaagcttggagaaagagatgacactatcccacctgaatacagacatctcctggatgataatggacaggacaaaccagtgaagccacctacaaagaaatcagaggattcaaagaaacctgcagatgaccaagaccccattgatgctctctcaggagatctggacagctgtccctccactacagaaacctcacagaacacagcaaaggataagtgcaagaaggctgcttccagctccaaagcacctaagaatggaggtaaagcgaaggattcagcaaagacaacagaggaaacttccaagccaaaagatgactaaagaaatacaagttaaggtatctggtatctgcatgtaaaatcttcagctggtggatggtgacttttgaagaacaaaaggctttggcaacagaaaacaattgttctgggtgatttctagaatggtttttgttgagtctctgaacatcctaaatattggtttgttattctttt

SEQ ID NO: 113684 - DNA, 565 bp, Homo sapiens
  Payload ID: 2212
  Gene Symbol: CAST
  Gene Name: calpastatin
  ENST ID: ENST00000509259
  CDS Start-End: 291-565
gatcagccattgtgccttcagagaagaaggcagcaggggccacttcaagcttccctgcttcctaagcttaggttgtcagaagcctttttagagatacatttttagaaaaagaaaaatagtgtggtaacagtttactacttgcttcttttttttttgtttgtttagagtattttatagtaatattactatagctttatgtctagcttaccaaataaggggtgaagtgtgccccagagaacgctgttactgtagaaacgtgtcttagccccaatttccactcattggatacaatgagtgatcaagcactcgaggctctgtcggcttcactgggcacccggcaagcagaacctgagctcgacctccgctcaattaaggaagtcgatgaggataaagatggaaaaccactattgccagagcctgaagaaaaacccaagcctcggagtgaatcagaactcattgatgaactttcagaagattttgaccggtctgaatgtaaagagaaaccatctaagccaactgaaaagacagaagaatctaaggccgctgctccagctcctgtgtcgga

SEQ ID NO: 113685 - DNA, 1835 bp, Homo sapiens
  Payload ID: 2212
  Gene Symbol: CAST
  Gene Name: calpastatin
  ENST ID: ENST00000510500
  CDS Start-End: 1-1396
gcctacagctgctggaaagaaaactgaaaaagaggaatctacagaagttttaaaagctcagtcagcagggacagtcagaagtgctgctccaccccaagagaagaaaagaaaggtggagaaggatacaatgagtgatcaagcactcgaggctctgtcggcttcactgggcacccggcaagcagaacctgagctcgacctccgctcaattaaggaagtcgatgaggcaaaagctaaagaagaaaaactagagaagtgtggtgaggatgatgaaacaatcccatctgagtacagattaaaaccagccacggataaagatggaaaaccactattgccagagcctgaagaaaaacccaagcctcggagtgaatcagaactcattgatgaactttcagaagattttgaccggtctgaatgtaaagagaaaccatctaagccaactgaaaagacagaagaatctaaggccgctgctccagctcctgtgtcggaggctgtgtgtcggacctccatgtgtagtatacagtcagcaccccctgagccggctaccttgaagggcacagtgccagatgatgctgtagaagccttggctgatagcctggggaaaaaggaagcagatccagaagatggaaaacctgtgatggataaagtcaaggagaaggccaaagaagaagaccgtgaaaagcttggtgaaaaagaagaaacaattcctcctgattatagattagaagaggtcaaggataaagatggaaagccactcctgccaaaagagtctaaggaacagcttccacccatgagtgaagacttccttctggatgctttgtctgaggacttctctggtccacaaaatgcttcatctcttaaatttgaagatgctaaacttgctgctgccatctctgaagtggtttcccaaaccccagcttcaacgacccaagctggagccccaccccgtgatacctcgagtgacaaagacctcgatgatgccttggataaactctctgacagtctaggacaaaggcagcctgacccagatgagaacaaaccaatggaagataaagtaaaggaaaaagctaaagctgaacatagagacaagcttggagaaagagatgacactatcccacctgaatacagacatctcctggatgataatggacaggacaaaccagtgaagccacctacaaagaaatcagaggattcaaagaaacctgcagatgaccaagaccccattgatgctctctcaggagatctggacagctgtccctccactacagaaacctcacagaacacagcaaaggataagtgcaagaaggctgcttccagctccaaagcacctaagaatggaggtaaagcgaaggattcagcaaagacaacagaggaaacttccaagccaaaagatgactaaagaaatacaagttaaggtatctggtatctgcatgtaaaatcttcagctggtggatggtgacttttgaagaacaaaaggctttggcaacagaaaacaattgttctgggtgatttctagaatggtttttgttgagtctctgaacatcctaaatattggtttgttattcttttccagaaagaaaatgaatttgactggttcacctgtgtactgagtattgataaactttgaatttttttaattgccttcaattgggagagaaagctttatatttgtaagaaatatatttgataaagtttcttaaagcaacaccaaaaaaacaaaagaaaagctaagtgaatttttgcacattctacacacagtgcctgtaaatctcatttgtattttcagtttgcccttaattttttttgttagtgtttagaaaacaatgttttaaacattc

SEQ ID NO: 113686 - DNA, 2336 bp, Homo sapiens
  Payload ID: 2212
  Gene Symbol: CAST
  Gene Name: calpastatin
  ENST ID: ENST00000504465
  CDS Start-End: 150-2060
agagagctgggctggagctccaagcggaaaccgcgggagccgagcccagctaggaatgcagacctcctgaaaaccaagccgaggactgcggggtccggtgtccacgcagagtgtcagcttcctctggtgcaaccagcaagtcttccagtatgaatcccacagaaaccaaggctgtaaaaacagaacctgagaagaagtcacagtcaaccaagctgtctgtggttcatgagaaaaaatcccaagaaggaaagccaaaagaacacacagagccaaaaagcctacccaagcaggcatcagatacaggaagtaacgatgctcacaataaaaaagcagtttccagatcagctgaacagcagccatcagagaaatcaacagaaccaaagtcaggcatggatgctgctttggatgacttaatagatactttaggaggacctgaagaaactgaagaagaaaatacaacgtatactggaccagaagtttcagatccaatgagttccacctacatagaggaattgggtaaaagagaagtcacaattcctccaaaatatagggaactattggctaaaaaggaagggatcacagggcctcctgcagactcttcgaaacccatagggccagatgatgctatagacgccttgtcatctgacttcacctgtgggtcgcctacagctgctggaaagaaaactgaaaaagaggaatctacagaagttttaaaagctcagtcagcagggacagtcagaagtgctgctccaccccaagagaagaaaagaaaggtggagaaggatacaatgagtgatcaagcactcgaggctctgtcggcttcactgggcacccggcaagcagaacctgagctcgacctccgctcaattaaggaagtcgatgaggcaaaagctaaagaagaaaaactagagaagtgtggtgaggatgatgaaacaatcccatctgagtacagattaaaaccagccacggataaagatggaaaaccactattgccagagcctgaagaaaaacccaagcctcggagtgaatcagaactcattgatgaactttcagaagattttgaccggtctgaatgtaaagagaaaccatctaagccaactgaaaagacagaagaatctaaggccgctgctccagctcctgtgtcggaggctgtgtgtcggacctccatgtgtagtatacagtcagcaccccctgagccggctaccttgaagggcacagtgccagatgatgctgtagaagccttggctgatagcctggggaaaaaggaagcagatccagaagatggaaaacctgtgatggataaagtcaaggagaaggccaaagaagaagaccgtgaaaagcttggtgaaaaagaagaaacaattcctcctgattatagattagaagaggtcaaggataaagatggaaagccactcctgccaaaagagtctaaggaacagcttccacccatgagtgaagacttccttctggatgctttgtctgaggacttctctggtccacaaaatgcttcatctcttaaatttgaagatgctaaacttgctgctgccatctctgaagtggtttcccaaaccccagcttcaacgacccaagctggagccccaccccgtgatacctcgcagagtgacaaagacctcgatgatgccttggataaactctctgacagtctaggacaaaggcagcctgacccagatgagaacaaaccaatggaagataaagtaaaggaaaaagctaaagctgaacatagagacaagcttggagaaagagatgacactatcccacctgaatacagacatctcctggatgataatggacaggacaaaccagtgaagccacctacaaagaaatcagaggattcaaagaaacctgcagatgaccaagaccccattgatgctctctcaggagatctggacagctgtccctccactacagaaacctcacagaacacagcaaaggataagtgcaagaaggctgcttccagctccaaagcacctaagaatggaggtaaagcgaaggattcagcaaagacaacagaggaaacttccaagccaaaagatgactaaagaaatacaagttaaggtatctggtatctgcatgtaaaatcttcagctggtggatggtgacttttgaagaacaaaaggctttggcaacagaaaacaattgttctgggtgatttctagaatggtttttgttgagtctctgaacatcctaaatattggtttgttattcttttccagaaagaaaatgaatttgactggttcacctgtgtactgagtattgataaactttgaatttttttaattgccttcaattgggagagaaagctttatatttgtaag

SEQ ID NO: 113687 - DNA, 2539 bp, Homo sapiens
  Payload ID: 2212
  Gene Symbol: CAST
  Gene Name: calpastatin
  Uniprot ID: P20810
  ENST ID: ENST00000508830
  CDS Start-End: 164-2539
ctgggcatcgaaggaggaacgctgcaacctccaaccccttctttctgaccaaccgggaccagagcagtgctggggccggggcgggtcaccgggactccccgccaggcctccccgccactctccgcggcgcattccgggaggcagcggccgcagcggcctcgccatgtcccagcccggccagaagcccgccgcctccccgcggccccggcgagcagccgccgcccgccgcacccatgagcatgtcagtgaaaaaaccagtgaatcgccttccaaaccaggagaaaagaaaggatcagatgagaaaaaagcagcaagcctcggcagcagtcaatcctccagaacctatgctggtggaacagcctcggccaccaaggtgtcagcttcctctggtgcaaccagcaagtcttccagtatgaatcccacagaaaccaaggccattccagtcagccaacagatggaaggaccacatcttcctaacaagaaaaaacacaaaaaacaggctgtaaaaacagaacctgagaagaagtcacagtcaaccaagctgtctgtggttcatgagaaaaaatcccaagaaggaaagccaaaagaacacacagagccaaaaagcctacccaagcaggcatcagatacaggaagtaacgatgctcacaataaaaaagcagtttccagatcagctgaacagcagccatcagagaaatcaacagaaccaaagactaaaccacaagacatgatttctgctggtggagagagtgttgctggtatcactgcaatatctggcaagccgggtgacaagaaaaaagaaaagaaatcattaaccccagctgtgccagttgaatctaaaccggataaaccatcgggaaagtcaggcatggatgctgctttggatgacttaatagatactttaggaggacctgaagaaactgaagaagaaaatacaacgtatactggaccagaagtttcagatccaatgagttccacctacatagaggaattgggtaaaagagaagtcacaattcctccaaaatatagggaactattggctaaaaaggaagggatcacagggcctcctgcagactcttcgaaacccatagggccagatgatgctatagacgccttgtcatctgacttcacctgtgggtcgcctacagctgctggaaagaaaactgaaaaagaggaatctacagaagttttaaaagctcagtcagcagggacagtcagaagtgctgctccaccccaagagaagaaaagaaaggtggagaaggatacaatgagtgatcaagcactcgaggctctgtcggcttcactgggcacccggcaagcagaacctgagctcgacctccgctcaattaaggaagtcgatgaggcaaaagctaaagaagaaaaactagagaagtgtggtgaggatgatgaaacaatcccatctgagtacagattaaaaccagccacggataaagatggaaaaccactattgccagagcctgaagaaaaacccaagcctcggagtgaatcagaactcattgatgaactttcagaagattttgaccggtctgaatgtaaagagaaaccatctaagccaactgaaaagacagaagaatctaaggccgctgctccagctcctgtgtcggaggctgtgtgtcggacctccatgtgtagtatacagtcagcaccccctgagccggctaccttgaagggcacagtgccagatgatgctgtagaagccttggctgatagcctggggaaaaaggaagcagatccagaagatggaaaacctgtgatggataaagtcaaggagaaggccaaagaagaagaccgtgaaaagcttggtgaaaaagaagaaacaattcctcctgattatagattagaagaggtcaaggataaagatggaaagccactcctgccaaaagagtctaaggaacagcttccacccatgagtgaagacttccttctggatgctttgtctgaggacttctctggtccacaaaatgcttcatctcttaaatttgaagatgctaaacttgctgctgccatctctgaagtggtttcccaaaccccagcttcaacgacccaagctggagccccaccccgtgatacctcgcagagtgacaaagacctcgatgatgccttggataaactctctgacagtctaggacaaaggcagcctgacccagatgagaacaaaccaatggaagataaagtaaaggaaaaagctaaagctgaacatagagacaagcttggagaaagagatgacactatcccacctgaatacagacatctcctggatgataatggacaggacaaaccagtgaagccacctacaaagaaatcagaggattcaaagaaacctgcagatgaccaagaccccattgatgctctctcaggagatctggacagctgtccctccactacagaaacctcacagaacacagcaaaggataagtgcaagaaggctgcttccagctccaaagcacctaagaatggaggtaaagcgaaggattcagcaaagacaacagaggaaacttccaagccaaaagatgactaa

SEQ ID NO: 113688 - DNA, 1758 bp, Homo sapiens
  Payload ID: 2212
  Gene Symbol: CAST
  Gene Name: calpastatin
  ENST ID: ENST00000508579
  CDS Start-End: 290-1561
ataaaaccttcaagtttgattgtataaaggactttgagccctgaggatcactagagggacaccaagtagctggtactgcccagcattctcaactatatttcactatgacataattctcacaaatcgcaaaaggcaatcctgcagctctgtgctggctgggaacacatgtctcctctgcaaacagtcaagataatgctcaggaacggtttctatcagagcagcttgtgcctctcccctcctggagtggacagtttatttttatctggcaggctggggaacagtggatacaatgagtgatcaagcactcgaggctctgtcggcttcactgggcacccggcaagcagaacctgagctcgacctccgctcaattaaggaagtcgatgaggcaaaagctaaagaagaaaaactagagaagtgtggtgaggatgatgaaacaatcccatctgagtacagattaaaaccagccacggataaagatggaaaaccactattgccagagcctgaagaaaaacccaagcctcggagtgaatcagaactcattgatgaactttcagaagattttgaccggtctgaatgtaaagagaaaccatctaagccaactgaaaagacagaagaatctaaggccgctgctccagctcctgtgtcggaggctgtgtgtcggacctccatgtgtagtatacagtcagcaccccctgagccggctaccttgaagggcacagtgccagatgatgctgtagaagccttggctgatagcctggggaaaaaggaagcagatccagaagatggaaaacctgtgatggataaagtcaaggagaaggccaaagaagaagaccgtgaaaagcttggtgaaaaagaagaaacaattcctcctgattatagattagaagaggtcaaggataaagatggaaagccactcctgccaaaagagtctaaggaacagcttccacccatgagtgaagacttccttctggatgctttgtctgaggacttctctggtccacaaaatgcttcatctcttaaatttgaagatgctaaacttgctgctgccatctctgaagtggtttcccaaaccccagcttcaacgacccaagctggagccccaccccgtgatacctcgcagagtgacaaagacctcgatgatgccttggataaactctctgacagtctaggacaaaggcagcctgacccagatgagaacaaaccaatggaagataaagtaaaggaaaaagctaaagctgaacatagagacaagcttggagaaagagatgacactatcccacctgaatacagacatctcctggatgataatggacaggacaaaccagtgaagccacctacaaagaaatcagaggattcaaagaaacctgcagatgaccaagaccccattgatgctctctcaggagatctggacagctgtccctccactacagaaacctcacagaacacagcaaaggataagtgcaagaaggctgcttccagctccaaagcacctaagaatggaggtaaagcgaaggattcagcaaagacaacagaggaaacttccaagccaaaagatgactaaagaaatacaagttaaggtatctggtatctgcatgtaaaatcttcagctggtggatggtgacttttgaagaacaaaaggctttggcaacagaaaacaattgttctgggtgatttctagaatggtttttgttgagtctctgaacatcctaaatattggtttgttattcttttccagaaagaaaatgaatttgactggtt

SEQ ID NO: 113689 - DNA, 904 bp, Homo sapiens
  Payload ID: 2212
  Gene Symbol: CAST
  Gene Name: calpastatin
  ENST ID: ENST00000512620
  CDS Start-End: 1-904
ccgccgcccgccgcacccatgagcatgtcagtgaaaaaaccagtgaatcgccttccaaaccaggagaaaagaaaggatcagatgagaaaaaagcagcaagcctcggcagcagtcaatcctccagaacctatgctggtggaacagcctcggccaccaaggtgtcagcttcctctggtgcaaccagcaagtcttccagtatgaatcccacagaaaccaaggctgtaaaaacagaacctgagaagaagtcacagtcaaccaagctgtctgtggttcatgagaaaaaatcccaagaaggaaagccaaaagaacacacagagccaaaaagcctacccaagcaggcatcagatacaggaagtaacgatgctcacaataaaaaagcagtttccagatcagctgaacagcagccatcagagaaatcaacagaaccaaagaaaaaagaaaagaaatcattaaccccagctgtgccagttgaatctaaaccggataaaccatcgggaaagtcaggcatggatgctgctttggatgacttaatagatactttaggaggacctgaagaaactgaagaagaaaatacaacgtatactggaccagaagtttcagatccaatgagttccacctacatagaggaattgggtaaaagagaagtcacaattcctccaaaatatagggaactattggctaaaaaggaagggatcacagggcctcctgcagactcttcgaaacccatagggccagatgatgctatagacgccttgtcatctgacttcacctgtgggtcgcctacagctgctggaaagaaaactgaaaaagaggaatctacagaagttttaaaagctcagtcagcagggacagtcagaagtgctgctccaccccaagagaagaaaagaaaggtggagaaggtata

SEQ ID NO: 113690 - DNA, 2171 bp, Homo sapiens
  Payload ID: 2212
  Gene Symbol: CAST
  Gene Name: calpastatin
  ENST ID: ENST00000509903
  CDS Start-End: 150-2171
agagagctgggctggagctccaagcggaaaccgcgggagccgagcccagctaggaatgcagacctcctgaaaaccaagccgaggactgcggggtccggtgtccacgcagagtgtcagcttcctctggtgcaaccagcaagtcttccagtatgaatcccacagaaaccaaggctgtaaaaacagaacctgagaagaagtcacagtcaaccaagctgtctgtggttcatgagaaaaaatcccaagaaggaaagccaaaagaacacacagagccaaaaagcctacccaagcaggcatcagatacaggaagtaacgatgctcacaataaaaaagcagtttccagatcagctgaacagcagccatcagagaaatcaacagaaccaaagactaaaccacaagacatgatttctgctggtggagagagtgttgctggtatcactgcaatatctggcaagccgggtgacaagaaaaaagaaaagaaatcattaaccccagctgtgccagttgaatctaaaccggataaaccatcgggaaagtcaggcatggatgctgctttggatgacttaatagatactttaggaggacctgaagaaactgaagaagaaaatacaacgtatactggaccagaagtttcagatccaatgagttccacctacatagaggaattgggtaaaagagaagtcacaattcctccaaaatatagggaactattggctaaacccatagggccagatgatgctatagacgccttgtcatctgacttcacctgtgggtcgcctacagctgctggaaagaaaactgaaaaagaggaatctacagaagttttaaaagctcagtcagcagggacagtcagaagtgctgctccaccccaagagaagaaaagaaaggtggagaaggatacaatgagtgatcaagcactcgaggctctgtcggcttcactgggcacccggcaagcagaacctgagctcgacctccgctcaattaaggaagtcgatgaggcaaaagctaaagaagaaaaactagagaagtgtggtgaggatgatgaaacaatcccatctgagtacagattaaaaccagccacggataaagatggaaaaccactattgccagagcctgaagaaaaacccaagcctcggagtgaatcagaactcattgatgaactttcagaagattttgaccggtctgaatgtaaagagaaaccatctaagccaactgaaaagacagaagaatctaaggccgctgctccagctcctgtgtcggaggctgtgtgtcggacctccatgtgtagtatacagtcagcaccccctgagccggctaccttgaagggcacagtgccagatgatgctgtagaagccttggctgatagcctggggaaaaaggaagcagatccagaagatggaaaacctgtgatggataaagtcaaggagaaggccaaagaagaagaccgtgaaaagcttggtgaaaaagaagaaacaattcctcctgattatagattagaagaggtcaaggataaagatggaaagccactcctgccaaaagagtctaaggaacagcttccacccatgagtgaagacttccttctggatgctttgtctgaggacttctctggtccacaaaatgcttcatctcttaaatttgaagatgctaaacttgctgctgccatctctgaagtggtttcccaaaccccagcttcaacgacccaagctggagccccaccccgtgatacctcgcagagtgacaaagacctcgatgatgccttggataaactctctgacagtctaggacaaaggcagcctgacccagatgagaacaaaccaatggaagataaagtaaaggaaaaagctaaagctgaacatagagacaagcttggagaaagagatgacactatcccacctgaatacagacatctcctggatgataatggacaggacaaaccagtgaagccacctacaaagaaatcagaggattcaaagaaacctgcagatgaccaagaccccattgatgctctctcaggagatctggacagctgtccctccactacagaaacctcacagaacacagcaaaggataagtgcaagaaggctgcttccagctccaaagcacctaagaatggaggtaaagcgaaggattcagcaaagacaacagaggaaacttccaagccaaaagatgactaa

SEQ ID NO: 113691 - DNA, 582 bp, Homo sapiens
  Payload ID: 2212
  Gene Symbol: CAST
  Gene Name: calpastatin
  ENST ID: ENST00000506811
  CDS Start-End: 113-582
agtgccagcccggtcccggccaagcggagtgtgagcccggcgcctccaacgcaacaccccgcgccctcgccggctcccccgccgtgcggatcggagccagccggttgttgccatggcattcgccagctggtggtacaagacgcatgtcagtgaaaaaaccagtgaatcgccttccaaaccaggagaaaagaaaggatcagatgagaaaaaagcagcaagcctcggcagcagtcaatcctccagaacctatgctggtggaacagcctcggccaccaaggtgtcagcttcctctggtgcaaccagcaagtcttccagtatgaatcccacagaaaccaaggccattccagtcagccaacagatggaaggaccacatcttcctaacaagaaaaaacacaaaaaacaggctgtaaaaacagaacctgagaagaagtcacagtcaaccaagctgtctgtggttcatgagaaaaaatcccaagaaggaaagccaaaagaacacacagagccaaaaagcctacccaagcaggcatcagatacaggaagtaacgatgctcacaataaaaaagcagtttccagatcagctga

SEQ ID NO: 113692 - DNA, 1323 bp, Homo sapiens
  Payload ID: 2212
  Gene Symbol: CAST
  Gene Name: calpastatin
  ENST ID: ENST00000510098
  CDS Start-End: 1-612
atgagtgaagacttccttctggatgctttgtctgaggacttctctggtccacaaaatgcttcatctcttaaatttgaagatgctaaacttgctgctgccatctctgaagtggtttcccaaaccccagcttcaacgacccaagctggagccccaccccgtgatacctcgcagagtgacaaagacctcgatgatgccttggataaactctctgacagtctaggacaaaggcagcctgacccagatgagaacaaaccaatggaagataaagtaaaggaaaaagctaaagctgaacatagagacaagcttggagaaagagatgacactatcccacctgaatacagacatctcctggatgataatggacaggacaaaccagtgaagccacctacaaagaaatcagaggattcaaagaaacctgcagatgaccaagaccccattgatgctctctcaggagatctggacagctgtccctccactacagaaacctcacagaacacagcaaaggataagtgcaagaaggctgcttccagctccaaagcacctaagaatggaggtaaagcgaaggattcagcaaagacaacagaggaaacttccaagccaaaagatgactaaagaaatacaagttaaggtatctggtatctgcatgtaaaatcttcagctggtggatggtgacttttgaagaacaaaaggctttggcaacagaaaacaattgttctgggtgatttctagaatggtttttgttgagtctctgaacatcctaaatattggtttgttattcttttccagaaagaaaatgaatttgactggttcacctgtgtactgagtattgataaactttgaatttttttaattgccttcaattgggagagaaagctttatatttgtgtgaggacttctgcatcttacagtcagcacagaacacactgagacttgaatcaagtcagcaacagagcaaaataaagatgcaaacttcgttttttaaaaacatgatatctaaaaagcagaatgtgcagagtcttttctttgccaagcaaaacagtttccaccacatcttgtctatagatgactacctttctggtcaaggctttggacatctcttcagtcatcagacagagtatctctgctctagacctcgctggagttcaagcttgaattattatatgcaagttaattttacaagcctggatgaggctactgaaaactggaaaaaagctacgagactgtaacaacccttcattctttttcatttccaaagctctctccccatctcaagctagaaaatagtgtaaccagactacacaatggaaccactcctaaaaaaat

SEQ ID NO: 113693 - DNA, 1767 bp, Homo sapiens
  Payload ID: 2212
  Gene Symbol: CAST
  Gene Name: calpastatin
  ENST ID: ENST00000484552
  CDS Start-End: 1-1351
ggggagtctccctgacttccagcaacaatccttgagtctgggactgccctggcctaagatgggccagtttctatcttcgactttcttggagggctcaccggccacagtgtggcacgataagctttgtgacggtgaacgcagaggagcaagagaagcagttcgtatcttccaggaccaagcaaaagctaaagaagaaaaactagagaagtgtggtgaggatgatgaaacaatcccatctgagtacagattaaaaccagccacggataaagatggaaaaccactattgccagagcctgaagaaaaacccaagcctcggagtgaatcagaactcattgatgaactttcagaagattttgaccggtctgaatgtaaagagaaaccatctaagccaactgaaaagacagaagaatctaaggccgctgctccagctcctgtgtcggaggctgtgtgtcggacctccatgtgtagtatacagtcagcaccccctgagccggctaccttgaagggcacagtgccagatgatgctgtagaagccttggctgatagcctggggaaaaaggaagcagatccagaagatggaaaacctgtgatggataaagtcaaggagaaggccaaagaagaagaccgtgaaaagcttggtgaaaaagaagaaacaattcctcctgattatagattagaagaggtcaaggataaagatggaaagccactcctgccaaaagagtctaaggaacagcttccacccatgagtgaagacttccttctggatgctttgtctgaggacttctctggtccacaaaatgcttcatctcttaaatttgaagatgctaaacttgctgctgccatctctgaagtggtttcccaaaccccagcttcaacgacccaagctggagccccaccccgtgatacctcgagtgacaaagacctcgatgatgccttggataaactctctgacagtctaggacaaaggcagcctgacccagatgagaacaaaccaatggaagataaagtaaaggaaaaagctaaagctgaacatagagacaagcttggagaaagagatgacactatcccacctgaatacagacatctcctggatgataatggacaggacaaaccagtgaagccacctacaaagaaatcagaggattcaaagaaacctgcagatgaccaagaccccattgatgctctctcaggagatctggacagctgtccctccactacagaaacctcacagaacacagcaaaggataagtgcaagaaggctgcttccagctccaaagcacctaagaatggaggtaaagcgaaggattcagcaaagacaacagaggaaacttccaagccaaaagatgactaaagaaatacaagttaaggtatctggtatctgcatgtaaaatcttcagctggtggatggtgacttttgaagaacaaaaggctttggcaacagaaaacaattgttctgggtgatttctagaatggtttttgttgagtctctgaacatcctaaatattggtttgttattcttttccagaaagaaaatgaatttgactggttcacctgtgtactgagtattgataaactttgaatttttttaattgccttcaattgggagagaaagctttatatttgtgtgaggacttctgcatcttacagtcagcacagaacacactgagacttgaatcaagtcagcaacagagcaaaataaaggttagataagtccttgtgtagcaaatttcgagcataagaaataaaatctaattaattcttagggta

SEQ ID NO: 113694 - DNA, 1633 bp, Homo sapiens
  Payload ID: 2213
  Gene Symbol: CNN1
  Gene Name: calponin 1, basic, smooth muscle
  Uniprot ID: P51911
  ENST ID: ENST00000252456
  CDS Start-End: 212-1105
gggaggggaaggcagctgaggttgtggggggaggtgccccgccccttggcaggcccctacagccaatggaacggccctggaagagacccgggtcgcctccggagcttcaaaaacatgtgaggagggaagagtgtgcagacggaacttcagccgctgcctctgttctcagcgtcagtgccgccactgcccccgccagagcccaccggccagcatgtcctctgctcacttcaaccgaggccctgcctacgggctgtcagccgaggttaagaacaagctggcccagaagtatgaccaccagcgggagcaggagctgagagagtggatcgagggggtgacaggccgtcgcatcggcaacaacttcatggacggcctcaaagatggcatcattctttgcgaattcatcaataagctgcagccaggctccgtgaagaagatcaatgagtcaacccaaaattggcaccagctggagaacatcggcaacttcatcaaggccatcaccaagtatggggtgaagccccacgacatttttgaggccaacgacctgtttgagaacaccaaccatacacaggtgcagtccaccctcctggctttggccagcatggcgaagacgaaaggaaacaaggtgaacgtgggagtgaagtacgcagagaagcaggagcggaaattcgagccggggaagctaagagaagggcggaacatcattgggctgcagatgggcaccaacaagtttgccagccagcagggcatgacggcctatggcacccggcgccacctctacgaccccaagctgggcacagaccagcctctggaccaggcgaccatcagcctgcagatgggcaccaacaaaggagccagccaggctggcatgactgcgccagggaccaagcggcagatcttcgagccggggctgggcatggagcactgcgacacgctcaatgtcagcctgcagatgggcagcaacaagggcgcctcgcagcggggcatgacggtgtatgggctgccacgccaggtctacgaccccaagtactgtctgactcccgagtacccagagctgggtgagcccgcccacaaccaccacgcacacaactactacaattccgcctagggccacaaggccttccctgttttccccccaagggaggctgctgctgctcttggctggacccagccaggcccagccgaccccctctccctgcatggcatcctccagcccctgtagaactcaacctctacagggttagagtttggagagagcagactggcggggggcccattggggggaaggggaccctccgctctgtagtgctacagggtccaacatagagccgggtgtccccaacagcgcccaaaggacgcactgagcaacgctattccagctgtccccccactccctcacaagtgggtacccccaggaccagaagctcccccagcaaagcccccagagcccaggctcggcctgcccccaccccattcccgcagtgggagcaaactgcatgcccagagacccagcggacacacgcggtttggtttgcagcgactggcatactatgtggatgtgacagtggcgtttgtaatgagagcactttcttttttttctatttcactggagcacaataaatggctgtaaaatctc

SEQ ID NO: 113695 - DNA, 1527 bp, Homo sapiens
  Payload ID: 2213
  Gene Symbol: CNN1
  Gene Name: calponin 1, basic, smooth muscle
  ENST ID: ENST00000535659
  CDS Start-End: 579-1322
acagccaatggaacggccctggaagagacccgggtcgcctccggagcttcaaaaacatgtgaggagggaagagtgtgcagacggaacttcagccgctgcctctgttctcagcgtcagtgccgccactgcccccgccagagcccaccggccagcatgtcctctgctcacttcaaccgaggccctgcctacgggctgtcagccgaggttaagaacaagggggaagacttgttgatttttccatatcccccggcctgacaaagaaattggggagcgcttgagtgctggggtacctgggaagtgacgccgtgaaagtgtgggagatcctgaagacagagggggacggtgaaaggcaggaagcgggcatcagaagtgcggcaggggtctcctgactgtggagctaggaagatacctggacaccaccttcatgctatggttgggtaaactgaggttcggagaggagaggcaaatagctggggtcccaggtaaagcagctggcccagaagtatgaccaccagcgggagcaggagctgagagagtggatcgagggggtgacaggccgtcgcatcggcaacaacttcatggacggcctcaaagatggcatcattctttgcgaattcatcaataagctgcagccaggctccgtgaagaagatcaatgagtcaacccaaaattggcaccagctggagaacatcggcaacttcatcaaggccatcaccaagtatggggtgaagccccacgacatttttgaggccaacgacctgtttgagaacaccaaccatacacaggtgcagtccaccctcctggctttggccagcatggcgaagacgaaaggaaacaaggtgaacgtgggagtgaagtacgcagagaagcaggagcggaaattcgagccggggaagctaagagaagggcggaacatcattgggctgcagatgggcaccaacaagtttgccagccagcagggcatgacggcctatggcacccggcgccacctctacgaccccaagctgggcacagaccagcctctggaccaggcgaccatcagcctgcagatgggcaccaacaaaggagccagccaggctggcatgactgcgccagggaccaagcggcagatcttcgagccggggctgggcatggagcactgcgacacgctcaatgtcagcctgcagatgggcagcaacaagggcgcctcgcagcggggcatgacggtgtatgggctgccacgccaggtctacgaccccaagtactgtctgactcccgagtacccagagctgggtgagcccgcccacaaccaccacgcacacaactactacaattccgcctagggccacaaggccttccctgttttccccccaagggaggctgctgctgctcttggctggacccagccaggcccagccgaccccctctccctgcatggcatcctccagcccctgtagaactcaacctctacagggttagagtttggagagagcagactggcggggggcccattggggggaaggggaccctccgctctgtagtgctaca

SEQ ID NO: 113696 - DNA, 565 bp, Homo sapiens
  Payload ID: 2213
  Gene Symbol: CNN1
  Gene Name: calponin 1, basic, smooth muscle
  ENST ID: ENST00000586059
  CDS Start-End: 216-565
gcgcagagccgcgcagagacgccgcgccttataaggcggcctcggggagcccgggccacgctatataagggccggtttgctttataaagccgggctggtggcgtggggggcggcagggccagggccagctggcccagaagtatgaccaccagcgggagcaggagctgagagagtggatcgagggggtgacaggccgtcgcatcggcaacaacttcatggacggcctcaaagatggcatcattctttgcgaattcatcaataagctgcagccaggctccgtgaagaagatcaatgagtcaacccaaaattggcaccagctggagaacatcggcaacttcatcaaggccatcaccaagtatggggtgaagccccacgacatttttgaggccaacgacctgtttgagaacaccaaccatacacaggtgcagtccaccctcctggctttggccagcatggcgaagacgaaaggaaacaaggtgaacgtgggagtgaagtacgcagagaagcaggagcggaaattcgagccggggaagctaagagaagggcggaacatcattgggctgca

SEQ ID NO: 113697 - DNA, 685 bp, Homo sapiens
  Payload ID: 2213
  Gene Symbol: CNN1
  Gene Name: calponin 1, basic, smooth muscle
  ENST ID: ENST00000586577
  CDS Start-End: 1-520
gaagatcaatgagtcaacccaaaattggcaccagctggagaacatcggcaacttcatcaaggccatcaccaagtatggggtgaagccccacgacatttttgaggccaacgacctgtttgagaacaccaaccatacacaggtgcagtccaccctcctggctttggccagcatggcgaagacgaaaggaaacaaggtgaacgtgggagtgaagtacgcagagaagcaggagcggaaattcgagccggggaagctaagagaagggcggaacatcattgggctgcagatgggcaccaacaagtttgccagccagcagggcatgacggcctatggcacccggcgccacctctacgaccccaagctgggcacagaccagcctctggaccaggcgaccatcagcctgcagatgggcaccaacaaaggagccagccaggtgagtgggggcccccgggacacgccgtcaaggcccaggaccctggccaccccacggcctgaccacaccacccttcgcaggctggcatgactgcgccagggaccaagcggcagatcttcgagccggggctgggcatggagcactgcgacacgctcaatgtcagcctgcagatgggcagcaacaagggcgcctcgcagcggggcatgacggtgtatgggctgccacgccaggtctacgaccccaagtactgtctga

SEQ ID NO: 113698 - DNA, 700 bp, Homo sapiens
  Payload ID: 2213
  Gene Symbol: CNN1
  Gene Name: calponin 1, basic, smooth muscle
  ENST ID: ENST00000588935
  CDS Start-End: 1-686
cagagaagcaggagcggaaattcgagccggggaagctaagagaagggcggaacatcattgggctgcagatgggcaccaacaagtttgccagccagcagggcatgacggcctatggcacccggcgccacctctacgaccccaagctgggcacagaccagcctctggaccaggcgaccatcagcctgcagatgggcaccaacaaaggagccagccaggctggcatgactgcgccagggaccaagcggcagatcttcgagccggggctgggcatggagcactgcgacacgctcaatgtcagcctgcagatgggcagcaacaagggcgcctcgcagcggggcatgacggtgtatgggctgccacgccaggtctacgaccccaagtactgtctgactcccgagtacccagagctggcgcccaaaggacgcactgagcaacgctattccagctgtccccccactccctcacaagtgggtacccccaggaccagaagctcccccagcaaagcccccagagcccaggctcggcctgcccccaccccattcccgcagtgggagcaaactgcatgcccagagacccagcggacacacgcggtttggtttgcagcgactggcatactatgtggatgtgacagtggcgtttgtaatgagagcactttcttttttttctatttcactggagcacaataaatggctgtaaaatc

SEQ ID NO: 113699 - DNA, 1848 bp, Homo sapiens
  Payload ID: 2213
  Gene Symbol: CNN1
  Gene Name: calponin 1, basic, smooth muscle
  ENST ID: ENST00000592923
  CDS Start-End: 578-1321
aggcccctacagccaatggaacggccctggaagagacccgggtcgcctccggagcttcaaaaacatgtgaggagggaagagtgtgcagacggaacttcagccgctgcctctgttctcagcgtcagtgccgccactgcccccgccagagcccaccggccagcatgtcctctgctcacttcaaccgaggccctgcctacgggctgtcagccgaggttaagaacaagggggaagacttgttgatttttccatatcccccggcctgacaaagaaattggggagcgcttgagtgctggggtacctgggaagtgacgccgtgaaagtgtgggagatcctgaagacagagggggacggtgaaaggcaggaagcgggcatcagaagtgcggcaggggtctcctgactgtggagctaggaagatacctggacaccaccttcatgctatggttgggtaaactgaggttcggagaggagaggcaaatagctggggtcccagctggcccagaagtatgaccaccagcgggagcaggagctgagagagtggatcgagggggtgacaggccgtcgcatcggcaacaacttcatggacggcctcaaagatggcatcattctttgcgaattcatcaataagctgcagccaggctccgtgaagaagatcaatgagtcaacccaaaattggcaccagctggagaacatcggcaacttcatcaaggccatcaccaagtatggggtgaagccccacgacatttttgaggccaacgacctgtttgagaacaccaaccatacacaggtgcagtccaccctcctggctttggccagcatggcgaagacgaaaggaaacaaggtgaacgtgggagtgaagtacgcagagaagcaggagcggaaattcgagccggggaagctaagagaagggcggaacatcattgggctgcagatgggcaccaacaagtttgccagccagcagggcatgacggcctatggcacccggcgccacctctacgaccccaagctgggcacagaccagcctctggaccaggcgaccatcagcctgcagatgggcaccaacaaaggagccagccaggctggcatgactgcgccagggaccaagcggcagatcttcgagccggggctgggcatggagcactgcgacacgctcaatgtcagcctgcagatgggcagcaacaagggcgcctcgcagcggggcatgacggtgtatgggctgccacgccaggtctacgaccccaagtactgtctgactcccgagtacccagagctgggtgagcccgcccacaaccaccacgcacacaactactacaattccgcctagggccacaaggccttccctgttttccccccaagggaggctgctgctgctcttggctggacccagccaggcccagccgaccccctctccctgcatggcatcctccagcccctgtagaactcaacctctacagggttagagtttggagagagcagactggcggggggcccattggggggaaggggaccctccgctctgtagtgctacagggtccaacatagagccgggtgtccccaacagcgcccaaaggacgcactgagcaacgctattccagctgtccccccactccctcacaagtgggtacccccaggaccagaagctcccccagcaaagcccccagagcccaggctcggcctgcccccaccccattcccgcagtgggagcaaactgcatgcccagagacccagcggacacacgcggtttggtttgcagcgactggcatactatgtggatgtgacagtggcgtttgtaatgagagcactttcttttttttctatttcactggagcacaataaatggctgtaaaatct

SEQ ID NO: 113700 - DNA, 525 bp, Homo sapiens
  Payload ID: 2213
  Gene Symbol: CNN1
  Gene Name: calponin 1, basic, smooth muscle
  ENST ID: ENST00000592338
  CDS Start-End: 1-525
attcatcaataagctgcagccaggctccgtgaagaagatcaatgagtcaacccaaaattggcaccagctggagaacatcggcaacttcatcaaggccatcaccaagtatggggtgaagccccacgacatttttgaggccaacgacctgtttgagaacaccaaccatacacaggtgcagtccaccctcctggctttggccagcatggcgaagacgaaaggaaacaaggtgaacgtgggagtgaagtacgcagagaagcaggagcggaaattcgagccggggaagctaagagaagggcggaacatcattgggctgcaggctggcatgactgcgccagggaccaagcggcagatcttcgagccggggctgggcatggagcactgcgacacgctcaatgtcagcctgcagatgggcagcaacaagggcgcctcgcagcggggcatgacggtgtatgggctgccacgccaggtctacgaccccaagtactgtctgactcccgagtacccagagctgggtgagcccgccca

SEQ ID NO: 113701 - DNA, 549 bp, Homo sapiens
  Payload ID: 2213
  Gene Symbol: CNN1
  Gene Name: calponin 1, basic, smooth muscle
  ENST ID: ENST00000585869
  CDS Start-End: 191-549
acagacgggggagggcgagccaggagcgagataagacctagacaaggatggaggggcagggagaggagacagagccccaccacccccaccccaggcaggaaacctggagacagagaaagacctagagaggcagatatacaagacccaggagccctacccctggccagacagggactagccacctagagagatggggacccaagactgggccaagaaaagacagcgctggggaagagagagacagaggagtcggggggataagagggagagagacatacagacgtgcaaggggtgggggctaagacagagacaagcccccaccactaaccagagacagagccctggagctgaagacctgggggacacggagagacagagatgtatgaccagcactcctctgcaagccagcacccagggacacctccttagacatccttcttcccttcctgagctggcccagaagtatgaccaccagcgggagcaggagctgagagagtggatcgagggggtgacaggccgtcgcatcggcaacaacttcatggacggcct

SEQ ID NO: 113702 - DNA, 512 bp, Homo sapiens
  Payload ID: 2213
  Gene Symbol: CNN1
  Gene Name: calponin 1, basic, smooth muscle
  ENST ID: ENST00000587087
  CDS Start-End: 1-348
ctttgcgaattcatcaataagctgcagccaggctccgtgaagaagatcaatgagtcaacccaaaattggcaccagctggagaacatcggcaacttcatcaaggccatcaccaagtatggggtgaagccccacgacatttttgagccggggctgggcatggagcactgcgacacgctcaatgtcagcctgcagatgggcagcaacaagggcgcctcgcagcggggcatgacggtgtatgggctgccacgccaggtctacgaccccaagtactgtctgactcccgagtacccagagctgggtgagcccgcccacaaccaccacgcacacaactactacaattccgcctagggccacaaggccttccctgttttccccccaagggaggctgctgctgctcttggctggacccagccaggcccagccgaccccctctccctgcatggcatcctccagcccctgtagaactcaacctctacagggttagagtttggagagagcagactggcgggggg

SEQ ID NO: 113703 - DNA, 2179 bp, Homo sapiens
  Payload ID: 2214
  Gene Symbol: CNN2
  Gene Name: calponin 2
  Uniprot ID: Q99439
  ENST ID: ENST00000263097
  CDS Start-End: 82-1011
cgcgtcccaaccccgcgccagcccggcggtcccgtcccgtcccgtcctgtgcggccccgtcccgccgcccgcccgccagccatgagctccacgcagttcaacaagggcccctcgtacgggctgtcggccgaggtcaagaaccggctcctgtccaaatatgacccccagaaggaggcagagctccgcacctggatcgagggactcaccggcctctccatcggccccgacttccagaagggcctgaaggatggaactatcttatgcacactcatgaacaagctacagccgggctccgtccccaagatcaaccgctccatgcagaactggcaccagctagaaaacctgtccaacttcatcaaggccatggtcagctacggcatgaaccctgtggacctgttcgaggccaacgacctgtttgagagtgggaacatgacgcaggtgcaggtgtctcttctcgccctggcggggaaggccaagactaaggggctgcagagcggggtggacattggcgtcaagtactcggagaagcaggagcggaatttcgacgatgccaccatgaaggctggccagtgcgtcatcgggctgcagatgggcaccaacaaatgcgccagccagtcgggcatgactgcctacggcacgagaaggcatctctatgaccccaagaaccatatcctgccccccatggaccactcgaccatcagcctccagatgggcacgaacaagtgtgccagccaggtgggcatgacggctcccgggacccggcggcacatctatgataccaagctgggaaccgacaagtgtgacaactcctccatgtccctgcagatgggctacacgcagggcgccaaccagagcggccaggtcttcggcctgggccggcagatatatgaccccaagtactgcccgcaaggcacagtggccgatggggctccctcgggcaccggcgactgcccggacccgggggaggtccctgaatatcccccttactaccaggaggaggccggctactgaggctcccagcacgctctctccccacatcgtctgcccatctgggtttttgggtttttctgtgttttcatcttttttttttttttcttaacccgttcagtgctgccagtcaaccaagggtctgtgagtgtcagcgtgggatcaggcagcagagcttttttcccctttgccttgatccttcgcaaggctgagccactgggctgtgggggaaggggtcaaggccatatcccaatacgtgtagggcgagggtccctgctggcacattcaggctgtgctgggaagaagagacctgggcttggaaggaaccggtccccgacggtttctgcttgcctcgcctcttcccccttttgtcagctgagcagtttgtggtttctatgcccgcaagtttcaggaagtattcacaaaagaaaaatacattttttcccccaggggtggggcaaggacagtggagagagtgctaggaaatgagtcccctgggaaaggggaccgggccgtgatgttaaatatctccggctcccaagtgactggatttgcctaggaccttcagaccaacagacttcagaccctcagacctgccccggggccaggtggagaaagtgagggccgtacaaggaagtgaaattctgagttgttggggctaagcctgaccccctctccatgctccccgccccaacccactctggcctcagtagatttttttttcagttgtggttgttgcccaggctggagtgcagtggcgccatcttggctcactgcacctccaccttccgggctcaagcgattctccagcctcagcctcctgagtagctaggactgcaggtgctccaccacgcccggctaatttttgtatttttagtagagatggggtttccccatgttggccaggctggtctcgaactcctggcctcaggtgtgatccgcccgcctccgcctccccaagcgctgagattacaggtgtgagccaccgtgcccagcccctcagtaggttttaaggagcccccagccctcctcccttctgggcccgaccagcttatactgctccatcttccccggccacatgccccgccaagtactgcacagggaccccccacccaggggacctgctccgtgagataatgtgaaatacgactgtggaccaaacgcaataaaacctctgtttgtacgaagagaa

SEQ ID NO: 113704 - DNA, 2033 bp, Homo sapiens
  Payload ID: 2214
  Gene Symbol: CNN2
  Gene Name: calponin 2
  Uniprot ID: Q99439
  ENST ID: ENST00000348419
  CDS Start-End: 53-865
tcccgtcccgtcccgtcctgtgcggccccgtcccgccgcccgcccgccagccatgagctccacgcagttcaacaagggcccctcgtacgggctgtcggccgaggtcaagaaccggctcctgtccaaatatgacccccagaaggaggcagagctccgcacctggatcgagggactcaccggcctctccatcggccccgacttccagaagggcctgaaggatggaactatcttatgcacactcatgaacaagctacagccgggctccgtccccaagatcaaccgctccatgcagaactggcaccagctagaaaacctgtccaacttcatcaaggccatggtcagctacggcatgaaccctgtggacctgttcgaggccaacgacctgtttgagagtgggaacatgacgcaggtgcaggtgtctcttctcgccctggcggggaagatgggcaccaacaaatgcgccagccagtcgggcatgactgcctacggcacgagaaggcatctctatgaccccaagaaccatatcctgccccccatggaccactcgaccatcagcctccagatgggcacgaacaagtgtgccagccaggtgggcatgacggctcccgggacccggcggcacatctatgataccaagctgggaaccgacaagtgtgacaactcctccatgtccctgcagatgggctacacgcagggcgccaaccagagcggccaggtcttcggcctgggccggcagatatatgaccccaagtactgcccgcaaggcacagtggccgatggggctccctcgggcaccggcgactgcccggacccgggggaggtccctgaatatcccccttactaccaggaggaggccggctactgaggctcccagcacgctctctccccacatcgtctgcccatctgggtttttgggtttttctgtgttttcatcttttttttttttttcttaacccgttcagtgctgccagtcaaccaagggtctgtgagtgtcagcgtgggatcaggcagcagagcttttttcccctttgccttgatccttcgcaaggctgagccactgggctgtgggggaaggggtcaaggccatatcccaatacgtgtagggcgagggtccctgctggcacattcaggctgtgctgggaagaagagacctgggcttggaaggaaccggtccccgacggtttctgcttgcctcgcctcttcccccttttgtcagctgagcagtttgtggtttctatgcccgcaagtttcaggaagtattcacaaaagaaaaatacattttttcccccaggggtggggcaaggacagtggagagagtgctaggaaatgagtcccctgggaaaggggaccgggccgtgatgttaaatatctccggctcccaagtgactggatttgcctaggaccttcagaccaacagacttcagaccctcagacctgccccggggccaggtggagaaagtgagggccgtacaaggaagtgaaattctgagttgttggggctaagcctgaccccctctccatgctccccgccccaacccactctggcctcagtagatttttttttcagttgtggttgttgcccaggctggagtgcagtggcgccatcttggctcactgcacctccaccttccgggctcaagcgattctccagcctcagcctcctgagtagctaggactgcaggtgctccaccacgcccggctaatttttgtatttttagtagagatggggtttccccatgttggccaggctggtctcgaactcctggcctcaggtgtgatccgcccgcctccgcctccccaagcgctgagattacaggtgtgagccaccgtgcccagcccctcagtaggttttaaggagcccccagccctcctcccttctgggcccgaccagcttatactgctccatcttccccggccacatgccccgccaagtactgcacagggaccccccacccaggggacctgctccgtgagataatgtgaaatacgactgtggaccaaacgcaataaaacctctgtttgtacgaagagaa

SEQ ID NO: 113705 - DNA, 623 bp, Homo sapiens
  Payload ID: 2214
  Gene Symbol: CNN2
  Gene Name: calponin 2
  ENST ID: ENST00000562075
  CDS Start-End: 161-623
ctcgtacgggctgtcggccgaggtcaagaaccggctcctgtccaaatatgacccccagaaggaggcagagctccgcacctggatcgagggactcaccggcctctccatcggccccgacttccagaagggcctgaaggatggaactatcttatgcacactcatgaacaagctacagccgggctccgtccccaagatcaaccgctccatgcagaactggcaccagctagaaaacctgtccaacttcatcaaggccatggtcagctacggcatgaaccctgtggacctgttcgaggccaacgacctgtttgagagtgggaacatgacgcaggtgcaggtgtctcttctcgccctggcggggaagatgggcaccaacaaatgcgccagccagtcgggcatgactgcctacggcacgagaaggcatctctatgaccccaagaaccatatcctgccccccatggaccactcgaccatcagcctccagatgggcacgaacaagtgtgccagccaggtggggctcgcccgggtgcccccgactcctctccctgcccctctacaccctgtggtctcggcccctccctggggccacctccagcttctctccccactctcagtctcagcccctt

SEQ ID NO: 113706 - DNA, 2194 bp, Homo sapiens
  Payload ID: 2214
  Gene Symbol: CNN2
  Gene Name: calponin 2
  ENST ID: ENST00000562958
  CDS Start-End: 34-1026
gtgcggccccgtcccgccgcccgcccgccagccatgagctccacgcagttcaacaagggcccctcgtacgggctgtcggccgaggtcaagaaccggctcctgtccaaatatgacccccagaaggaggcagagctccgcacctggatcgagggactcaccggcctctccatcggccccgacttccagaagggcctgaaggatggaactatcttatgcacactcatgaacaagctacagccgggctccgtccccaagatcaaccgctccatgcagaactggcaccagctagaaaacctgtccaacttcatcaaggccatggtcagctacggcatgaaccctgtggacctgttcgaggccaacgacctgtttgagagtgggaacatgacgcaggtgcaggtgtctcttctcgccctggcggggaagggcctagatctagggtccctggctgccctctgctggtactcccggcccctttccctcacccaggccaagactaaggggctgcagagcggggtggacattggcgtcaagtactcggagaagcaggagcggaatttcgacgatgccaccatgaaggctggccagtgcgtcatcgggctgcagatgggcaccaacaaatgcgccagccagtcgggcatgactgcctacggcacgagaaggcatctctatgaccccaagaaccatatcctgccccccatggaccactcgaccatcagcctccagatgggcacgaacaagtgtgccagccaggtgggcatgacggctcccgggacccggcggcacatctatgataccaagctgggaaccgacaagtgtgacaactcctccatgtccctgcagatgggctacacgcagggcgccaaccagagcggccaggtcttcggcctgggccggcagatatatgaccccaagtactgcccgcaaggcacagtggccgatggggctccctcgggcaccggcgactgcccggacccgggggaggtccctgaatatcccccttactaccaggaggaggccggctactgaggctcccagcacgctctctccccacatcgtctgcccatctgggtttttgggtttttctgtgttttcatcttttttttttttttcttaacccgttcagtgctgccagtcaaccaagggtctgtgagtgtcagcgtgggatcaggcagcagagcttttttcccctttgccttgatccttcgcaaggctgagccactgggctgtgggggaaggggtcaaggccatatcccaatacgtgtagggcgagggtccctgctggcacattcaggctgtgctgggaagaagagacctgggcttggaaggaaccggtccccgacggtttctgcttgcctcgcctcttcccccttttgtcagctgagcagtttgtggtttctatgcccgcaagtttcaggaagtattcacaaaagaaaaatacattttttcccccaggggtggggcaaggacagtggagagagtgctaggaaatgagtcccctgggaaaggggaccgggccgtgatgttaaatatctccggctcccaagtgactggatttgcctaggaccttcagaccaacagacttcagaccctcagacctgccccggggccaggtggagaaagtgagggccgtacaaggaagtgaaattctgagttgttggggctaagcctgaccccctctccatgctccccgccccaacccactctggcctcagtagatttttttttcagttgtggttgttgcccaggctggagtgcagtggcgccatcttggctcactgcacctccaccttccgggctcaagcgattctccagcctcagcctcctgagtagctaggactgcaggtgctccaccacgcccggctaatttttgtatttttagtagagatggggtttccccatgttggccaggctggtctcgaactcctggcctcaggtgtgatccgcccgcctccgcctccccaagcgctgagattacaggtgtgagccaccgtgcccagcccctcagtaggttttaaggagcccccagccctcctcccttctgggcccgaccagcttatactgctccatcttccccggccacatgccccgccaagtactgcacagggaccccccacccaggggacctgctccgtgagataatgtgaaatacgactgtggaccaaacgcaataaaacctctgtttgtacgaagagaa

SEQ ID NO: 113707 - DNA, 2109 bp, Homo sapiens
  Payload ID: 2214
  Gene Symbol: CNN2
  Gene Name: calponin 2
  ENST ID: ENST00000565096
  CDS Start-End: 45-941
cgtcccgtcctgtgcggccccgtcccgccgcccgcccgccagccatgagctccacgcagttcaacaagggcccctcgtacgggctgtcggccgaggtcaagaaccggctcctgtccaaatatgacccccagaaggaggcagagctccgcacctggatcgagggactcaccggcctctccatcggccccgacttccagaagggcctgaaggatggaactatcttatgcacactcatgaacaagctacagccgggctccgtccccaagatcaaccgctccatgcagaactggcaccagctagaaaacctgtccaacttcatcaaggccatggtcagctacggcatgaaccctgtggacctgttcgaggccaacgacctgtttgagagtgggaacatgacgcaggccaagactaaggggctgcagagcggggtggacattggcgtcaagtactcggagaagcaggagcggaatttcgacgatgccaccatgaaggctggccagtgcgtcatcgggctgcagatgggcaccaacaaatgcgccagccagtcgggcatgactgcctacggcacgagaaggcatctctatgaccccaagaaccatatcctgccccccatggaccactcgaccatcagcctccagatgggcacgaacaagtgtgccagccaggtgggcatgacggctcccgggacccggcggcacatctatgataccaagctgggaaccgacaagtgtgacaactcctccatgtccctgcagatgggctacacgcagggcgccaaccagagcggccaggtcttcggcctgggccggcagatatatgaccccaagtactgcccgcaaggcacagtggccgatggggctccctcgggcaccggcgactgcccggacccgggggaggtccctgaatatcccccttactaccaggaggaggccggctactgaggctcccagcacgctctctccccacatcgtctgcccatctgggtttttgggtttttctgtgttttcatcttttttttttttttcttaacccgttcagtgctgccagtcaaccaagggtctgtgagtgtcagcgtgggatcaggcagcagagcttttttcccctttgccttgatccttcgcaaggctgagccactgggctgtgggggaaggggtcaaggccatatcccaatacgtgtagggcgagggtccctgctggcacattcaggctgtgctgggaagaagagacctgggcttggaaggaaccggtccccgacggtttctgcttgcctcgcctcttcccccttttgtcagctgagcagtttgtggtttctatgcccgcaagtttcaggaagtattcacaaaagaaaaatacattttttcccccaggggtggggcaaggacagtggagagagtgctaggaaatgagtcccctgggaaaggggaccgggccgtgatgttaaatatctccggctcccaagtgactggatttgcctaggaccttcagaccaacagacttcagaccctcagacctgccccggggccaggtggagaaagtgagggccgtacaaggaagtgaaattctgagttgttggggctaagcctgaccccctctccatgctccccgccccaacccactctggcctcagtagatttttttttcagttgtggttgttgcccaggctggagtgcagtggcgccatcttggctcactgcacctccaccttccgggctcaagcgattctccagcctcagcctcctgagtagctaggactgcaggtgctccaccacgcccggctaatttttgtatttttagtagagatggggtttccccatgttggccaggctggtctcgaactcctggcctcaggtgtgatccgcccgcctccgcctccccaagcgctgagattacaggtgtgagccaccgtgcccagcccctcagtaggttttaaggagcccccagccctcctcccttctgggcccgaccagcttatactgctccatcttccccggccacatgccccgccaagtactgcacagggaccccccacccaggggacctgctccgtgagataatgtgaaatacgactgtggaccaaacgcaataaaacctctgtttgtacgaagagaa

SEQ ID NO: 113708 - DNA, 1332 bp, Homo sapiens
  Payload ID: 2214
  Gene Symbol: CNN2
  Gene Name: calponin 2
  ENST ID: ENST00000568865
  CDS Start-End: 1-657
ctctccatcggccccgacttccagaagggcctgaaggatggaactatcttatgcacactcatgaacaagctacagccgggctccgtccccaagatcaaccgctccatgcagaactggcaccagctagaaaacctgtccaacttcatcaaggccatggtcagctacggcatgaaccctgtggacctgttcgaggccaacgacctgtttgagagtgggaacatgacgcaggtgcaggtgtctcttctcgccctggcggggaaggccaagactaaggggctgcagagcggggtggacattggcgtcaagtactcggagaagcaggagcggaatttcgacgatgccaccatgaaggctggccagtgcgtcatcgggctgcagatgggcaccaacaaatgcgccagccagtcgggcatgactgcctacggcacgagaaggcatctctatgaccccaagaaccatatcctgccccccatggaccactcgaccatcagcctccagatgggcacgaacaagtgtgccagccaggatctcactctgttgtccaggctggagtgcagtggcacgatctcggctcactgcaacctctgcctcccgggttcaagagattctccttcctgcctcagcctcccgagtagctgggactacaggtgggcatgacggctcccgggacccggcggcacatctatgataccaagctgggaaccgacaagtgtgacaactcctccatgtccctgcagatgggctacacgcagggcgccaaccagagcggccaggtcttcggcctgggccggcagatatatgaccccaagtactgcccgcaaggcacagtggccgatggggctccctcgggcaccggcgactgcccggacccgggggaggtccctgaatatcccccttactaccaggaggaggccggctactgaggctcccagcacgctctctccccacatcgtctgcccatctgggtttttgggtttttctgtgttttcatcttttttttttttttcttaacccgttcagtgctgccagtcaaccaagggtctgtgagtgtcagcgtgggatcaggcagcagagcttttttcccctttgccttgatccttcgcaaggctgagccactgggctgtgggggaaggggtcaaggccatatcccaatacgtgtagggcgagggtccctgctggcacattcaggctgtgctgggaagaagagacctgggcttggaaggaaccggtccccgacggtttctgcttgcctcgcctcttcccccttttgtcagctgagcagtttgtggtttctatgcccgcaagtttcaggaagtattcacaaaagaaaaa

SEQ ID NO: 113709 - DNA, 731 bp, Homo sapiens
  Payload ID: 2214
  Gene Symbol: CNN2
  Gene Name: calponin 2
  ENST ID: ENST00000569352
  CDS Start-End: 34-480
gtgcggccccgtcccgccgcccgcccgccagccatgagctccacgcagttcaacaagggcccctcgtacgggctgtcggccgaggtcaagaaccggctcctgtccaaatatgacccccagaaggaggcagagctccgcacctggatcgagggactcaccggcctctccatcggccccgacttccagaagggcctgaaggatggaactatcttatgcacactcatgaacaagctacagccgggctccgtccccaagatcaaccgctccatgcagaactggcaccagctagaaaacctgtccaacttcatcaaggccatggtcagctacggcatgaaccctgtggacctgttcgaggccaacgacctgtttgagagtgggaacatgacgcaggtgcaggtgtctcttctcgccctggcggggaaggtgaggcccagagaggggcagccacctgcccagagtcacacagcgaggtggatgtagctgctgcattcactcgtttgcaaatttctgtttgtttatttttgagtcggagtctcactctgtcactcaggctggagtgcaatggcgtgatctcagctcactgcaacctccaactcccaggttcaagcgattcttctgcctcagtctcccgagtagctgggattacaggcgtgagccagtgcacccagtgaaggtcccctcttctctccaccatgacctgctccacccctccttcctctccaggtgggcat

SEQ ID NO: 113710 - DNA, 307 bp, Homo sapiens
  Payload ID: 2214
  Gene Symbol: CNN2
  Gene Name: calponin 2
  ENST ID: ENST00000607102
  CDS Start-End: 1-307
ctcgtacgggctgtcggccgaggtcaagaaccggatgggcaccaacaaatgcgccagccagtcgggcatgactgcctacggcacgagaaggcatctctatgaccccaagaaccatatcctgccccccatggaccactcgaccatcagcctccagatgggcacgaacaagtgtgccagccaggtggggctcgcccgggtgcccccgactcctctccctgcccctctacaccctgtggtctcggcccctccctggggccacctccagcttctctccccactctcagtctcagccccttccctagaccac

SEQ ID NO: 113711 - DNA, 563 bp, Homo sapiens
  Payload ID: 2214
  Gene Symbol: CNN2
  Gene Name: calponin 2
  ENST ID: ENST00000562015
  CDS Start-End: 364-563
cccaaccccgcgccagcccggcggtcccgtcccgtcccgtcctgtgcggccccgtcccgccgcccgcccgccagccatgagctccacgcagttcaacaagggcccctcgtacgggctgtcggccgaggtcaagaaccgggggtagttgggtctgacttcgtcccctcgccatggccccaggacccccacgtgtgaagcccctggcgcccactcaaccttcgagaaggtccgttcaagctcctgtccaaatatgacccccagaaggaggcagagctccgcacctggatcgagggactcaccggcctctccatcggccccgacttccagaagggcctgaaggatggaactatcttatgcacactcatgaacaagctacagccgggctccgtccccaagatcaaccgctccatgcagaactggcaccagctagaaaacctgtccaacttcatcaaggccatggtcagctacggcatgaaccctgtggacctgttcgaggccaacgacctgtttgagagtgggaacatgacgcaggtgcaggtgtctcttctcgccctggcggggaa

SEQ ID NO: 113712 - DNA, 828 bp, Homo sapiens
  Payload ID: 2214
  Gene Symbol: CNN2
  Gene Name: calponin 2
  ENST ID: ENST00000566695
  CDS Start-End: 255-828
gggacctccaggccgctctatctgctgttgccctggagtccccggccccaccctctgcagagcttctgtggggttcctgctgggggtgcccccagcccagctcagtctcgtgccctttgctccaccagctcctgtccaaatatgacccccagaaggaggcagagctccgcacctggatcgagggactcaccggcctctccatcggccccgacttccagaagggcctgaaggatggaactatcttatgcacactcatgaacaagctacagccgggctccgtccccaagatcaaccgctccatgcagaactggcaccagctagaaaacctgtccaacttcatcaaggccatggtcagctacggcatgaaccctgtggacctgttcgaggccaacgacctgtttgagagtgggaacatgacgcaggtgcaggtgtctcttctcgccctggcggggaaggccaagactaaggggctgcagagcggggtggacattggcgtcaagtactcggagaagcaggagcggaatttcgacgatgccaccatgaaggctggccagtgcgtcatcgggctgcagatgggcaccaacaaatgcgccagccagtcgggcatgactgcctacggcacgagaaggcatctctatgaccccaagaaccatatcctgccccccatggaccactcgaccatcagcctccagatgggcacgaacaagtgtgccagccaggtgggcatgacggctcccgggacccggcggcacatctatgataccaagctgggaaccgacaagtgtgacaactcctccatgtccctgcagatgggctacacgcagggcg

SEQ ID NO: 113713 - DNA, 537 bp, Homo sapiens
  Payload ID: 2214
  Gene Symbol: CNN2
  Gene Name: calponin 2
  ENST ID: ENST00000606983
  CDS Start-End: 1-537
atgagctccacgcagttcaacaagggcccctcgtacgggctgtcggccgaggtcaagaaccggctcctgtccaaatatgacccccagaaggaggcagagctccgcacctggatcgagggactcaccggcctctccatcggccccgacttccagaagggcctgaaggatggaactatcttatgcacactcatgaacaagctacagccgggctccgtccccaagatcaaccgctccatgcagaactggcaccagctagaaaacctgtccaacttcatcaaggccatggtcagctacggcatgaaccctgtggacctgttcgaggccaacgacctgtttgagagtgggaacatgacgcaggtgcaggccaagactaaggggctgcagagcggggtggacattggcgtcaagtactcggagaagcaggagcggaatttcgacgatgccaccatgaaggctggccagtgcgtcatcgggctgcagatgggcaccaacaaatgcgccagccagtcgggcatgactgcctacggcacgagaagg

SEQ ID NO: 113714 - DNA, 2165 bp, Homo sapiens
  Payload ID: 2215
  Gene Symbol: CNN3
  Gene Name: calponin 3, acidic
  Uniprot ID: Q15417
  ENST ID: ENST00000370206
  CDS Start-End: 385-1374
cgggagggaaagcggcccccgcggcccttcaattggccgcaccgcccctcggcgcagaggcgggaggaggcggccctccattggtcgggcccggcggccaatcctcgaaggcccaggcggaggcgggggcggcctgtggggaaccgaggtgcgggcggcgagcgaggcagccgggtgcttcgcagcggagctcgaggctctgtagcacccagttggacccagtcgcccaggcaccgcccgcgccccgcggccgtctcctgcgcctcccagaggagggagttcgagcatcccccgcggcggccactcctcggggccaggagcggggaagcgaagtgcgagagaccccggaccccagcgctgtctcttcccgccgcccgaaccaccatgacccacttcaacaagggcccttcctatgggctctcggccgaagtcaagaacaagattgcttccaagtatgatcatcaggcagaagaagatcttcgcaattggatagaagaggtgacaggcatgagcattggccccaacttccagctgggcttaaaggatggcatcatcctctgcgaacttataaacaagctacagccaggctcagtgaagaaggtcaacgagtcctcactgaactggcctcagttggagaatattggcaactttattaaagctattcaggcttatggtatgaagccacatgacatattcgaagcaaatgatctttttgagaatggaaacatgacccaggttcagactactctggtggctctagcaggtctggctaaaacaaaaggattccatacaaccattgacattggagttaagtatgcagaaaaacaaacaagacgttttgatgaaggaaaattaaaagctggccaaagtgtaattggtctgcagatgggaaccaacaaatgtgccagccaggcaggtatgacagcttacgggactaggaggcatctttatgatcccaaaatgcaaactgacaaaccttttgaccagaccacaattagtctgcagatgggcactaataaaggagccagccaggcagggatgttagcaccaggtaccagaagagacatctatgatcagaagctaacattacagccggtggacaactcgacaatttccctacagatgggtaccaacaaagttgcttcccagaaaggaatgagtgtgtatgggcttgggcggcaagtatatgatcccaaatactgtgctgctcctacagaacctgtcattcacaacggaagccaaggaacaggaacaaatggttcggaaatcagtgatagtgattatcaggcagaataccctgatgagtatcatggcgagtaccaggatgactaccccagagattaccaatatagcgaccaaggcattgattattagatccacacagaaggagctcagtatttagtcctttgtttttattcagtgagaaccaagctagccttgagtaatttttatcttgtcttcctaaaacactattaagcttattgtacttttaagaaaaattgccttacgtacattcctttttcctttttctgcctcttccctcaatagttgccttttagtgctgtaatagttaaatcctacagcataatcaataactcgcatatgaagtaaaaaggaatactgtgaaaggggagtactcttgtacagccagttcttttatgcaaaaatctatgcatttttacaatcttatattaaactggtattttcaaacaataggaaactttttttttttttttttttttttacagtttagtgtatctggtttctacatggaagactaaactcatgcttattgctaaatgtggtctttgccaactaaatttaagatgcagcattttagaaatttacatatcaatgtttctacagtattgtttgctaatttttaaataaagtcatgatcagtgtgcatttgtgattatatgtgtactcattctcttacctagcgaacaagatcttttcagagtggtgtttctaaaagagcatgtacaaaagtggcctgtggacatttaggcctgggtgatgcatttgctcttcctgtttgtgccaatgtatcaatgtagagttgctctgttttcttcaactgtatttattgctgcatttctcagcataaacttatcccattgtattttttataaataaatattttttttgaactttcatatgaa

SEQ ID NO: 113715 - DNA, 1974 bp, Homo sapiens
  Payload ID: 2215
  Gene Symbol: CNN3
  Gene Name: calponin 3, acidic
  Uniprot ID: Q15417
  ENST ID: ENST00000394202
  CDS Start-End: 330-1181
agaggcgggaggaggcggccctccattggtcgggcccggcggccaatcctcgaaggcccaggcggaggcgggggcggcctgtggggaaccgaggtgcgggcggcgagcgaggcagccgggtgcttcgcagcggagctcgaggctctgtagcacccagttggacccagtcgcccaggcaccgcccgcgccccgcggccgtctcctgcgcctcccagaggagggagttcgagcatcccccgcggcggccactcctcggggccaggagcggggaagcgaagtgcgagagaccccggaccccagcgctgtctcttcccgccgcccgaaccaccatgacccacttcaacaagggcccttcctatgggctctcggccgaagtcaagaacaagattgcttccaagtatgatcatcaggcagaagaagatcttcgcaattggatagaagaggtgacaggcatgagcattggccccaacttccagctgggcttaaaggatggcatcatcctctgcgaacttataaacaagctacagccaggctcagtgaagaaggtcaacgagtcctcactgaactggcctcaggctaaaacaaaaggattccatacaaccattgacattggagttaagtatgcagaaaaacaaacaagacgttttgatgaaggaaaattaaaagctggccaaagtgtaattggtctgcagatgggaaccaacaaatgtgccagccaggcaggtatgacagcttacgggactaggaggcatctttatgatcccaaaatgcaaactgacaaaccttttgaccagaccacaattagtctgcagatgggcactaataaaggagccagccaggcagggatgttagcaccaggtaccagaagagacatctatgatcagaagctaacattacagccggtggacaactcgacaatttccctacagatgggtaccaacaaagttgcttcccagaaaggaatgagtgtgtatgggcttgggcggcaagtatatgatcccaaatactgtgctgctcctacagaacctgtcattcacaacggaagccaaggaacaggaacaaatggttcggaaatcagtgatagtgattatcaggcagaataccctgatgagtatcatggcgagtaccaggatgactaccccagagattaccaatatagcgaccaaggcattgattattagatccacacagaaggagctcagtatttagtcctttgtttttattcagtgagaaccaagctagccttgagtaatttttatcttgtcttcctaaaacactattaagcttattgtacttttaagaaaaattgccttacgtacattcctttttcctttttctgcctcttccctcaatagttgccttttagtgctgtaatagttaaatcctacagcataatcaataactcgcatatgaagtaaaaaggaatactgtgaaaggggagtactcttgtacagccagttcttttatgcaaaaatctatgcatttttacaatcttatattaaactggtattttcaaacaataggaaactttttttttttttttttttttttacagtttagtgtatctggtttctacatggaagactaaactcatgcttattgctaaatgtggtctttgccaactaaatttaagatgcagcattttagaaatttacatatcaatgtttctacagtattgtttgctaatttttaaataaagtcatgatcagtgtgcatttgtgattatatgtgtactcattctcttacctagcgaacaagatcttttcagagtggtgtttctaaaagagcatgtacaaaagtggcctgtggacatttaggcctgggtgatgcatttgctcttcctgtttgtgccaatgtatcaatgtagagttgctctgttttcttcaactgtatttattgctgcatttctcagcataaacttatcccattgtattttttataaataaatattttttttgaactttcatatgaacc

SEQ ID NO: 113716 - DNA, 792 bp, Homo sapiens
  Payload ID: 2215
  Gene Symbol: CNN3
  Gene Name: calponin 3, acidic
  ENST ID: ENST00000415017
  CDS Start-End: 236-792
cacaaaggagggctgcctgtggtttaattcccattaacctcccgggagcccaagcatgtcaggattgccaccgcaccgtccgaccgctggtggaaggcactggcattgtcagagctggaacatcccggggctgcgggggtaggcggtgtgaagcgaattatgtaaagagattgcttccaagtatgatcatcaggcagaagaagatcttcgcaattggatagaagaggtgacaggcatgagcattggccccaacttccagctgggcttaaaggatggcatcatcctctgcgaacttataaacaagctacagccaggctcagtgaagaaggtcaacgagtcctcactgaactggcctcagttggagaatattggcaactttattaaagctattcaggcttatggtatgaagccacatgacatattcgaagcaaatgatctttttgagaatggaaacatgacccaggttcagactactctggtggctctagcaggtctggctaaaacaaaaggattccatacaaccattgacattggagttaagtatgcagaaaaacaaacaagacgttttgatgaaggaaaattaaaagctggccaaagtgtaattggtctgcagatgggaaccaacaaatgtgccagccaggcaggtatgacagcttacgggactaggaggcatctttatgatcccaaaatgcaaactgacaaaccttttgaccagaccacaattagtctgcagatgggcactaataaaggagccagccaggcagggatgttagcaccaggtaccagaagaga

SEQ ID NO: 113717 - DNA, 1902 bp, Homo sapiens
  Payload ID: 2215
  Gene Symbol: CNN3
  Gene Name: calponin 3, acidic
  Uniprot ID: Q15417
  ENST ID: ENST00000545882
  CDS Start-End: 243-1109
aaagcgccacaaaggagggctgcctgtggtttaattcccattaacctcccgggagcccaagcatgtcaggattgccaccgcaccgtccgaccgctggtggaaggcactggcattgtcagagctggaacatcccggggctgcgggggtaggcggtgtgaagcgaattatgtaaagagattgcttccaagtatgatcatcaggcagaagaagatcttcgcaattggatagaagaggtgacaggcatgagcattggccccaacttccagctgggcttaaaggatggcatcatcctctgcgaacttataaacaagctacagccaggctcagtgaagaaggtcaacgagtcctcactgaactggcctcagttggagaatattggcaactttattaaagctattcaggcttatggtatgaagccacatgacatattcgaagcaaatgatctttttgagaatggaaacatgacccaggttcagactactctggtggctctagcaggtctggctaaaacaaaaggattccatacaaccattgacattggagttaagtatgcagaaaaacaaacaagacgttttgatgaaggaaaattaaaagctggccaaagtgtaattggtctgcagatgggaaccaacaaatgtgccagccaggcaggtatgacagcttacgggactaggaggcatctttatgatcccaaaatgcaaactgacaaaccttttgaccagaccacaattagtctgcagatgggcactaataaaggagccagccaggcagggatgttagcaccaggtaccagaagagacatctatgatcagaagctaacattacagccggtggacaactcgacaatttccctacagatgggtaccaacaaagttgcttcccagaaaggaatgagtgtgtatgggcttgggcggcaagtatatgatcccaaatactgtgctgctcctacagaacctgtcattcacaacggaagccaaggaacaggaacaaatggttcggaaatcagtgatagtgattatcaggcagaataccctgatgagtatcatggcgagtaccaggatgactaccccagagattaccaatatagcgaccaaggcattgattattagatccacacagaaggagctcagtatttagtcctttgtttttattcagtgagaaccaagctagccttgagtaatttttatcttgtcttcctaaaacactattaagcttattgtacttttaagaaaaattgccttacgtacattcctttttcctttttctgcctcttccctcaatagttgccttttagtgctgtaatagttaaatcctacagcataatcaataactcgcatatgaagtaaaaaggaatactgtgaaaggggagtactcttgtacagccagttcttttatgcaaaaatctatgcatttttacaatcttatattaaactggtattttcaaacaataggaaactttttttttttttttttttttttacagtttagtgtatctggtttctacatggaagactaaactcatgcttattgctaaatgtggtctttgccaactaaatttaagatgcagcattttagaaatttacatatcaatgtttctacagtattgtttgctaatttttaaataaagtcatgatcagtgtgcatttgtgattatatgtgtactcattctcttacctagcgaacaagatcttttcagagtggtgtttctaaaagagcatgtacaaaagtggcctgtggacatttaggcctgggtgatgcatttgctcttcctgtttgtgccaatgtatcaatgtagagttgctctgttttcttcaactgtatttattgctgcatttctcagcataaacttatcccattgtattttttataaataaatattttttttgaactttcatatgaacc

SEQ ID NO: 113718 - DNA, 1903 bp, Homo sapiens
  Payload ID: 2216
  Gene Symbol: CALR
  Gene Name: calreticulin
  Uniprot ID: P27797
  ENST ID: ENST00000316448
  CDS Start-End: 74-1327
ccgtccgtactgcagagccgctgccggagggtcgttttaaagggcccgcgcgttgccgccccctcggcccgccatgctgctatccgtgccgctgctgctcggcctcctcggcctggccgtcgccgagcctgccgtctacttcaaggagcagtttctggacggagacgggtggacttcccgctggatcgaatccaaacacaagtcagattttggcaaattcgttctcagttccggcaagttctacggtgacgaggagaaagataaaggtttgcagacaagccaggatgcacgcttttatgctctgtcggccagtttcgagcctttcagcaacaaaggccagacgctggtggtgcagttcacggtgaaacatgagcagaacatcgactgtgggggcggctatgtgaagctgtttcctaatagtttggaccagacagacatgcacggagactcagaatacaacatcatgtttggtcccgacatctgtggccctggcaccaagaaggttcatgtcatcttcaactacaagggcaagaacgtgctgatcaacaaggacatccgttgcaaggatgatgagtttacacacctgtacacactgattgtgcggccagacaacacctatgaggtgaagattgacaacagccaggtggagtccggctccttggaagacgattgggacttcctgccacccaagaagataaaggatcctgatgcttcaaaaccggaagactgggatgagcgggccaagatcgatgatcccacagactccaagcctgaggactgggacaagcccgagcatatccctgaccctgatgctaagaagcccgaggactgggatgaagagatggacggagagtgggaacccccagtgattcagaaccctgagtacaagggtgagtggaagccccggcagatcgacaacccagattacaagggcacttggatccacccagaaattgacaaccccgagtattctcccgatcccagtatctatgcctatgataactttggcgtgctgggcctggacctctggcaggtcaagtctggcaccatctttgacaacttcctcatcaccaacgatgaggcatacgctgaggagtttggcaacgagacgtggggcgtaacaaaggcagcagagaaacaaatgaaggacaaacaggacgaggagcagaggcttaaggaggaggaagaagacaagaaacgcaaagaggaggaggaggcagaggacaaggaggatgatgaggacaaagatgaggatgaggaggatgaggaggacaaggaggaagatgaggaggaagatgtccccggccaggccaaggacgagctgtagagaggcctgcctccagggctggactgaggcctgagcgctcctgccgcagagctggccgcgccaaataatgtctctgtgagactcgagaactttcatttttttccaggctggttcggatttggggtggattttggttttgttcccctcctccactctcccccaccccctccccgcccttttttttttttttttttaaactggtattttatctttgattctccttcagccctcacccctggttctcatctttcttgatcaacatcttttcttgcctctgtccccttctctcatctcttagctcccctccaacctggggggcagtggtgtggagaagccacaggcctgagatttcatctgctctccttcctggagcccagaggagggcagcagaagggggtggtgtctccaaccccccagcactgaggaagaacggggctcttctcatttcacccctccctttctcccctgcccccaggactgggccacttctgggtggggcagtgggtcccagattggctcacactgagaatgtaagaactacaaacaaaatttctattaaattaaattttgtgtctc

SEQ ID NO: 113719 - DNA, 776 bp, Homo sapiens
  Payload ID: 2216
  Gene Symbol: CALR
  Gene Name: calreticulin
  ENST ID: ENST00000588454
  CDS Start-End: 36-776
aaagggcccgcgcgttgccgccccctcggcccgccatgctgctatccgtgccgctgctgctcggcctcctcggcctggccgtcgccgagcctgccgtctacttcaaggagcagtttctggacggagacgggtggacttcccgctggatcgaatccaaacacaagtcagattttggcaaattcgttctcagttccggcaagttctacggtgacgaggagaaagataaaggtcccgacatctgtggccctggcaccaagaaggttcatgtcatcttcaactacaagggcaagaacgtgctgatcaacaaggacatccgttgcaaggatgatgagtttacacacctgtacacactgattgtgcggccagacaacacctatgaggtgaagattgacaacagccaggtggagtccggctccttggaagacgattgggacttcctgccacccaagaagataaaggatcctgatgcttcaaaaccggaagactgggatgagcgggccaagatcgatgatcccacagactccaagcctgaggactgggacaagcccgagcatatccctgaccctgatgctaagaagcccgaggactgggatgaagagatggacggagagtgggaacccccagtgattcagaaccctgagtacaagggtgagtggaagccccggcagatcgacaacccagattacaagggcacttggatccacccagaaattgacaaccccgagtattctcccgatcccagtatctatgcctatgataactttggcgtgctgggc

SEQ ID NO: 113720 - DNA, 913 bp, Homo sapiens
  Payload ID: 2216
  Gene Symbol: CALR
  Gene Name: calreticulin
  ENST ID: ENST00000586760
  CDS Start-End: 1-491
cggaagactgggatgagcgggccaagatcgatgatcccacagactccaagcctgaggactgggacaagcccgagcatatccctgaccctgatgctaagaagcccgaggactgggatgaagagatggacggagagtgggaacccccagtgattcagaaccctgagtacaagggtgagtggaagccccggcagatcgacaacccagattacaagggcacttggatccacccagaaattgacaaccccgagtattctcccgatcccagtatctatgcctatgataactttggcgtgctgggcctggacctctggcaggtcaagtctggcaccatctttgacaacttcctcatcaccaacgatgaggcatacgctgaggagtttggcaacgagacgtggggcgtaacaaaggcagcagagaaacaaatgaaggacaaacaggacgaggagcagaggcctgagcgctcctgccgcagagctggccgcgccaaataatgtctctgtgagactcgagaactttcatttttttccaggctggttcggatttggggtggattttggttttgttcccctcctccactctcccccaccccctccccgcccttttttttttttttttttaaactggtattttatctttgattctccttcagccctcacccctggttctcatctttcttgatcaacatcttttcttgcctctgtccccttctctcatctcttagctcccctccaacctggggggcagtggtgtggagaagccacaggcctgagatttcatctgctctccttcctggagcccagaggagggcagcagaagggggtggtgtctccaaccccccagcactgaggaagaacggggctcttctcatttcacccctccctttctcccctgcccccaggactgggccacttct

SEQ ID NO: 113721 - DNA, 394 bp, Homo sapiens
  Payload ID: 2216
  Gene Symbol: CALR
  Gene Name: calreticulin
  ENST ID: ENST00000586967
  CDS Start-End: 1-41
aggaggaagatgtccccggccaggccaaggacgagctgtagagaggcctgcctccagggctggactgaggcctgagcgctcctgccgcagagctggccgcgccaaataatgtctctctcccctccaacctggggggcagtggtgtggagaagccacaggcctgagatttcatctgctctccttcctggagcccagaggagggcagcagaagggggtggtgtctccaaccccccagcactgaggaagaacggggctcttctcatttcacccctccctttctcccctgcccccaggactgggccacttctgggtggggcagtgggtcccagattggctcacactgagaatgtaagaactacaaacaaaatttctattaaattaaattttgtgtctc

SEQ ID NO: 113722 - DNA, 1292 bp, Homo sapiens
  Payload ID: 2217
  Gene Symbol: CALR3
  Gene Name: calreticulin 3
  Uniprot ID: Q96L12
  ENST ID: ENST00000269881
  CDS Start-End: 64-1218
agagccgcagagagagctgggagctaaggggtggcggcgaccggaagcgcagtgcacacccccatggcccgggctttggtccagctctgggccatatgcatgctgcgagtggcgctggctaccgtctatttccaagaggaatttctagacggagagcattggagaaaccgatggttgcagtccaccaatgactcccgatttgggcattttagactttcgtcgggcaagttttatggtcataaagagaaagataaaggtctgcaaaccactcagaatggccgattctatgccatctctgcacgcttcaaaccgttcagcaataaagggaaaactctggttattcagtacacagtaaaacatgagcagaagatggactgtggagggggctacattaaggtctttcctgcagacattgaccagaagaacctgaatggaaaatcgcagtactatattatgtttggacccgatatttgtggatttgatatcaagaaagttcatgttattttacatttcaagaataagtatcacgaaaacaagaaactgatcaggtgtaaggttgatggcttcacacacctgtacactctaattttaagaccagatctttcttatgatgtgaaaattgatggtcagtcaattgaatccggcagcatagagtacgactggaacttaacatcactcaagaaggaaacgtccccggcagaatcgaaggattgggaacagactaaagacaacaaagcccaggactgggagaagcattttctggacgccagcaccagcaagcagagcgactggaacggtgacctggatggggactggccagcgccgatgctccagaagcccccgtaccaggatggcctgaaaccagaaggtattcataaagacgtctggctccaccgtaagatgaagaataccgactatttgacgcagtatgacctctcagaatttgagaacattggtgccattggcctggagctttggcaggtgagatctggaaccatttttgataactttctgatcacagatgatgaagagtacgcagataattttggcaaggccacctggggcgaaaccaagggtccagaaagggagatggatgccatacaggccaaggaggaaatgaagaaggcccgcgaggaagaggaggaagagctgctgtcgggaaaaattaacaggcacgaacattacttcaatcaatttcacagaaggaatgaactttagtgatccccattggatataaggatgactggtaaaatctcattgctactttaatctatgtttcaaactcaaatgtc

SEQ ID NO: 113723 - DNA, 425 bp, Homo sapiens
  Payload ID: 2217
  Gene Symbol: CALR3
  Gene Name: calreticulin 3
  ENST ID: ENST00000600762
  CDS Start-End: 1-425
ctttggtccagctctgggccatatgcatgctgcgagtggcgctggctaccgtctatttccaagaggaatttctagacggagagcattggagaaaccgatggttgcagtccaccaatgactcccgatttgggcattttagactttcgtcgggcaagttttatggtcataaagagaaagataaaggacccgatatttgtggatttgatatcaagaaagttcatgttattttacatttcaagaataagtatcacgaaaacaagaaactgatcaggtgtaaggttgatggcttcacacacctgtacactctaattttaagaccagatctttcttatgatgtgaaaattgatggtcagtcaattgaatccggcagcatagagtacgactggaacttaacatcactcaagaaggaaacgtccccggcagaa

SEQ ID NO: 113724 - DNA, 1897 bp, Homo sapiens
  Payload ID: 2218
  Gene Symbol: CASQ1
  Gene Name: calsequestrin 1 (fast-twitch, skeletal muscle)
  Uniprot ID: P31415
  ENST ID: ENST00000368078
  CDS Start-End: 197-1387
acctgaccctttttcccttggctctgtcggcagtttctccaggacccagcagtgccctctgtccactgctctgggccattccccaatcccccctcccacttgagcccctaactcagaatctgggacccaggggcccctccctaccccagctaacctcttctggaccaggagagccaacccagatcccactacctccatgagtgctacagacaggatggggcccagagctgtgccgggtctgcggctggcactgctgttgctgctggtgctagggacacccaagtcaggggtacaggggcaggaagggctggacttccctgagtacgatggtgtggaccgtgtgatcaatgtcaatgcaaagaactacaagaatgtgttcaagaagtatgaggtgctggcactcctctaccatgaaccccccgaggatgacaaggcctcacaaagacaatttgagatggaggagctgatcctggagttagcagcccaagtcctagaagacaagggtgttggcttcgggctggtagactctgagaaggatgcagctgtggccaagaaactaggcctaactgaagtggacagcatgtatgtattcaagggagatgaagtcattgagtacgatggcgagttttctgctgacaccatcgtggagtttctgcttgatgtcctagaggaccctgtggaattgattgaaggtgaacgagagctgcaggcgtttgagaatattgaggatgagatcaaactcattggctacttcaagagcaaagactcagagcattacaaagccttcgaggatgcagctgaggagtttcatccctacatccccttcttcgccaccttcgacagcaaggtggcaaagaagctgaccctgaagctgaatgagattgatttctacgaggccttcatggaagagcctgtgaccatcccagacaagcccaatagcgaagaggagattgtcaacttcgtggaggagcacaggagatcaaccctgaggaaactgaagccggagagtatgtatgagacctgggaggatgatatggatggaatccacattgtggccttcgcagaggaagctgatcctgatggtttcgagttcttagagactctcaaggctgtggcccaagataacactgaaaacccagatcttagcatcatctggattgaccctgatgacttccccctgctggtcccatactgggagaagacgtttgacatcgacttgtcagccccacaaataggagtcgtcaatgttactgatgcggatagcgtatggatggaaatggacgatgaggaggacctgccttctgctgaggagctggaggactggctggaggatgtcctggagggcgagatcaacacagaggacgatgacgatgatgatgatgactagttgctatggcaaccatctttcagccccactggtcttttcatgctctctcctgccttcccttgtccttccctgagttcctccagggagactaggttattctctgccatagagctaactggggtctatatgctgggtgctgagacactgatccccctcatttgatgagcaaatgagctacttttccctagacaccaggccagctctctcttatctgacttctgtttcttatcccataacttacttgtatctattatgtgtctcttccatcactctccatactctttcttgtgattctcctctagccatatatatgggccccatctctgttctgttccctccatctatgcacagctttcccccactctctctaatcctgtatctttctgactgtcctgtccttggccagaaggaagggagaatactgtgtttgggactgtatctcagcaatcacttgttaatgtatttgggtcaaatgagaggcctcaataaagacatctggggcagcatgaa

SEQ ID NO: 113725 - DNA, 595 bp, Homo sapiens
  Payload ID: 2218
  Gene Symbol: CASQ1
  Gene Name: calsequestrin 1 (fast-twitch, skeletal muscle)
  ENST ID: ENST00000467691
  CDS Start-End: 125-478
acaagaatatatatggccaggcgcagtggctcacgcctgtaatcccagcactttgggaggctgaggcaggcagatcatctgaggtcaggagtttgagaccagcccgatcaacaaggaggatgatatggatggaatccacattgtggccttcgcagaggaagctgatcctgatggtttcgagttcttagagactctcaaggctgtggcccaagataacactgaaaacccagatcttagcatcatctggattgaccctgatgacttccccctgctggtcccatactgggagaagacgtttgacatcgacttgtcagccccacaaataggagtcgtcaatgttactgatgcggatagcgtatggatggaaatggacgatgaggaggacctgccttctgctgaggagctggaggactggctggaggatgtcctggagggcgagatcaacacagaggacgatgacgatgatgatgatgactagttgctatggcaaccatctttcagccccactggtcttttcatgctctctcctgccttcccttgtccttccctgagttcctccagggagactaggttattctctgccatagagctaact

SEQ ID NO: 113726 - DNA, 2674 bp, Homo sapiens
  Payload ID: 2219
  Gene Symbol: CASQ2
  Gene Name: calsequestrin 2 (cardiac muscle)
  Uniprot ID: O14958
  ENST ID: ENST00000261448
  CDS Start-End: 241-1440
tgcgtgcgtgcgtgcgtgcgtgtgtgtgtgtgtgtgcctctgctctttgtcctgagcccacgattccagagctggctggacccaaggaggtgaagagtcacttttcagccccaggaagggcaaagaagagagaaaatcagcctgtctgctctctccttggctcaacaaggcctctaacagtcttctgtcctctattctgcacacagcatatttgggaacgagaaacaaaagttttcccaaatgaagagaactcacttgtttattgtggggatttattttctgtcctcttgcagggcagaagaggggcttaatttccccacatatgatgggaaggaccgagtggtaagtctttccgagaagaacttcaagcaggttttaaagaaatatgacttgctttgcctctactaccatgagccggtgtcttcagataaggtcacgcaaaaacagttccaactgaaagaaatcgtgcttgagcttgtggcccaggtccttgaacataaagctataggctttgtgatggtggatgccaagaaagaagccaagcttgccaagaaactgggttttgatgaagaaggaagcctgtatattcttaagggtgatcgcacaatagagtttgatggcgagtttgcagctgatgtcttggtggagttcctcttggatctaattgaagacccagtggagatcatcagcagcaaactggaagtccaagccttcgaacgcattgaagactacatcaaactcattggctttttcaagagtgaggactcagaatactacaaggcttttgaagaagcagctgaacacttccagccttacatcaaattctttgccacctttgacaaaggggttgcaaagaaattatctttgaagatgaatgaggttgacttctatgagccatttatggatgagcccattgccatccccaacaaaccttacacagaagaggagctggtggagtttgtgaaggaacaccaaagacccactctacgtcgcctgcgcccagaagaaatgtttgaaacatgggaagatgatttgaatgggatccacattgtggcctttgcagagaagagtgatccagatggctacgaattcctggagatcctgaaacaggttgcccgggacaatactgacaaccccgatctgagcatcctgtggatcgacccggacgactttcctctgctcgttgcctactgggagaagactttcaagattgacctattcaggccacagattggggtggtgaatgtcacagatgctgacagtgtctggatggagattccagatgatgacgatcttccaactgctgaggagctggaggactggattgaggatgtgctttctggaaagataaacactgaagatgatgatgaagatgatgatgatgatgataattctgatgaagaggataatgatgacagtgatgacgatgatgatgaatagcccaactccaaacaattctgatgaaaacaaaatcacagcacccactaccatacagacagcacaaggtggcagcaagcaattctgccccacacccagccagctcctttcccttttccatcatctcttttcccactccctttgcgtcaggagcagcatcattcagcaaatgccttttcaaatgcagcaatcccacttagcagggacaggagaaaaattattcccatgttgactgtcttgactgtcacggaacagatcttgttctttgctggaccatcaagggtcatggcagtgcctgaacatggcagtctagggtgaacaatcccctaacacaagtttacttgtctttgattatgacagtaacaaaattgacagctttctaactcacaggcatagagtgaccttttaatcagagcccagggaagacacatgattaatgatttagctccctccatacctcgaacatcagttgggatccctcctccagccaagatgatccttcttagagaaggctcagccttggaagcaaacttataaatcatattctcatggctttgttaaacttatttcaagtgatggtcattcatatcactatgaacttggatattcaagcctttggatggctatggagagggcttgaaatgtgtacaggtgtcaccatcatttctagtatattaggaaactgggatgggaggttgatttgctctctaaacttccctctagttggcaagtctcacatattcatcagcaggagtggagggtgggggaaaactagaaagatgaaaacttttacatttttctgatgggttcatgtctctgattgggtcagctggcttcctagcctaagctgggatctgaataccccttctctgtagctgctagtgagccttcccatttagattaaagattgctttatccagcagtcaattaactctccagttatcagtactcccacaattggccagggcaacaataattggagttcatactgatgccctgaggcactgaaaaaaaaaaaaatcccaaagtgccttctgagctgtctaaaagttacattgtgcttggtagatttagtgttaagtgtgcagtataattttctaatttattttctcaatcttttagcacatgtgtaagacactgtgcaaattttttgaaaatagagcaatactttttgtggaatactagctaactaattctgtcattaaactcatattttgaaaatattcagacaatgttg

SEQ ID NO: 113727 - DNA, 4647 bp, Homo sapiens
  Payload ID: 2220
  Gene Symbol: CLSTN1
  Gene Name: calsyntenin 1
  Uniprot ID: O94985
  ENST ID: ENST00000361311
  CDS Start-End: 252-3167
gagagagagcgccgccgccatcttagttgctgccgctgccttcagcaagacgctgctctgaggcggggagggcgccgcgtcctgagcgcgcggcccagcgtcacggcggcggcggcggcggctcctccttggacccccggagctccccgcgccgcggagcagctagccccaggcccctagagccccgagagctccgagagctccgctcggcgtcccgcgcgcctccctgccgctcccgccccgggctggcgatgctgcgccgccccgctcccgcgctggccccggccgcccggctgctgctggccgggctgctgtgcggcggcggggtctgggccgcgcgagttaacaagcacaagccctggctggagcccacctaccacggcatagtcacagagaacgacaacaccgtgctcctcgaccccccactgatcgcgctggataaagatgcgcctctgcgatttgcaggtgagatttgtggatttaaaattcacgggcagaatgtcccctttgatgcagtggtagtggataaatccactggtgagggagtcattcgctccaaagagaaactggactgtgagctgcagaaagactattcattcaccatccaggcctatgattgtgggaagggacctgatggcaccaacgtgaaaaagtctcataaagcaactgttcatattcaggtgaacgacgtgaatgagtacgcgcccgtgttcaaggagaagtcctacaaagccacggtcatcgaggggaagcagtacgacagcattttgagggtggaggccgtggatgccgactgctcccctcagttcagccagatttgcagctacgaaatcatcactccagacgtgccctttactgttgacaaagatggttatataaaaaacacagagaaattaaactacgggaaagaacatcaatataagctgaccgtcactgcctatgactgtgggaagaaaagagccacagaagatgttttggtgaagatcagcattaagcccacctgcacccctgggtggcaaggatggaacaacaggattgagtatgagccgggcaccggcgcgttggccgtctttccaaatatccacctggagacatgtgacgagccagtcgcctcagtacaggccacagtggagctagaaaccagccacatagggaaaggctgcgaccgagacacctactcagagaagtccctccaccggctctgtggtgcggccgcgggcactgccgagctgctgccatccccgagtggatccctcaactggaccatgggcctgcccaccgacaatggccacgacagcgaccaggtgtttgagttcaacggcacccaggcagtgaggatcccggatggcgtcgtgtcggtcagccccaaagagccgttcaccatctcggtgtggatgagacatgggccattcggcaggaagaaggagacaattctttgcagttctgataaaacagatatgaatcggcaccactactccctctatgtccacgggtgccggctgatcttcctcttccgtcaggatccttctgaggagaagaaatacagacctgcagagttccactggaagttgaatcaggtctgtgatgaggaatggcaccactacgtcctcaatgtagaattcccgagtgtgactctctatgtggatggcacgtcccacgagcccttctctgtgactgaggattacccgctccatccatccaagatagaaactcagctcgtggtgggggcttgctggcaagagttttcaggagttgaaaatgacaatgaaactgagcctgtgactgtggcctctgcaggtggcgacctgcacatgacccagtttttccgaggcaatctggctggcttaactctccgttccgggaaactcgcggataagaaggtgatcgactgtctgtatacctgcaaggaggggctggacctgcaggtcctcgaagacagtggcagaggcgtgcagatccaagcacaccccagccagttggtattgaccttggagggagaagacctcggggaattggataaggccatgcagcacatctcgtacctgaactcccggcagttccccacgcccggaattcgcagactcaaaatcaccagcacaatcaagtgttttaacgaggccacctgcatttcggtccccccggtagatggctacgtgatggttttacagcccgaggagcccaagatcagcctgagtggcgtccaccattttgcccgagcagcttctgaatttgaaagctcagaaggggtgttccttttccctgagcttcgcatcatcagcaccatcacgagagaagtggagcctgaaggggacggggctgaggaccccacagttcaagaatcactggtgtccgaggagatcgtgcacgacctggatacctgtgaggtcacggtggagggagaggagctgaaccacgagcaggagagcctggaggtggacatggcccgcctgcagcagaagggcattgaagtgagcagctctgaactgggcatgaccttcacaggcgtggacaccatggccagctacgaggaggttttgcacctgctgcgctatcggaactggcatgccaggtccttgcttgaccggaagtttaagctcatctgctcagagctgaatggccgctacatcagcaacgaatttaaggtggaggtgaatgtaatccacacggccaaccccatggaacacgccaaccacatggctgcccagccacagttcgtgcacccggaacaccgctcctttgttgacctgtcaggccacaacctggccaacccccacccgttcgcagtcgtccccagcactgcgacagttgtgatcgtggtgtgcgtcagcttcctggtgttcatgattatcctgggggtatttcggatccgggccgcacatcggcggaccatgcgggatcaggacaccgggaaggagaacgagatggactgggacgactctgccctgaccatcaccgtcaaccccatggagacctatgaggaccagcacagcagtgaggaggaggaggaagaggaagaggaagaggaaagcgaggacggcgaagaagaggatgacatcaccagcgccgagtcggagagcagcgaggaggaggagggggagcagggcgacccccagaacgcaacccggcagcagcagctggagtgggatgactccaccctcagctactgacccgtgcccccggccacctcggtttctgctttcgaagactctgctgccatccgttctcccagtcccaagggtccacgatgtacaaagtcatttcggccagtaggtgtgcagacccctccccgccacgatcgtcgctgtgcttggtgtgtaggaccctaggctccccgcccaccctctgcctggtcgcgctcttcagtcccacgaggagctgacacgtcctctctggccgccatccggctcgcacaggggcctcccagcgcctcaggccccgcgtttgtgtctggagtctccccccggggagaggacactggcccctcgcactccagaaaagccatgccagctgggctcgttgacaaagggtaaaacatgctcactcccacccggtaatcatttttttctttttttaaaaaaagtttttattttttccaaactagtgcatgtataaataatggcaggatggggggtactgtgtagatgattaactgactttttaatattttgtaaataaatcggattccttgtgtcctttgtgctagtgtaacccgggactggaatgtaaagtgaagttcggagctctgagcacgggctcttcccgccgggtcctccctccccagaccccagagggagaggcccaccccgcccagccccgccccagcccctgctcaggtctgagtatggctgggagtcgggggccacaggcctctagctgtgctgctcaagagactggatcagggtagctacaagtggccgggccttgcctttgggattctacctgttcctaatttggtgtggggtgcggggtccctggccccttttccacactcctcctccgacagcagctccctgggcagtggcctggtctcaccgtgtgcagccttgtggtttatgcttaaatgtacattttcctgctggtaaaaggagaaactgagaggtgtcctgcagaccggctgaccactccttttggagacggcaggaggcctgagcgatccgtactcagaacgtccaggagagacgcatggcccgaagtcaaagtgctggaattttccaaaacagcctgttctctcctctctcctccccagagcaccccctgccatcaggggggttgaaatccctctcccccaggagccctgctgctttgcttggtggtagggcaggagagcaaacaaacagtcatggtctaaaacccacatagcactttgctcttagttacatgtaaaattttagatttctaaaacaggtgggcaatcattttgaatactgttctgtgaccctgactgctagttctgaggacactggtggctgtgctatgtgtggccatcctccatgtcccgtccctgtagctgctctgtttagacagcggacagacgctcacgcccaggggatgtcctcacgctgtcgccgcgcggtttcccttcgcagatgtgtatactcatgataggtcagaaagtgtatccgctacaataaagttctggttctaact

SEQ ID NO: 113728 - DNA, 5221 bp, Homo sapiens
  Payload ID: 2220
  Gene Symbol: CLSTN1
  Gene Name: calsyntenin 1
  Uniprot ID: O94985
  ENST ID: ENST00000377298
  CDS Start-End: 794-3739
gtctcctggaccccctttcgtgacccctctcaacacctctactggggagacgaggaccccgaggttctggggggcgacgcgacctgcccgaagtgacaagggtcctgggccgcactgctccgccggggtctgcgctcctcggcggagcgggtgggaaggatgagtcctcggggtggagaaggaggagcgggtccccgggtaccgctcacccggccttaggagcccgggagcgcgcgtagggacgcggagttgaggctctccatctgcggccagggaaagggatacagtcccccgggcccctcccggccgctcggaacccaccccaggcgcgtccccgcgggcgcgcgctccaggcggggccgacgggctcggaggcgcgcgcccgctgccgggtccgccgcgcgcgctccctccgctcctctcccccgcccctcccgggcccgcgcgctcccagggtccgccgcgcgcgcgcctcgcgtcgctccccatccccgcccctcccgccgccaccccgcccccggccgggtaccctcgccggacccgagagagagcgccgccgccatcttagttgctgccgctgccttcagcaagacgctgctctgaggcggggagggcgccgcgtcctgagcgcgcggcccagcgtcacggcggcggcggcggcggctcctccttggacccccggagctccccgcgccgcggagcagctagccccaggcccctagagccccgagagctccgagagctccgctcggcgtcccgcgcgcctccctgccgctcccgccccgggctggcgatgctgcgccgccccgctcccgcgctggccccggccgcccggctgctgctggccgggctgctgtgcggcggcggggtctgggccgcgcgagttaacaagcacaagccctggctggagcccacctaccacggcatagtcacagagaacgacaacaccgtgctcctcgaccccccactgatcgcgctggataaagatgcgcctctgcgatttgcagagagttttgaggtgacagtcaccaaagaaggtgagatttgtggatttaaaattcacgggcagaatgtcccctttgatgcagtggtagtggataaatccactggtgagggagtcattcgctccaaagagaaactggactgtgagctgcagaaagactattcattcaccatccaggcctatgattgtgggaagggacctgatggcaccaacgtgaaaaagtctcataaagcaactgttcatattcaggtgaacgacgtgaatgagtacgcgcccgtgttcaaggagaagtcctacaaagccacggtcatcgaggggaagcagtacgacagcattttgagggtggaggccgtggatgccgactgctcccctcagttcagccagatttgcagctacgaaatcatcactccagacgtgccctttactgttgacaaagatggttatataaaaaacacagagaaattaaactacgggaaagaacatcaatataagctgaccgtcactgcctatgactgtgggaagaaaagagccacagaagatgttttggtgaagatcagcattaagcccacctgcacccctgggtggcaaggatggaacaacaggattgagtatgagccgggcaccggcgcgttggccgtctttccaaatatccacctggagacatgtgacgagccagtcgcctcagtacaggccacagtggagctagaaaccagccacatagggaaaggctgcgaccgagacacctactcagagaagtccctccaccggctctgtggtgcggccgcgggcactgccgagctgctgccatccccgagtggatccctcaactggaccatgggcctgcccaccgacaatggccacgacagcgaccaggtgtttgagttcaacggcacccaggcagtgaggatcccggatggcgtcgtgtcggtcagccccaaagagccgttcaccatctcggtgtggatgagacatgggccattcggcaggaagaaggagacaattctttgcagttctgataaaacagatatgaatcggcaccactactccctctatgtccacgggtgccggctgatcttcctcttccgtcaggatccttctgaggagaagaaatacagacctgcagagttccactggaagttgaatcaggtctgtgatgaggaatggcaccactacgtcctcaatgtagaattcccgagtgtgactctctatgtggatggcacgtcccacgagcccttctctgtgactgaggattacccgctccatccatccaagatagaaactcagctcgtggtgggggcttgctggcaagagttttcaggagttgaaaatgacaatgaaactgagcctgtgactgtggcctctgcaggtggcgacctgcacatgacccagtttttccgaggcaatctggctggcttaactctccgttccgggaaactcgcggataagaaggtgatcgactgtctgtatacctgcaaggaggggctggacctgcaggtcctcgaagacagtggcagaggcgtgcagatccaagcacaccccagccagttggtattgaccttggagggagaagacctcggggaattggataaggccatgcagcacatctcgtacctgaactcccggcagttccccacgcccggaattcgcagactcaaaatcaccagcacaatcaagtgttttaacgaggccacctgcatttcggtccccccggtagatggctacgtgatggttttacagcccgaggagcccaagatcagcctgagtggcgtccaccattttgcccgagcagcttctgaatttgaaagctcagaaggggtgttccttttccctgagcttcgcatcatcagcaccatcacgagagaagtggagcctgaaggggacggggctgaggaccccacagttcaagaatcactggtgtccgaggagatcgtgcacgacctggatacctgtgaggtcacggtggagggagaggagctgaaccacgagcaggagagcctggaggtggacatggcccgcctgcagcagaagggcattgaagtgagcagctctgaactgggcatgaccttcacaggcgtggacaccatggccagctacgaggaggttttgcacctgctgcgctatcggaactggcatgccaggtccttgcttgaccggaagtttaagctcatctgctcagagctgaatggccgctacatcagcaacgaatttaaggtggaggtgaatgtaatccacacggccaaccccatggaacacgccaaccacatggctgcccagccacagttcgtgcacccggaacaccgctcctttgttgacctgtcaggccacaacctggccaacccccacccgttcgcagtcgtccccagcactgcgacagttgtgatcgtggtgtgcgtcagcttcctggtgttcatgattatcctgggggtatttcggatccgggccgcacatcggcggaccatgcgggatcaggacaccgggaaggagaacgagatggactgggacgactctgccctgaccatcaccgtcaaccccatggagacctatgaggaccagcacagcagtgaggaggaggaggaagaggaagaggaagaggaaagcgaggacggcgaagaagaggatgacatcaccagcgccgagtcggagagcagcgaggaggaggagggggagcagggcgacccccagaacgcaacccggcagcagcagctggagtgggatgactccaccctcagctactgacccgtgcccccggccacctcggtttctgctttcgaagactctgctgccatccgttctcccagtcccaagggtccacgatgtacaaagtcatttcggccagtaggtgtgcagacccctccccgccacgatcgtcgctgtgcttggtgtgtaggaccctaggctccccgcccaccctctgcctggtcgcgctcttcagtcccacgaggagctgacacgtcctctctggccgccatccggctcgcacaggggcctcccagcgcctcaggccccgcgtttgtgtctggagtctccccccggggagaggacactggcccctcgcactccagaaaagccatgccagctgggctcgttgacaaagggtaaaacatgctcactcccacccggtaatcatttttttctttttttaaaaaaagtttttattttttccaaactagtgcatgtataaataatggcaggatggggggtactgtgtagatgattaactgactttttaatattttgtaaataaatcggattccttgtgtcctttgtgctagtgtaacccgggactggaatgtaaagtgaagttcggagctctgagcacgggctcttcccgccgggtcctccctccccagaccccagagggagaggcccaccccgcccagccccgccccagcccctgctcaggtctgagtatggctgggagtcgggggccacaggcctctagctgtgctgctcaagagactggatcagggtagctacaagtggccgggccttgcctttgggattctacctgttcctaatttggtgtggggtgcggggtccctggccccttttccacactcctcctccgacagcagctccctgggcagtggcctggtctcaccgtgtgcagccttgtggtttatgcttaaatgtacattttcctgctggtaaaaggagaaactgagaggtgtcctgcagaccggctgaccactccttttggagacggcaggaggcctgagcgatccgtactcagaacgtccaggagagacgcatggcccgaagtcaaagtgctggaattttccaaaacagcctgttctctcctctctcctccccagagcaccccctgccatcaggggggttgaaatccctctcccccaggagccctgctgctttgcttggtggtagggcaggagagcaaacaaacagtcatggtctaaaacccacatagcactttgctcttagttacatgtaaaattttagatttctaaaacaggtgggcaatcattttgaatactgttctgtgaccctgactgctagttctgaggacactggtggctgtgctatgtgtggccatcctccatgtcccgtccctgtagctgctctgtttagacagcggacagacgctcacgcccaggggatgtcctcacgctgtcgccgcgcggtttcccttcgcagatgtgtatactcatgataggtcagaaagtgtatccgctacaataaagttctggttctaactaa

SEQ ID NO: 113729 - DNA, 3829 bp, Homo sapiens
  Payload ID: 2220
  Gene Symbol: CLSTN1
  Gene Name: calsyntenin 1
  ENST ID: ENST00000435891
  CDS Start-End: 1-2349
agcattttgagggtggaggccgtggatgccgactgctcccctcagttcagccagatttgcagctacgaaatcatcactccagacgtgccctttactgttgacaaagatggttatataaaaaacacagagaaattaaactacgggaaagaacatcaatataagctgaccgtcactgcctatgactgtgggaagaaaagagccacagaagatgttttggtgaagatcagcattaagcccacctgcacccctgggtggcaaggatggaacaacaggattgagtatgagccgggcaccggcgcgttggccgtctttccaaatatccacctggagacatgtgacgagccagtcgcctcagtacaggccacagtggagctagaaaccagccacatagggaaaggctgcgaccgagacacctactcagagaagtccctccaccggctctgtggtgcggccgcgggcactgccgagctgctgccatccccgagtggatccctcaactggaccatgggcctgcccaccgacaatggccacgacagcgaccaggtgtttgagttcaacggcacccaggcagtgaggatcccggatggcgtcgtgtcggtcagccccaaagagccgttcaccatctcggtgtggatgagacatgggccattcggcaggaagaaggagacaattctttgcagttctgataaaacagatatgaatcggcaccactactccctctatgtccacgggtgccggctgatcttcctcttccgtcaggatccttctgaggagaagaaatacagacctgcagagttccactggaagttgaatcaggtctgtgatgaggaatggcaccactacgtcctcaatgtagaattcccgagtgtgactctctatgtggatggcacgtcccacgagcccttctctgtgactgaggattacccgctccatccatccaagatagaaactcagctcgtggtgggggcttgctggcaaggtggcgacctgcacatgacccagtttttccgaggcaatctggctggcttaactctccgttccgggaaactcgcggataagaaggtgatcgactgtctgtatacctgcaaggaggggctggacctgcaggtcctcgaagacagtggcagaggcgtgcagatccaagcacaccccagccagttggtattgaccttggagggagaagacctcggggaattggataaggccatgcagcacatctcgtacctgaactcccggcagttccccacgcccggaattcgcagactcaaaatcaccagcacaatcaagtgttttaacgaggccacctgcatttcggtccccccggtagatggctacgtgatggttttacagcccgaggagcccaagatcagcctgagtggcgtccaccattttgcccgagcagcttctgaatttgaaagctcagaaggggtgttccttttccctgagcttcgcatcatcagcaccatcacgagagaagtggagcctgaaggggacggggctgaggaccccacagttcaagaatcactggtgtccgaggagatcgtgcacgacctggatacctgtgaggtcacggtggagggagaggagctgaaccacgagcaggagagcctggaggtggacatggcccgcctgcagcagaagggcattgaagtgagcagctctgaactgggcatgaccttcacaggcgtggacaccatggccagctacgaggaggttttgcacctgctgcgctatcggaactggcatgccaggtccttgcttgaccggaagtttaagctcatctgctcagagctgaatggccgctacatcagcaacgaatttaaggtggaggtgaatgtaatccacacggccaaccccatggaacacgccaaccacatggctgcccagccacagttcgtgcacccggaacaccgctcctttgttgacctgtcaggccacaacctggccaacccccacccgttcgcagtcgtccccagcactgcgacagttgtgatcgtggtgtgcgtcagcttcctggtgttcatgattatcctgggggtatttcggatccgggccgcacatcggcggaccatgcgggatcaggacaccgggaaggagaacgagatggactgggacgactctgccctgaccatcaccgtcaaccccatggagacctatgaggaccagcacagcagtgaggaggaggaggaagaggaagaggaagaggaaagcgaggacggcgaagaagaggatgacatcaccagcgccgagtcggagagcagcgaggaggaggagggggagcagggcgacccccagaacgcaacccggcagcagcagctggagtgggatgactccaccctcagctactgacccgtgcccccggccacctcggtttctgctttcgaagactctgctgccatccgttctcccagtcccaagggtccacgatgtacaaagtcatttcggccagtaggtgtgcagacccctccccgccacgatcgtcgctgtgcttggtgtgtaggaccctaggctccccgcccaccctctgcctggtcgcgctcttcagtcccacgaggagctgacacgtcctctctggccgccatccggctcgcacaggggcctcccagcgcctcaggccccgcgtttgtgtctggagtctccccccggggagaggacactggcccctcgcactccagaaaagccatgccagctgggctcgttgacaaagggtaaaacatgctcactcccacccggtaatcatttttttctttttttaaaaaaagtttttattttttccaaactagtgcatgtataaataatggcaggatggggggtactgtgtagatgattaactgactttttaatattttgtaaataaatcggattccttgtgtcctttgtgctagtgtaacccgggactggaatgtaaagtgaagttcggagctctgagcacgggctcttcccgccgggtcctccctccccagaccccagagggagaggcccaccccgcccagccccgccccagcccctgctcaggtctgagtatggctgggagtcgggggccacaggcctctagctgtgctgctcaagagactggatcagggtagctacaagtggccgggccttgcctttgggattctacctgttcctaatttggtgtggggtgcggggtccctggccccttttccacactcctcctccgacagcagctccctgggcagtggcctggtctcaccgtgtgcagccttgtggtttatgcttaaatgtacattttcctgctggtaaaaggagaaactgagaggtgtcctgcagaccggctgaccactccttttggagacggcaggaggcctgagcgatccgtactcagaacgtccaggagagacgcatggcccgaagtcaaagtgctggaattttccaaaacagcctgttctctcctctctcctccccagagcaccccctgccatcaggggggttgaaatccctctcccccaggagccctgctgctttgcttggtggtagggcaggagagcaaacaaacagtcatggtctaaaacccacatagcactttgctcttagttacatgtaaaattttagatttctaaaacaggtgggcaatcattttgaatactgttctgtgaccctgactgctagttctgaggacactggtggctgtgctatgtgtggccatcctccatgtcccgtccctgtagctgctctgtttagacagcggacagacgctcacgcccaggggatgtcctcacgctgtcgccgcgcggtttcccttcgcagatgtgtatactcatgataggtcagaaagtgtatccgctacaataaagttctggttctaact

SEQ ID NO: 113730 - DNA, 14202 bp, Homo sapiens
  Payload ID: 2221
  Gene Symbol: CLSTN2
  Gene Name: calsyntenin 2
  Uniprot ID: Q9H4D0
  ENST ID: ENST00000458420
  CDS Start-End: 191-3058
agtgagcgcggctgctgccggcgagctagcggcgcagcggcgggaacccgaggccgagcgccgcggcggcagcgctagaagcgcacccatcgggcacggcgaggcggcccacggtgcggcaggcaccgggaggcgagagccggcgcggacagtaggcggcggctgcagctcgttggcggctgctgcgaggatgctgcctgggcggctgtgctgggtgccgctcctgctggcgctgggcgtggggagcggcagcggcggtggcggggacagccggcagcgccgcctcctcgcggctaaagtcaataagcacaagccatggatcgagacttcatatcatggagtcataactgagaacaatgacacagtcattttggacccaccactggtagccctggataaagatgcaccggttccttttgcaggggaaatctgtgcgttcaagatccatggccaggagctgccctttgaggctgtggtgctcaacaagacatcaggagagggccggctccgtgccaagagccccattgactgtgagttgcagaaggagtacacattcatcatccaggcctatgactgtggtgctgggccccacgagacagcctggaaaaagtcacacaaggccgtggtccatatacaggtgaaggatgtcaacgagtttgctcccaccttcaaagagccagcctacaaggctgttgtgacggagggcaagatctatgacagcattctgcaggtggaggccattgacgaggactgctccccacagtacagccagatctgcaactatgaaatcgtcaccacagatgtgccttttgccatcgacagaaatggcaacatcaggaacactgagaagctgagctatgacaaacaacaccagtatgagatcctggtgaccgcctacgactgtggacagaagcccgctgctcaggacaccctggtgcaggtggatgtgaagccagtttgcaagcctggctggcaagactggaccaagaggattgagtaccagcctggctccgggagcatgcccctgttccccagcatccacctggagacgtgcgatggagccgtgtcttccctccagatcgtcacagagctgcagactaattacattgggaagggttgtgaccgggagacctactctgagaaatcccttcaaaagttatgtggagcctcctctggcatcattgacctcttgccatcccctagcgctgccaccaactggactgcaggactgctggtggacagcagtgagatgatcttcaagtttgacggcaggcagggtgccaaagtccccgatgggattgtgcccaagaacctgaccgatcagttcaccatcaccatgtggatgaaacacggccccagccctggtgtgagagccgagaaggaaaccatcctctgcaactcagacaaaaccgaaatgaaccggcatcactatgccctgtatgtgcacaactgccgcctcgtctttctcttgcggaaggacttcgaccaggctgacacctttcgccccgcggagttccactggaagctggatcagatttgtgacaaagagtggcactactatgtcatcaatgtggagtttcctgtggtaaccttatacatggatggagcaacatatgaaccatacctggtgaccaacgactggcccattcatccatctcacatagccatgcaactcacagtcggcgcttgttggcaaggaggagaagtcaccaaaccacagtttgctcagttctttcatggaagcctggccagtctcaccatccgccctggcaaaatggaaagccagaaggtgatctcctgcctgcaggcctgcaaggaagggctggacattaattccttggaaagccttggccaaggaataaagtatcacttcaacccctcgcagtccatcctggtgatggaaggtgacgacattgggaacattaaccgtgctctccagaaagtctcctacatcaactccaggcagttcccaacggcgggtgtgcggcgcctcaaagtatcctccaaagtccagtgctttggggaagacgtatgcatcagtatccctgaggtagatgcctatgtgatggtcctccaggccatcgagccccggatcaccctccggggcacagaccacttctggagacctgctgcccagtttgaaagtgccaggggagtgaccctcttccctgatatcaagattgtgagcaccttcgccaaaaccgaagcccccggggacgtgaaaaccacagaccccaaatcagaagtcttagaggaaatgcttcataacttagatttctgtgacattttggtgatcggaggggacttggacccaaggcaggagtgcttggagctcaaccacagtgagctccaccaacgacacctggatgccactaattctactgcaggctactccatctacggtgtgggctccatgagccgctatgagcaggtgctacatcacatccgctaccgcaactggcgtccggcttcccttgaggcccggcgtttccggattaagtgctcagaactcaatgggcgctacactagcaatgagttcaacttggaggtcagcatccttcatgaagaccaagtctcagataaggagcatgtcaatcatctgattgtgcagcctcccttcctccagtctgtccatcatcctgagtcccggagtagcatccagcacagttcagtggtcccaagcattgccacagtggtcatcatcatctccgtgtgcatgcttgtgtttgtcgtggccatgggtgtgtaccgggtccggatcgcccaccagcacttcatccaggagactgaggctgccaaggaatctgagatggactgggacgattctgcgctgactatcacagtcaaccccatggagaaacatgaaggaccagggcatggggaagatgagactgagggagaagaggaggaagaagccgaggaagaaatgagctccagcagtggctctgacgacagcgaagaggaggaggaggaggaagggatgggcagaggcagacatgggcagaatggagccaggcaagcccagctggagtgggatgactccaccctcccctactagtgcccaggggtctgctgcctggcccacatgtcccttttgtaaaccctgacccagtgtatgcccatgtctatcatacctcacctctgatgtctgtgacatgtctgggaaggccttctccagcttcctggagcccaccctttaagccttgggcactccctgtgtttcatccatggggaagttccaagaagcccagcatggccatcagtgaggacttcagggtagactttgtcctgtagcctccacttctgccctaagttccccagcatcctgactacctgtctgcagagtttgcctttgttttttcctgcagggaagaaggcccacctttgtgtcactcacctccccaggctcagagtccccaaggccctggggttccaactcactgtgcgtctcctccacacagaccagtaggttctcctatgctgactccaggttgcttcatacaaggagggtggttgaacttcacacacgtaaggtcttagtgcttaacagtttaaaggaaagtccttgttgaggcagaactaagtttacagggaaaggtacacacattctctctctctctctctctctgtctatctagttccccagcttggagagcctttccccttgcttctttctgaggccatataagcttataagaaaagtcccaaaccaagaataggtccttggccacaagcagggtctgatcccccatcagagctatctgagcctgcctgtctgggcacctgctgcaaccatgcagctaccctgccaggggcactcagcaaacagaaccacagggcccaggaggcattccacacaggcactgccccaggacaacacaacaaggacagtcacaacaaggacaacaaggacacaacacaacacacaacaaggacagtcacaacaagcctagagccagaaagcagatggaaatgctaatgaggtcaaacgtaggcttcatggtgggtggagtgggggtggctgggctcccccaggacagaggggaccctgaggttggcaaggctctcaccactcagccttatggtcccttatctcctatcttccctcttgagaaaatacacgctttctgcatgtattagaaacgcacgagctccaccaagtctacaatgaaagtttgaaatttaactgcaaggaattagaagcatatttgcaatcattgcagcttcttctttcttctgctcataaaaggaggaacactttagatagagggcaaatatatctgaaaacctaatttctttctttttttgataaggaaatcttttccatctccatcctaacatgcacaacctgtgaagagaattgtttctatagtaactggtctgtgatcttttgtggccaagagaatagcaggcaagaattagggccttgacagaatttccacgaagctctgagaacatgtttgtttcgaatgtctgattcctctttgtcatcaatgtgtatgctctgtccccatccttcactcctcctcaagctcacaccaattggtttggcacaggcacagagctggtccctagttaagtggcatttatgttaaaaaaaaatagttcagaatctcagccttttctttgtgtcatcaaaacagcttaagaaggggactactgccaatgtcctctagtctgacctccacccagggaggacccatggcaggtcttttcaactttctgattcatgagaacaaccttgtgaagcttttcccacctcctaaagtgttttctgcatctgttccttcctttggacctcacaacaaatcctgtgaagtaactgagacatctgttgttagatacatttttgtgatgagtaaactgaggcttcgtgattcaatgtcttgttcagagtcattcaaaagtatagacaagaccagtctccccaacttccactcctggtgcaggattctacttatgttcataggtatgcacctaacagacactgctgcaaacctactatgtgctaagcatcctaccaatagctgtgagaaaaagaaaagctgaataagataagctccttccctacattatatttgcagacgggaaataaacaggcctagaaattacacaagagacaaatgaagaggaagagaagtcacaagagaagaaggatgcggtcacaaacttaaccagtgctcttatttttcccttctcagggaaaaacaccagaagaagctggggttttatattcattggatggaaacagatatttctcctgggaattctcccaaccaaatagcccttttctattaggctgtgtctgtacatccacaagaggaaagtctataggactgattagttttcacaatcccatttaaataaaaaaaagatctttagttgggcatttaggagcaactgaattctcccaaaattgtggcagcaaaaagaacacttcatatgcttaaaacccattctttttgaattagattttgattttaaatatttaagtctggtgtttgtgagaacacttttctctttgctcagtcttttcgatctggttgggtagggaaggtgttcctcatgctctctgggtggctgccttattcatagttgagagagctgttaggtaaaatctttatatgtgttggggtttttttggtagggggggtagcaggtaaaggtggcccatggctagggcagcaaagatgaataatttgaggaagcatttggttggtggactcatttgcagagaaacagtggtgacaacaaatcagagctgtttccctcaactctggctataagaggtcattctctgcatgtcagctacaaagatcaggcacttgaatgaatccgctgggttggcaggcattggtcatcttcgcaacaccctcttcctcaccatggatgagaacaagacgggagtggttatatcccagtaacagaagctttgggaggtatccaggtgagcagggtaatgtggcttgccctcccccagatattctgatcccaagaaaaaggtgtcattaatcagtctggcattttccaccctccatatgctggcatccaggaaccaaaacccctgaaggcctagacaccctatgacctctaactgagatgttggcagccaggcagatgcaggctcatgtccaggaggaactgctgactggtttggccacagcccagttcattgcttgtcttgccaagtggacaaccagattctgccttcctgagcttgaaaataggctacaactctcaggtgattcagatgacatggaggagaagttggaggagaagattgaaatgcttaaatcccagtgcagaatgagttgcttcagtggagtaaagcaaccggctagttggtagcctgccttaaaaaatactaaacatatatcatcatacatttgatcaaatgctgtaagcacagccaaggcccaaattcatctagataccaaaaatgtgatttcagtgaaatctcttttcattgccgctttcttttgttgttgtttgttttttgagccagagtcttgctgctctgtcacccaggctggagtgcagtggcacaatctcagctcactgcaacctccacctcccgggttcaagcgagtttcctgcctcagactcccgagtagctgggattacaggcatccaccaccatgcccagctaatttttgtatttttagtagagacagggcttcaccgtgttggccaggctggtctcaaactcctgatctcaggtgatctgcccaccttggcctccaaggtaatgagattataggagtgagccaccgcacccagccctcattaccactttcttgaatttactcaatcatcctatcaagcagggtttagaccaacatctttgcatttaataagggctctactttgtatacatggaccatccagtgagagagctgggggtggtgagaagcaatgtcccccattcctatatgtcaggtgtcagcaaactatctgtaaagaggcaaatagtaaatattttgggctttgtgagccatttggtacctgtcacagaatagtcagccctccatatctgaggtttccaaatccatggattcaaccaaccttgaatcaaaaatatttgggaaaaaatgtatagttgcaactgacctgaacatattctttttttcattattattccttgaacaatacagtttaacaggatttacatagcatttacactgtattaggtattataagtaacctagagatgatttgaagaacacaggaagttgtgcataggctatatgcaaatactatgcattttatataaaggaattgaacatctgtggattttggtgtccgaggggagttctggaaccaatcccctacagatactgagggatgactgtactcagctctcctattgtagcatgaaaacagacaatacgtacaacaaatgaatgtttcaatacaactttatctagtttccataaaacaatttaaaaacactaaaaaagcaggcagtttggatttatgtaattttcatatctttttttacccttttgatttacatttttaataatttaaaaatataaaaaccttcctcagcccacaggccatacgaaaattagcagccagctagatttggcccaaggccaaagtttggcaacccgtaccatacaccatggaagttagccttccacctcaggagaaagcaagctgctctcataagcctctcaccaactacccagtagtctttgcctccaaactgaacaacaggaaaaagtgccatagtttttaattaagctgttttaaaagtccatgttccgggggaaaacaaaaaagaaacaaacaaaacacttgttatttgctgaactgacaaactgacagatattccacgagagttgaaagccttggatcgaggtgattgcctggttactgagtgctaactccactgaggcaagtgttagccccccaaggctcagtgccttcccagcacagctcagcccataatgatctctgagcaggagtgttcattatctcagactgattttcatttcagccctactcttgccattgctctaaaaatgatcctaaagacttgtgactgtttgaatcaatagcaacatcatcagtagaaagcccgaccaagcacacttcgaaattagcaatcttcttggctctatggctcaatatcagcaagaagaaaaaaagacaactttttttttaatcatccccacatttaaattaaccaaatagtttttacaaaaaagtaggtaagtgggtttaattctttgaaagtatttgccagtgaaaagtagatgatttttaggtaagataacgtttaggcctctgggggatccccaaagccttctgcaatgtactctggcaggctatgaatggtacaggattctgcatctatatgagacatttattgaggctgacaagcaaaagcccttggcacaatttaattttcacataaccactttccattgtccagctgcaggcaaaagaaatgagcaatgaaagttttgaagtctaccccagtaccctcatttcctgtctttatttcctttactttatagatgtattctatacctgctatgtagataatgctctagttttccctttagtgccaactggaaaaggagagttggctttacaggggctgtggattaagagccaggcttcattccatcccagggagacaaaaagagacagaagaagttacctccagcagcaccccagaaagctgacagatattccctgtatgcaggtagtaaacagatgggagtctgtgtttgcagctatgttcagtgtaattcagcagaccttcactgggcacttgtgatgggtcaggccctgtgccagcaacaggggaagggaggatgaacaaggcatgtttccctgaccatgaggagctcttggcctgtgagctgttgggatgtccctttgtggtgttggaagctgtgcacgagcagtcaggactttggggacagaagtttagtgttagggaggcagggtaacttgctttgacagctacccaccctaagtcagatgacaggtgtaattctaggggccctgatatgcatcactgaggcagactgaggagctctccagggaagtaggcaatatttccctgaatattcctcaattccaatcaaggctgactcagttcacttatggatgaaagccagttaccctgcccactgggcagaaataacatggttgacagctgacattcagagaaaataagacagaagcagtccttaaatataaacagcagccaggtggacctggaaatttaggaagggtgatgcaggtagaggggccagcaggagccaagtctcaaaaggcacaagccagactgatgcaagggagccctcctgaggcccaacatcagagctgaagatctaaggagggcccacctccacgagacctgctgagggcttacatttggtgctgaggagcagtggttccctgggccagctgcatcacctgggaacatgtgagaagtgcatattcttgggccccaccccagacctactgaatgagaagctctggaggcaggcagtctgtgatttaatgagctttctgacacacactaaagtttgagaaccactgatgcagaggatgaggagatgacttgagctggcatcgggaagaactgactattaactaacaaggtaaaatcaatgactagtgcagtgagggtgccaaagcaaaccacccccagcccccatcctgggcctttttggctccagtttatactcactgaagcagtggtttcaaggaaccttggtcctagtccgcatccttcacctgcccttgggcatgagacaattcctgcctgcctgccccttctatcctagagagagagactgcccaggagaggctgccatgaggtcactcatccccaggaaggccacctgccaggtttctgtaagctgagcagcctcttcgagggccatattttgtggagaaacactgaaactgcagcagtgaccctggtcactaggagagctgctttctacacagcctgtatgctggtggagacacccagggcctggcagagtgtggagggggtcatttaaggacgttgccaggttgccgcagcactgctctgtttgtttgtaatgagactggggcatgcagcatcacaattcaaacactgaattgcttggggaatggatggccttccttggaagggcagtaactcattctggatgttactaaaagtagaaaacaaaaatccaaaaacaaacctacagcctcatttacaattagaatctgtctgggccttctgatttctaaagtctgtgaggctgccaggattcaccaattctcctttcccctgaggcccagcaactattgatttatagcttaaactctgtgaaggtccacagacctttgaaaggaacttgctggtactttgtcagtcgtgtacacctaactgactcctcctacgaggtacagtctcctcatacaaggggttttgagatggagagtcagagggccagggccctgggctttggggtggaaggacagaagagtagcagtctaggaaagggactagacatgtagcctaggaaaactagcaccatctgttgagttctgaagaacccagattctctcctgctcacagcctcagcagtcttttcagagtcctcctgaatggcccaaagacacccctgtttctggggaacagaagggagctggtacctctggaccattgaggcaacacctccccagaggcaggaccccgcccccatgagaacatgcagttgaatgatgtggtgcctggccaggaccttggaaaacgtggccatgtgagactagtatagatctccaactattgctgcctctgctgatatggccacctccttaaggtaagaagactaccgacttagctattgtggcaccacgggagcctagcactgcacctggcccatgacatgtgtgccacaaatgttgaattgaattgaatcccagagatcacttgacctcagtgaagggactgggtttgaagaattaagaccccccagtggagaaagcctcctccaacttccttctcggtttgtgagtcaaggtcctttgtaaaatcagatcgacgagggtggaagtgcagtgaacagaggacaacatttgtgatgcacgtgggagaaaacaggagtggggttgtttggggactaccccttcctagctatagtcagtaaatggagcccctaagcaaggagcaggggtagatgtgcctgggtgaggcctgcttgctccaccgtcgaggtcatgggcagcatcccaactgaggagagaaaaccctaatttgttaatgacccagccttgtgctgctctccagttcctttcatcagatttactgcagagcagattcatcaacatgaagttcaattcccagtagactaatgaaaagagggcaacagacttgagaagagccaaaatgcagacagtgtgtattaatcacagacaacagaaacgtgttagctttaatgtctgtttgcttttatcttgaaatgaaaatgcatctctgttacctggaccctttttactgcacatttcagaacagaaatgggacacccacacacgtattgagggtccttttccccggcaggaggagctaccagagaaatgagcccacattttgtgtgcagagagaatcaacccacaggtctcagctgcagactccagcacctctgcagagaaggcaggcaaagggatgaggaggtagcatctcctcttcagaaggattcataagggcctctgtgaggagggccttgcttgtgcctgtgggtcatggatgttaatataaaggctcatccacccttggtggcaaaagtgcatccatcctggccaatatagaacactcacatctggagcccacgcccacccacctccagctcctctacatggctgcaagagcatggctgatgtgtgggattcagaagaggtctgctcatgttcactagccaaactttaggtggtgtgatacagcaaaaagctttttttgtttttctgtttttgttttgtttttggcgtggaggagaaatttagacttgaaagtcagggctgatcactcaaaaagtaagataggagatattgagggaaaatgtgactcatagttggagaggaaacaggagagtgggtacaagtgacagcaccaggaacaaccccctcccccagatgccaaagcattgctctgtatctaaagatgcatccaagtttgcaaaaaattatgggtaaatctggccatgtgaccaaagaggcagtcaaatcaattgcttccaaagtcagagctgtttgaaggtgatcagctcttaattgaactagtcatgatgaatcaatccaactgactgcatccagtctgacctcggtggtttccataaagggttgttgatgtcctgagctggacagggtgggcaggaggttgaagaaaaccagttggtgagtatagaaaagaaattgcatgtagaagttgtttgttctcaaagaaatctgtaggtgttagagctgggtttgttatgttattgtcagggacattataatattggtaaggaggagagaatgatttggtaggggtattcgagaaatttgagtacaaaatataaattatcagagatgagtaggctatggacagctgattatatatatgtgtgtgtgtgtatatgtgtgcatatatgtgtacatatacacataccccaaagccatatacatatctataatacagaagtaagaataaagtcataagtaccagcatattttaaatccttagaagcactggttgggatgttacatgttttttcactgttgttgtttaccgttagctctcaaagcagtgggaatagtgcttggcacatagtaggagtttggtaaacatttggaaattgaagacccagcttatcactccttcatagagactcagtagtatgagtataccccaaattgaatgagccacagagaaatgcatccagccacactccctcttagctgaggagaagcctctgtgaatccacagattccatgcaatattcagccagccgcagacacaaggtctggctcccttgtcgtgagagtgaaggcatgctgcacacagtgggtttgcatgcacctagactgcatctgctgaacacccaacagctgtttctacaagctaaagttgtagcttctctctaccactgtctaaagctgtagcttgtctctactattgtctctacaccgttgcccaaacacttggtataatgctattgaatttttcacctccaggcatgattttgtaaccaatgtaaaggttctgggttcagccagtctaaaaagtctaataatttcttctctcagtccttcccttctcccttgtctggagctgccaccgccatttaaaagtgttggacgctgtttattcccagcttctcaacctcagtgtgtgtgggaaaggcctgaaagagagaggtatgttttctctcctccagagtctctgtggtgttgacacagcagagagaggagggggagcagcctcgtcttgcagaatcaccttcaatcactgctactgtctgggccattactgccagtctggccggtgtctcccacagtggatggctttgcctccagcggtggaccagtgtgtacctgacatgtatcagacttctgagctcttcaagctgcctcaaagaatgaatctttttagtctagaaaatgtgtttatttgataaatatactattgtgtatgagtgtgaaacaatgcagactttggagtatctcattagaaggactgtatgaatttatagaaaattgaatctaatttcagaagagcgcactgtcttctcagtcaacaaggttgcccagccacagagggtcagagaaaatgtcctttcccctccccactccttttcatagaatcctctctcaggcctaactgagctgtcatatccaattcagactgacacagagtgaggggcgctgagagtctctatgtatataaagatataggaagaaaataaggatcatcacaggaatctgttgggcttctccccatgactgtgatcttacccatgtttgaatcacaaactttaaatttataataattatgattcttgcagttttcaagtaatttgttaaatgcctattcaacacagacagatttttattttcagctgtggcttgtaaatgcctacaaactgattcatgttggtggtcgttatgacactttctgtgaattggtgaataaatatgattttagaatttcacagtaaa

SEQ ID NO: 113731 - DNA, 4500 bp, Homo sapiens
  Payload ID: 2221
  Gene Symbol: CLSTN2
  Gene Name: calsyntenin 2
  ENST ID: ENST00000620185
  CDS Start-End: 1-2676
ctggcatctcaggattcccactcactgtttccttctgcaggggaaatctgtgcgttcaagatccatggccaggagctgccctttgaggctgtggtgctcaacaagacatcaggagagggccggctccgtgccaagagccccattgactgtgagttgcagaaggagtacacattcatcatccaggcctatgactgtggtgctgggccccacgagacagcctggaaaaagtcacacaaggccgtggtccatatacaggtgaaggatgtcaacgagtttgctcccaccttcaaagagccagcctacaaggctgttgtgacggagggcaagatctatgacagcattctgcaggtggaggccattgacgaggactgctccccacagtacagccagatctgcaactatgaaatcgtcaccacagatgtgccttttgccatcgacagaaatggcaacatcaggaacactgagaagctgagctatgacaaacaacaccagtatgagatcctggtgaccgcctacgactgtggacagaagcccgctgctcaggacaccctggtgcaggtggatgtgaagccagtttgcaagcctggctggcaagactggaccaagaggattgagtaccagcctggctccgggagcatgcccctgttccccagcatccacctggagacgtgcgatggagccgtgtcttccctccagatcgtcacagagctgcagactaattacattgggaagggttgtgaccgggagacctactctgagaaatcccttcaaaagttatgtggagcctcctctggcatcattgacctcttgccatcccctagcgctgccaccaactggactgcaggactgctggtggacagcagtgagatgatcttcaagtttgacggcaggcagggtgccaaagtccccgatgggattgtgcccaagaacctgaccgatcagttcaccatcaccatgtggatgaaacacggccccagccctggtgtgagagccgagaaggaaaccatcctctgcaactcagacaaaaccgaaatgaaccggcatcactatgccctgtatgtgcacaactgccgcctcgtctttctcttgcggaaggacttcgaccaggctgacacctttcgccccgcggagttccactggaagctggatcagatttgtgacaaagagtggcactactatgtcatcaatgtggagtttcctgtggtaaccttatacatggatggagcaacatatgaaccatacctggtgaccaacgactggcccattcatccatctcacatagccatgcaactcacagtcggcgcttgttggcaaggaggagaagtcaccaaaccacagtttgctcagttctttcatggaagcctggccagtctcaccatccgccctggcaaaatggaaagccagaaggtgatctcctgcctgcaggcctgcaaggaagggctggacattaattccttggaaagccttggccaaggaataaagtatcacttcaacccctcgcagtccatcctggtgatggaaggtgacgacattgggaacattaaccgtgctctccagaaagtctcctacatcaactccaggcagttcccaacggcgggtgtgcggcgcctcaaagtatcctccaaagtccagtgctttggggaagacgtatgcatcagtatccctgaggtagatgcctatgtgatggtcctccaggccatcgagccccggatcaccctccggggcacagaccacttctggagacctgctgcccagtttgaaagtgccaggggagtgaccctcttccctgatatcaagattgtgagcaccttcgccaaaaccgaagcccccggggacgtgaaaaccacagaccccaaatcagaagtcttagaggaaatgcttcataacttagatttctgtgacattttggtgatcggaggggacttggacccaaggcaggagtgcttggagctcaaccacagtgagctccaccaacgacacctggatgccactaattctactgcaggctactccatctacggtgtgggctccatgagccgctatgagcaggtgctacatcacatccgctaccgcaactggcgtccggcttcccttgaggcccggcgtttccggattaagtgctcagaactcaatgggcgctacactagcaatgagttcaacttggaggtcagcatccttcatgaagaccaagtctcagataaggagcatgtcaatcatctgattgtgcagcctcccttcctccagtctgtccatcatcctgagtcccggagtagcatccagcacagttcagtggtcccaagcattgccacagtggtcatcatcatctccgtgtgcatgcttgtgtttgtcgtggccatgggtgtgtaccgggtccggatcgcccaccagcacttcatccaggagactgaggctgccaaggaatctgagatggactgggacgattctgcgctgactatcacagtcaaccccatggagaaacatgaaggaccagggcatggggaagatgagactgagggagaagaggaggaagaagccgaggaagaaatgagctccagcagtggctctgacgacagcgaagaggaggaggaggaggaagggatgggcagaggcagacatgggcagaatggagccaggcaagcccagctggagtgggatgactccaccctcccctactagtgcccaggggtctgctgcctggcccacatgtcccttttgtaaaccctgacccagtgtatgcccatgtctatcatacctcacctctgatgtctgtgacatgtctgggaaggccttctccagcttcctggagcccaccctttaagccttgggcactccctgtgtttcatccatggggaagttccaagaagcccagcatggccatcagtgaggacttcagggtagactttgtcctgtagcctccacttctgccctaagttccccagcatcctgactacctgtctgcagagtttgcctttgttttttcctgcagggaagaaggcccacctttgtgtcactcacctccccaggctcagagtccccaaggccctggggttccaactcactgtgcgtctcctccacacagaccagtaggttctcctatgctgactccaggttgcttcatacaaggagggtggttgaacttcacacacgtaaggtcttagtgcttaacagtttaaaggaaagtccttgttgaggcagaactaagtttacagggaaaggtacacacattctctctctctctctctctctgtctatctagttccccagcttggagagcctttccccttgcttctttctgaggccatataagcttataagaaaagtcccaaaccaagaataggtccttggccacaagcagggtctgatcccccatcagagctatctgagcctgcctgtctgggcacctgctgcaaccatgcagctaccctgccaggggcactcagcaaacagaaccacagggcccaggaggcattccacacaggcactgccccaggacaacacaacaaggacagtcacaacaaggacaacaaggacacaacacaacacacaacaaggacagtcacaacaagcctagagccagaaagcagatggaaatgctaatgaggtcaaacgtaggcttcatggtgggtggagtgggggtggctgggctcccccaggacagaggggaccctgaggttggcaaggctctcaccactcagccttatggtcccttatctcctatcttccctcttgagaaaatacacgctttctgcatgtattagaaacgcacgagctccaccaagtctacaatgaaagtttgaaatttaactgcaaggaattagaagcatatttgcaatcattgcagcttcttctttcttctgctcataaaaggaggaacactttagatagagggcaaatatatctgaaaacctaatttctttctttttttgataaggaaatcttttccatctccatcctaacatgcacaacctgtgaagagaattgtttctatagtaactggtctgtgatcttttgtggccaagagaatagcaggcaagaattagggccttgacagaatttccacgaagctctgagaacatgtttgtttcgaatgtctgattcctctttgtcatcaatgtgtatgctctgtccccatccttcactcctcctcaagctcacaccaattggtttggcacaggcacagagctggtccctagttaagtggcatttatgttaaaaaaaaatagttcagaatctcagccttttctttgtgtcatcaaaacagcttaagaaggggactactgccaatgtcctctagtctgacctccacccagggaggacccatggcaggtcttttcaactttctgattcatgagaacaaccttgtgaagcttttcccacctcctaaagtgttttctgcatctgttccttcctttggacctcacaacaaatcctgtgaagtaactgagacatctgttgttagatacatttttgtgatgagtaaactgaggcttcgtgattcaa

SEQ ID NO: 113732 - DNA, 4185 bp, Homo sapiens
  Payload ID: 2222
  Gene Symbol: CLSTN3
  Gene Name: calsyntenin 3
  Uniprot ID: Q9BQT9
  ENST ID: ENST00000266546
  CDS Start-End: 451-3321
agttcctcggctcccccaaaattgcagccaggggaaggagccttgaaactctccagccccgacgccccagtctcattggctccctcccccgctgcagcacctggtccccccccctcccagtcacctgattggccggcggccccatcaatcgttgcccggctgtgctgacgtcatcctgcagtagcggggttggggtgggagtgagagagtgaggacgctgggctgggggaaacgggaagccgctgcaagtccaccgcctcagctacccagattgggatctgcccaggcccgctttatggactagtgtgggcggcaggctcctttccgtccctgccctgctgtaccccgctccttggagaccccctgtatccctcccgcaaggtggaatccgcaggctggaggctcccaggggaggcaaacgcctggccctgccctgccccacgccgcaccatgaccctcctgctgctgccccttctgctggcctctctgctcgcgtcctgctcctgtaacaaagccaacaagcacaagccatggattgaggcagagtaccagggcatcgtcatggagaatgacaacacggtcctactgaatccaccactctttgccttggacaaggatgccccgctgcgctatgcaggtgagatctgcggcttccggctccatgggtctggggtgccctttgaggctgtgatccttgacaaggcgacaggagaggggctgatccgggccaaggagcctgtggactgcgaggcccagaaggaacacaccttcaccatccaggcctatgactgtggcgagggccccgacggggccaacaccaagaagtcccacaaggccactgtgcatgtgcgggtcaacgatgtgaacgagtttgccccagtgtttgtggaacggctgtatcgtgcggctgtgacagaggggaagctgtacgatcgcatcctgcgggtggaagccattgacggtgactgctccccccagtacagccagatctgctactatgagattctcacacccaacacccctttcctcattgacaatgacgggaacattgagaacacagagaagctgcagtacagtggtgagaggctctataagtttacagtgacagcttatgactgtgggaagaagcgggcagcagatgatgctgaggtggagattcaggtgaagcccacctgtaaacccagctggcaaggctggaacaaaaggatcgaatatgcaccaggtgctgggagcttggctttgttccctggtatccgcctggagacctgtgatgaaccactctggaacattcaggccaccatagagctgcagaccagccatgtggccaagggctgtgaccgtgacaactactcagagcgggcgctgcggaaactctgtggtgctgccactggggaggtggatctgttgcccatgcctggccccaatgccaactggacagcaggactctcggtgcactacagccaggacagcagcctgatctactggttcaatggcacccaggctgtgcaggtgcccctgggtggccccagtgggctgggctctgggccccaggacagcctcagtgaccacttcaccctgtccttctggatgaagcatggcgtaactcccaacaagggcaagaaggaagaggaaaccatcgtatgtaacactgtccagaatgaggacggcttctctcactactcgctgactgtccacggctgtaggattgccttcctctactggcccctgcttgagagtgcccgcccagtcaagttcctctggaagctggagcaggtctgtgatgatgagtggcaccactacgctctgaacctcgagttccccacagtcacactctataccgacggcatctccttcgaccctgccctcatccatgacaatggcctcatccacccaccccgaagggagcctgctctcatgattggggcctgctggactgaggagaagaacaaagagaaggaaaagggagacaacagtacagacaccacccaaggagaccctttgtcgatccaccactacttccatggctacctggctggtttcagcgtgcgctcaggtcgcctggagagccgcgaggtcatcgagtgcctctatgcatgtcgggaggggctggactatagggatttcgagagcctgggcaaaggcatgaaggtccacgtgaacccctcacagtccctgctcaccctggagggggatgatgtggagaccttcaaccatgccctgcagcatgtggcttacatgaacactctgcgctttgccacgcccggcgtcaggcccctgcgcctcaccactgctgtcaagtgcttcagcgaagagtcctgcgtctccatccctgaagtggagggctacgtggtcgtccttcagcctgacgccccccagatcctgctgagtggcactgctcattttgcccgcccagctgtggactttgagggaaccaacggcgtccctttgttccctgatcttcaaatcacctgctccatttctcaccaggtggaggccaaaaaggatgagagttggcagggcacagtgacagacacacgcatgtcggatgagattgtgcacaacctggatggctgtgaaatttctctggtgggggatgacctggatcccgagcgggaaagcctgctcctggacacaacctctctgcagcagcgggggctggagctcaccaacacatctgcctacctcactattgctggggtggagagcatcactgtgtatgaagagatcctgaggcaggctcgttatcggctgcgacacggagctgccctctacaccaggaagttccggctttcctgctcggaaatgaatggccgttactccagcaatgaattcatcgtggaggtcaatgtcctgcacagcatgaaccgggttgcccaccccagccacgtgctcagctcccagcagttcctgcaccgtggtcaccagcccccgcctgagatggctggacacagcctagccagctcccacagaaactccatgatacccagcgccgcaaccctcatcattgtggtgtgcgtgggcttcctggtgctcatggtcgtcctgggcctggtgcgcatccattcccttcaccgccgcgtctcaggggccggcgggcctccaggggcctccagtgaccccaaggacccagacctcttctgggatgactcagctctcaccatcattgtgaaccccatggagtcctaccagaatcggcagtcctgtgtgacgggggctgttgggggccagcaggaggatgaggacagcagtgactcggaggtggccgattcccccagcagcgacgagagacgcatcatcgagacccccccacaccgctactaaggcctacacctctccccacgcagagggggaattctgccctggtgaaacagacactccagacatgggagaaggactttctgggaacacagagaccaagagggagagaggcttcagaaccagtcctcctttcatttcaaaaccccagcgggccctctggagtccgccctgcccctcccccggccccccatccctcacttctgggctgtcatgctcctggtgtgccccttgcactggggctggctgggttggaaagtgggctggacttcagctgcctttctacccccaatggcagctgcccccttagcactcactgtgttggggagagggtgacgattgcaatggctggggctggggctgggggtgggattgaaggaaaccctctcctctccccttcccttctctctcctgtccatgggaagcttttccccctctgcagggctccctcagctggaccatcgtccctgcttctcttatgatcgccccacctcatttccatttcagtctggggaccccatttctccctcctttccaacttccttcctttcttgtcctgtttcccttcctgcccttgcagtcctgaggtcctgcagccccggcccctcctccgtgacctggtgtggccaggctgcggggacgggaggggacgtgggggccccgggtgtacatatataatgtatattttttcaatgttgtcgtgagtgcagcccatgttcctgcgtgcagctcacggccttgtgtgtatgtgtgtgtgtgtgtgtgtgtgaggcatcgtcatgtcctggggcaggggcggggggttgggtgtggtgagggaggggacatatcctagggttttcaaataaaacaatcagaaaaaaaaaaaaa

SEQ ID NO: 113733 - DNA, 4296 bp, Homo sapiens
  Payload ID: 2222
  Gene Symbol: CLSTN3
  Gene Name: calsyntenin 3
  Uniprot ID: Q9BQT9
  ENST ID: ENST00000537408
  CDS Start-End: 539-3445
gcattgattcctctgctccattcctgcccctctctgccccctccctctgtcctatatatcttcacttctctcctttctccccatcctgtgttctgggagagtggcctcaagttggggcttggctgggagaagtgcagagtgaagggatcaggactgaaatgagttgggaggaggataagcaatcaggatctcaggaaacttctagatctttttctagtttcaattctgcccttaatctatcccttccctttcccagggccttctcacagcccaccactgctccctgaagttccctgtctccattctctagcacgtgaaatcgctaaagaacattctccacttcctgaccatggttcccatggagatagtgatcccctcctcttcacccccagggcaggttgtttccatgggaactgtctaccctgctataggagaaggctatgacctcccgcagaccctctgactcctttagtagctgatttcttgtcctcaaccacccgcctcctgtaaggtgctcctatagggggtggaaaaggtgatggtgctggggtgtgagttgtctgggtcaacaagggttgttgtgggagtagaggccctgctcacaggtgcttcctctcctctccctggggtggggccagccaacaagcacaagccatggattgaggcagagtaccagggcatcgtcatggagaatgacaacacggtcctactgaatccaccactctttgccttggacaaggatgccccgctgcgctatgcaggtgagatctgcggcttccggctccatgggtctggggtgccctttgaggctgtgatccttgacaaggcgacaggagaggggctgatccgggccaaggagcctgtggactgcgaggcccagaaggaacacaccttcaccatccaggcctatgactgtggcgagggccccgacggggccaacaccaagaagtcccacaaggccactgtgcatgtgcgggtcaacgatgtgaacgagtttgccccagtgtttgtggaacggctgtatcgtgcggctgtgacagaggggaagctgtacgatcgcatcctgcgggtggaagccattgacggtgactgctccccccagtacagccagatctgctactatgagattctcacacccaacacccctttcctcattgacaatgacgggaacattgagaacacagagaagctgcagtacagtggtgagaggctctataagtttacagtgacagcttatgactgtgggaagaagcgggcagcagatgatgctgaggtggagattcaggtgaagcccacctgtaaacccagctggcaaggctggaacaaaaggatcgaatatgcaccaggtgctgggagcttggctttgttccctggtatccgcctggagacctgtgatgaaccactctggaacattcaggccaccatagagctgcagaccagccatgtggccaagggctgtgaccgtgacaactactcagagcgggcgctgcggaaactctgtggtgctgccactggggaggtggatctgttgcccatgcctggccccaatgccaactggacagcaggactctcggtgcactacagccaggacagcagcctgatctactggttcaatggcacccaggctgtgcaggtgcccctgggtggccccagtgggctgggctctgggccccaggacagcctcagtgaccacttcaccctgtccttctggatgaagcatggcgtaactcccaacaagggcaagaaggaagaggaaaccatcgtatgtaacactgtccagaatgaggacggcttctctcactactcgctgactgtccacggctgtaggattgccttcctctactggcccctgcttgagagtgcccgcccagtcaagttcctctggaagctggagcaggtctgtgatgatgagtggcaccactacgctctgaacctcgagttccccacagtcacactctataccgacggcatctccttcgaccctgccctcatccatgacaatggcctcatccacccaccccgaagggagcctgctctcatgattggggcctgctggactgaggagaagaacaaagagaaggaaaagggagacaacagtacagacaccacccaaggagaccctttgtcgatccaccactacttccatggctacctggctggtttcagcgtgcgctcaggtcgcctggagagccgcgaggtcatcgagtgcctctatgcatgtcgggaggggctggactatagggatttcgagagcctgggcaaaggcatgaaggtccacgtgaacccctcacagtccctgctcaccctggagggggatgatgtggagaccttcaaccatgccctgcagcatgtggcttacatgaacactctgcgctttgccacgcccggcgtcaggcccctgcgcctcaccactgctgtcaagtgcttcagcgaagagtcctgcgtctccatccctgaagtggagggctacgtggtcgtccttcagcctgacgccccccagatcctgctgagtggcactgctcattttgcccgcccagctgtggactttgagggaaccaacggcgtccctttgttccctgatcttcaaatcacctgctccatttctcaccaggtggaggccaaaaaggatgagagttggcagggcacagtgacagacacacgcatgtcggatgagattgtgcacaacctggatggctgtgaaatttctctggtgggggatgacctggatcccgagcgggaaagcctgctcctggacacaacctctctgcagcagcgggggctggagctcaccaacacatctgcctacctcactattgctggggtggagagcatcactgtgtatgaagagatcctgaggcaggctcgttatcggctgcgacacggagctgccctctacaccaggaagttccggctttcctgctcggaaatgaatggccgttactccagcaatgaattcatcgtggaggtcaatgtcctgcacagcatgaaccgggttgcccaccccagccacgtgctcagctcccagcagttcctgcaccgtggtcaccagcccccgcctgagatggctggacacagcctagccagctcccacagaaactccatgatacccagcgccgcaaccctcatcattgtggtgtgcgtgggcttcctggtgctcatggtcgtcctgggcctggtgcgcatccattcccttcaccgccgcgtctcaggggccggcgggcctccaggggcctccagtgaccccaaggacccagacctcttctgggatgactcagctctcaccatcattgtgaaccccatggagtcctaccagaatcggcagtcctgtgtgacgggggctgttgggggccagcaggaggatgaggacagcagtgactcggaggtggccgattcccccagcagcgacgagagacgcatcatcgagacccccccacaccgctactaaggcctacacctctccccacgcagagggggaattctgccctggtgaaacagacactccagacatgggagaaggactttctgggaacacagagaccaagagggagagaggcttcagaaccagtcctcctttcatttcaaaaccccagcgggccctctggagtccgccctgcccctcccccggccccccatccctcacttctgggctgtcatgctcctggtgtgccccttgcactggggctggctgggttggaaagtgggctggacttcagctgcctttctacccccaatggcagctgcccccttagcactcactgtgttggggagagggtgacgattgcaatggctggggctggggctgggggtgggattgaaggaaaccctctcctctccccttcccttctctctcctgtccatgggaagcttttccccctctgcagggctccctcagctggaccatcgtccctgcttctcttatgatcgccccacctcatttccatttcagtctggggaccccatttctccctcctttccaacttccttcctttcttgtcctgtttcccttcctgcccttgcagtcctgaggtcctgcagccccggcccctcctccgtgacctggtgtggccaggctgcggggacgggaggggacgtgggggccccgggtgtacatatataatgtatattttttcaatgttgtcgtgagtgcagcccatgttcctgcgtgcagctcacggccttgtgtgtatgtgtgtgtgtgtgtgtgtgtgaggcatcgtcatgtcctggggcaggggcggggggttgggtgtggtgagggaggggacatatcctagggttttcaaataaaacaatcag

SEQ ID NO: 113734 - DNA, 533 bp, Homo sapiens
  Payload ID: 2222
  Gene Symbol: CLSTN3
  Gene Name: calsyntenin 3
  ENST ID: ENST00000545663
  CDS Start-End: 107-533
gcagcgccgtgcggggtgggggtgggaaggaggtgtcgaggctccctggcacctgacagccaacaagcacaagccatggattgaggcagagtaccagggcatcgtcatggagaatgacaacacggtcctactgaatccaccactctttgccttggacaaggatgccccgctgcgctatgcaggtgagatctgcggcttccggctccatgggtctggggtgccctttgaggctgtgatccttgacaaggcgacaggagaggggctgatccgggccaaggagcctgtggactgcgaggcccagaaggaacacaccttcaccatccaggcctatgactgtggcgagggccccgacggggccaacaccaagaagtcccacaaggccactgtgcatgtgcgggtcaacgatgtgaacgagtttgccccagtgtttgtggaacggctgtatcgtgcggctgtgacagaggggaagctgtacgatcgcatcctgcgggtggaagccattgacggtgactgctccccccagtacagccaga

SEQ ID NO: 113735 - DNA, 570 bp, Homo sapiens
  Payload ID: 2222
  Gene Symbol: CLSTN3
  Gene Name: calsyntenin 3
  ENST ID: ENST00000539982
  CDS Start-End: 41-570
accatcttgtggctttctcctcagcattcaggaaggggttatggtggtcatcaccaacaagcacaagccatggattgaggcagagtaccagggcatcgtcatggagaatgacaacacggtcctactgaatccaccactctttgccttggacaaggatgccccgctgcgctatgcaggtgagatctgcggcttccggctccatgggtctggggtgccctttgaggctgtgatccttgacaaggcgacaggagaggggctgatccgggccaaggagcctgtggactgcgaggcccagaaggaacacaccttcaccatccaggcctatgactgtggcgagggccccgacggggccaacaccaagaagtcccacaaggccactgtgcatgtgcgggtcaacgatgtgaacgagtttgccccagtgtttgtggaacggctgtatcgtgcggctgtgacagaggggaagctgtacgatcgcatcctgcgggtggaagccattgacggtgactgctccccccagtacagccagatctgctactatgagattctcacacccaacacccctttcctcat

SEQ ID NO: 113736 - DNA, 533 bp, Homo sapiens
  Payload ID: 2222
  Gene Symbol: CLSTN3
  Gene Name: calsyntenin 3
  ENST ID: ENST00000535452
  CDS Start-End: 145-533
actggcgcatgctaagggtgtgtggcagatccatctgcttcgcctccatcccatcctggggagaaagtatttgctgcagttcagcaattcggagcacccaacaagcacaagccatggattgaggcagagtaccagggcatcgtcatggagaatgacaacacggtcctactgaatccaccactctttgccttggacaaggatgccccgctgcgctatgcaggtgagatctgcggcttccggctccatgggtctggggtgccctttgaggctgtgatccttgacaaggcgacaggagaggggctgatccgggccaaggagcctgtggactgcgaggcccagaaggaacacaccttcaccatccaggcctatgactgtggcgagggccccgacggggccaacaccaagaagtcccacaaggccactgtgcatgtgcgggtcaacgatgtgaacgagtttgccccagtgtttgtggaacggctgtatcgtgcggctgtgacagaggggaagctgtacgatcgcatcctgcgggtgga

SEQ ID NO: 113737 - DNA, 547 bp, Homo sapiens
  Payload ID: 2222
  Gene Symbol: CLSTN3
  Gene Name: calsyntenin 3
  ENST ID: ENST00000534830
  CDS Start-End: 84-547
aggacgggagggagggcttgcgggcagagggctcagccaacaagcacaagccatggattgaggcagagtaccagggcatcgtcatggagaatgacaacacggtcctactgaatccaccactctttgccttggacaaggatgccccgctgcgctatgcaggtgagatctgcggcttccggctccatgggtctggggtgccctttgaggctgtgatccttgacaaggcgacaggagaggggctgatccgggccaaggagcctgtggactgcgaggcccagaaggaacacaccttcaccatccaggcctatgactgtggcgagggccccgacggggccaacaccaagaagtcccacaaggccactgtgcatgtgcgggtcaacgatgtgaacgagtttgccccagtgtttgtggaacggctgtatcgtgcggctgtgacagaggggaagctgtacgatcgcatcctgcgggtggaagccattgacggtgactgctccccccagtacagccagatctgctactatgagattctcacacccaacaccccttt

SEQ ID NO: 113738 - DNA, 570 bp, Homo sapiens
  Payload ID: 2222
  Gene Symbol: CLSTN3
  Gene Name: calsyntenin 3
  ENST ID: ENST00000541953
  CDS Start-End: 169-570
aattctctctcgaacctgccatcgtcccgggcttcagaatccactgggcttggttcatcatggtttaaggtgaaattcggggcgaaggaggcaggacaggtggaatccgcaggctggaggctcccaggggaggcaaacgcctggccctgccctgccccacgccgcaccatgaccctcctgctgctgccccttctgctggcctctctgctcgcgtcctgctcctgtaacaaagccaacaagcacaagccatggattgaggcagagtaccagggcatcgtcatggagaatgacaacacggtcctactgaatccaccactctttgccttggacaaggatgccccgctgcgctatgcaggtgagatctgcggcttccggctccatgggtctggggtgccctttgaggctgtgatccttgacaaggcgacaggagaggggctgatccgggccaaggagcctgtggactgcgaggcccagaaggaacacaccttcaccatccaggcctatgactgtggcgagggccccgacggggccaacaccaagaagtcccacaaggccactgtgcatgtgcgg

SEQ ID NO: 113739 - DNA, 3357 bp, Homo sapiens
  Payload ID: 2223
  Gene Symbol: CALU
  Gene Name: calumenin
  Uniprot ID: O43852
  ENST ID: ENST00000249364
  CDS Start-End: 103-1050
gcttccggttgggcggtgcttgcgcgcgtgagctgagccggtgggtgagcggcggccacggcatcctgtgctgtgggggctacgaggaaagatctaattatcatggacctgcgacagtttcttatgtgcctgtccctgtgcacagcctttgccttgagcaaacccacagaaaagaaggaccgtgtacatcatgagcctcagctcagtgacaaggttcacaatgatgctcagagttttgattatgaccatgatgccttcttgggtgctgaagaagcaaagacctttgatcagctgacaccagaagagagcaaggaaaggcttggaaagattgtaagtaaaatagatggcgacaaggacgggtttgtcactgtggatgagctcaaagactggattaaatttgcacaaaagcgctggatttacgaggatgtagagcgacagtggaaggggcatgacctcaatgaggacggcctcgtttcctgggaggagtataaaaatgccacctacggctacgttttagatgatccagatcctgatgatggatttaactataaacagatgatggttagagatgagcggaggtttaaaatggcagacaaggatggagacctcattgccaccaaggaggagttcacagctttcctgcaccctgaggagtatgactacatgaaagatatagtagtacaggaaacaatggaagatatagataagaatgctgatggtttcattgatctagaagagtatattggtgacatgtacagccatgatgggaatactgatgagccagaatgggtaaagacagagcgagagcagtttgttgagtttcgggataagaaccgtgatgggaagatggacaaggaagagaccaaagactggatccttccctcagactatgatcatgcagaggcagaagccaggcacctggtctatgaatcagaccaaaacaaggatggcaagcttaccaaggaggagatcgttgacaagtatgacttatttgttggcagccaggccacagattttggggaggccttagtacggcatgatgagttctgagctacggaggaaccctcatttcctcaaaagtaatttatttttacagcttctggtttcacatgaaattgtttgcgctactgagactgttactacaaactttttaagacatgaaaaggcgtaatgaaaaccatcccgtccccattcctcctcctctctgagggactggagggaagccgtgcttctgaggaacaactctaattagtacacttgtgtttgtagatttacactttgtattatgtattaacatggcgtgtttatttttgtatttttctctggttgggagtatgatatgaaggatcaagatcctcaactcacacatgtagacaaacattagctctttactctttctcaaccccttttatgattttaataattctcacttaactaattttgtaagcctgagatcaataagaaatgttcaggagagaggaaagaaaaaaaatatatgctccacaatttatatttagagagagaacacttagtcttgcctgtcaaaaagtccaacatttcataggtagtaggggccacatattacattcagttgctataggtccagcaactgaacctgccattacctgggcaaggaaagatccctttgctctaggaaagcttggcccaaattgattttcttctttttccccctgtaggactgactgttggctaattttgtcaagcacagctgtggtgggaagagttagggccagtgtcttgaaaatcaatcaagtagtgaatgtgatctctttgcagagctatagatagaaacagctggaaaactaaaggaaaaatacaagtgttttcggggcatacattttttttctgggtgtgcatctgttgaaatgctcaagacttaattatttgccttttgaaatcactgtaaatgcccccatccggttcctcttcttcccaggtgtgccaaggaattaatcttggtttcactacaattaaaattcactcctttccaatcatgtcattgaaagtgcctttaacgaaagaaatggtcactgaatgggaattctcttaagaaaccctgagattaaaaaaagactatttggataacttataggaaagcctagaacctcccagtagagtggggatttttttcttcttccctttctcttttggacaatagttaaattagcagtattagttatgagtttggttgcagtgttcttatcttgtgggctgatttccaaaaaccacatgctgctgaatttaccagggatcctcatacctcacaatgcaaaccacttactaccaggcctttttctgtgtccactggagagcttgagctcacactcaaagatcagaggacctacagagagggctctttggtttgaggaccatggcttacctttcctgcctttgacccatcacaccccatttcctcctctttccctctccccgctgccaaaaaaaaaaaaaaaggaaacgtttatcatgaatcaacagggtttcagtccttatcaaagagagatgtggaaagagctaaagaaaccaccctttgttcccaactccactttacccatattttatgcaacacaaacactgtccttttgggtccctttcttacagatggacctcttgagaagaattatcgtattccacgtttttagccctcaggttaccaagataaatatatgtatatataacctttattattgctatatctttgtggataatacattcaggtggtgctgggtgatttattataatctgaacctaggtatatcctttggtcttccacagtcatgttgaggtgggctccctggtatggtaaaaagccaggtataatgtaacttcaccccagcctttgtactaagctcttgatagtggatatactcttttaagtttagccccaatatagggtaatggaaatttcctgccctctgggttccccatttttactattaagaagaccagtgataatttaataatgccaccaactctggcttagttaagtgagagtgtgaactgtgtggcaagagagcctcacacctcactaggtgcagagagcccaggccttatgttaaaatcatgcacttgaaaagcaaaccttaatctgcaaagacagcagcaagcattatacggtcatcttgaatgatccctttgaaattttttttttgtttgtttgtttaaatcaagcctgaggctggtgaacagtagctacacacccatattgtgtgttctgtgaatgctagctctcttgaatttggatattggttattttttatagagtgtaaaccaagttttatattctgcaatgcgaacaggtacctatctgtttctaaataaaactgtttacattca

SEQ ID NO: 113740 - DNA, 2438 bp, Homo sapiens
  Payload ID: 2223
  Gene Symbol: CALU
  Gene Name: calumenin
  Uniprot ID: O43852
  ENST ID: ENST00000449187
  CDS Start-End: 82-1029
gcgcgcgtgagctgagccggtgggtgagcggcggccacggcatcctgtgctgtgggggctacgaggaaagatctaattatcatggacctgcgacagtttcttatgtgcctgtccctgtgcacagcctttgccttgagcaaacccacagaaaagaaggaccgtgtacatcatgagcctcagctcagtgacaaggttcacaatgatgctcagagttttgattatgaccatgatgccttcttgggtgctgaagaagcaaagacctttgatcagctgacaccagaagagagcaaggaaaggcttggaatgattgtagataaaatagacgcggataaagatgggtttgtgacggagggggagctgaaatcctggattaagcacgcccagaagaaatacatatatgacaatgttgaaaaccaatggcaggagtttgatatgaatcaagacggcttaatctcctgggatgagtacagaaacgtgacttatggcacttacctggatgatccagatcctgatgatggatttaactataaacagatgatggttagagatgagcggaggtttaaaatggcagacaaggatggagacctcattgccaccaaggaggagttcacagctttcctgcaccctgaggagtatgactacatgaaagatatagtagtacaggaaacaatggaagatatagataagaatgctgatggtttcattgatctagaagagtatattggtgacatgtacagccatgatgggaatactgatgagccagaatgggtaaagacagagcgagagcagtttgttgagtttcgggataagaaccgtgatgggaagatggacaaggaagagaccaaagactggatccttccctcagactatgatcatgcagaggcagaagccaggcacctggtctatgaatcagaccaaaacaaggatggcaagcttaccaaggaggagatcgttgacaagtatgacttatttgttggcagccaggccacagattttggggaggccttagtacggcatgatgagttctgagctacggaggaaccctcatttcctcaaaagtaatttatttttacagcttctggtttcacatgaaattgtttgcgctactgagactgttactacaaactttttaagacatgaaaaggcgtaatgaaaaccatcccgtccccattcctcctcctctctgagggactggagggaagccgtgcttctgaggaacaactctaattagtacacttgtgtttgtagatttacactttgtattatgtattaacatggcgtgtttatttttgtatttttctctggttgggagtatgatatgaaggatcaagatcctcaactcacacatgtagacaaacattagctctttactctttctcaaccccttttatgattttaataattctcacttaactaattttgtaagcctgagatcaataagaaatgttcaggagagaggaaagaaaaaaaatatatgctccacaatttatatttagagagagaacacttagtcttgcctgtcaaaaagtccaacatttcataggtagtaggggccacatattacattcagttgctataggtccagcaactgaacctgccattacctgggcaaggaaagatccctttgctctaggaaagcttggcccaaattgattttcttctttttccccctgtaggactgactgttggctaattttgtcaagcacagctgtggtgggaagagttagggccagtgtcttgaaaatcaatcaagtagtgaatgtgatctctttgcagagctatagatagaaacagctggaaaactaaaggaaaaatacaagtgttttcggggcatacattttttttctgggtgtgcatctgttgaaatgctcaagacttaattatttgccttttgaaatcactgtaaatgcccccatccggttcctcttcttcccaggtgtgccaaggaattaatcttggtttcactacaattaaaattcactcctttccaatcatgtcattgaaagtgcctttaacgaaagaaatggtcactgaatgggaattctcttaagaaaccctgagattaaaaaaagactatttggataacttataggaaagcctagaacctcccagtagagtggggatttttttcttcttccctttctcttttggacaatagttaaattagcagtattagttatgagtttggttgcagtgttcttatcttgtgggctgatttccaaaaaccacatgctgctgaatttaccagggatcctcatacctcacaatgcaaaccacttactaccaggcctttttctgtgtccactggagagcttgagctcacactcaaagatcagaggacctacagagagggctctttggtttgaggaccatggcttacctttcctgcctttgacccatcacaccccatttcctcctctttccctctccccgctgcc

SEQ ID NO: 113741 - DNA, 589 bp, Homo sapiens
  Payload ID: 2223
  Gene Symbol: CALU
  Gene Name: calumenin
  ENST ID: ENST00000493278
  CDS Start-End: 1-442
cattgccaccaaggaggagttcacagctttcctgcaccctgaggagtatgactacatgaaagatatagtagtacaggaaacaatggaagatatagataagaatgctgatggtttcattgatctagaagagtatattggtgacatgtacagccatgatgggaatactgatgagccagaatgggtaaagacagagcgagagcagtttgttgagtttcgggataagaaccgtgatgggaagatggacaaggaagagaccaaagactggatccttccctcagactatgatcatgcagaggcagaagccaggcacctggtctatgaatcagaccaaaacaaggatggcaagcttaccaaggaggagatcgttgacaagtatgacttatttgttggcagccaggccacagattttggggaggccttagtacggcatgatgagttctgagctacggaggaaccctcatttcctcaaaagccgtataactggagagacctgctgctcgttatataattatctgataccaaacacaagcgattctgaatgtacacacacgtttatctatagagcataaggtaaaacaattttgtttaa

SEQ ID NO: 113742 - DNA, 2572 bp, Homo sapiens
  Payload ID: 2223
  Gene Symbol: CALU
  Gene Name: calumenin
  Uniprot ID: O43852
  ENST ID: ENST00000479257
  CDS Start-End: 832-1803
atcctgtgctgtgggggctacgaggaaaggacctcccaccctcccccactgagctgccttcccagtgatgaaagaaaaaatgtaaaagcctgaaaacccttcttcttgatttttaatttttttttttccctctaagaccttaaccactctggatagtatcacggggtatcagtagagtgtgctaaacagatgtgtactctgcagcttctttgcaggttttttgtcacatttttcagtcaagtgttccagctttgtgcttgttcattagagtcacctgtgactacagagattctgaaagtttgaatcagggcctgggaatctgtactttgaacagtactacaggtggtatttatgcctaggcaagtatgggaaacaactgtgcagaaggataaagacgttcttatctatgactagaccatctgaatgatttggcctttgaaggtgactcaaggttgagcctggatgttggagacttggtgctatagaccaaggaagctgccaagtatttcgctggttcctaatctcatgaacatcagaatcacctgaaaaacatttaaagctacgaatgtctgaattcagcttcagagactctaaatcaataggagaaacttaaagcttcctagatgattctaataaccagccatgtttgaagaccagaccaccaatgcgtacaagaagtaaaggatttggagtcaacatttaaaccttggttctttcacttttaattcttatgaacttgggcaaaaggattaaaattctactttggtatcttttgaaagaaaacagaaagtggacattttaactataagtttcttatcagcctacaatcagatgaaggaaactgatctaattatcatggacctgcgacagtttcttatgtgcctgtccctgtgcacagcctttgccttgagcaaacccacagaaaagaaggaccgtgtacatcatgagcctcagctcagtgacaaggttcacaatgatgctcagagttttgattatgaccatgatgccttcttgggtgctgaagaagcaaagacctttgatcagctgacaccagaagagagcaaggaaaggcttggaaagattgtaagtaaaatagatggcgacaaggacgggtttgtcactgtggatgagctcaaagactggattaaatttgcacaaaagcgctggatttacgaggatgtagagcgacagtggaaggggcatgacctcaatgaggacggcctcgtttcctgggaggagtataaaaatgccacctacggctacgttttagatgatccagatcctgatgatggatttaactataaacagatgatggttagagatgagcggaggtttaaaatggcagacaaggatggagacctcattgccaccaaggaggagttcacagctttcctgcaccctgaggagtatgactacatgaaagatatagtagtacaggaaacaatggaagatatagataagaatgctgatggtttcattgatctagaagagtatattggtgacatgtacagccatgatgggaatactgatgagccagaatgggtaaagacagagcgagagcagtttgttgagtttcgggataagaaccgtgatgggaagatggacaaggaagagaccaaagactggatccttccctcagactatgatcatgcagaggcagaagccaggcacctggtctatgaatcagaccaaaacaaggatggcaagcttaccaaggaggagatcgttgacaagtatgacttatttgttggcagccaggccacagattttggggaggccttagtacggcatgatgagttctgagctacggaggaaccctcatttcctcaaaagtaatttatttttacagcttctggtttcacatgaaattgtttgcgctactgagactgttactacaaactttttaagacatgaaaaggcgtaatgaaaaccatcccgtccccattcctcctcctctctgagggactggagggaagccgtgcttctgaggaacaactctaattagtacacttgtgtttgtagatttacactttgtattatgtattaacatggcgtgtttatttttgtatttttctctggttgggagtatgatatgaaggatcaagatcctcaactcacacatgtagacaaacattagctctttactctttctcaaccccttttatgattttaataattctcacttaactaattttgtaagcctgagatcaataagaaatgttcaggagagaggaaagaaaaaaaatatatgctccacaatttatatttagagagagaacacttagtcttgcctgtcaaaaagtccaacatttcataggtagtaggggccacatattacattcagttgctataggtccagcaactgaacctgccattacctgggcaaggaaagatccctttgctctaggaaagcttggcccaaattgattttcttctttttccccctgtaggactgactgttggctaattttgtcaagcacagctgtggtgggaagagttagggccagtgtcttgaaaatcaatcaagtagtgaatgtgatctctttgcagagctatagatagaaacagctgg

SEQ ID NO: 113743 - DNA, 4225 bp, Homo sapiens
  Payload ID: 2223
  Gene Symbol: CALU
  Gene Name: calumenin
  Uniprot ID: O43852
  ENST ID: ENST00000542996
  CDS Start-End: 944-1915
gattggtcgggaggccgccggcgaggcggatgagggcggggtgcggacccgcttccggttgggcggtgcttgcgcgcgtgagctgagccggtgggtgagcggcggccacggcatcctgtgctgtgggggctacgaggaaaggacctcccaccctcccccactgagctgccttcccagtgatgaaagaaaaaatgtaaaagcctgaaaacccttcttcttgatttttaatttttttttttccctctaagaccttaaccactctggatagtatcacggggtatcagtagagtgtgctaaacagatgtgtactctgcagcttctttgcaggttttttgtcacatttttcagtcaagtgttccagctttgtgcttgttcattagagtcacctgtgactacagagattctgaaagtttgaatcagggcctgggaatctgtactttgaacagtactacaggtggtatttatgcctaggcaagtatgggaaacaactgtgcagaaggataaagacgttcttatctatgactagaccatctgaatgatttggcctttgaaggtgactcaaggttgagcctggatgttggagacttggtgctatagaccaaggaagctgccaagtatttcgctggttcctaatctcatgaacatcagaatcacctgaaaaacatttaaagctacgaatgtctgaattcagcttcagagactctaaatcaataggagaaacttaaagcttcctagatgattctaataaccagccatgtttgaagaccagaccaccaatgcgtacaagaagtaaaggatttggagtcaacatttaaaccttggttctttcacttttaattcttatgaacttgggcaaaaggattaaaattctactttggtatcttttgaaagaaaacagaaagtggacattttaactataagtttcttatcagcctacaatcagatgaaggaaactgatctaattatcatggacctgcgacagtttcttatgtgcctgtccctgtgcacagcctttgccttgagcaaacccacagaaaagaaggaccgtgtacatcatgagcctcagctcagtgacaaggttcacaatgatgctcagagttttgattatgaccatgatgccttcttgggtgctgaagaagcaaagacctttgatcagctgacaccagaagagagcaaggaaaggcttggaatgattgtagataaaatagacgcggataaagatgggtttgtgacggagggggagctgaaatcctggattaagcacgcccagaagaaatacatatatgacaatgttgaaaaccaatggcaggagtttgatatgaatcaagacggcttaatctcctgggatgagtacagaaacgtgacttatggcacttacctggatgatccagatcctgatgatggatttaactataaacagatgatggttagagatgagcggaggtttaaaatggcagacaaggatggagacctcattgccaccaaggaggagttcacagctttcctgcaccctgaggagtatgactacatgaaagatatagtagtacaggaaacaatggaagatatagataagaatgctgatggtttcattgatctagaagagtatattggtgacatgtacagccatgatgggaatactgatgagccagaatgggtaaagacagagcgagagcagtttgttgagtttcgggataagaaccgtgatgggaagatggacaaggaagagaccaaagactggatccttccctcagactatgatcatgcagaggcagaagccaggcacctggtctatgaatcagaccaaaacaaggatggcaagcttaccaaggaggagatcgttgacaagtatgacttatttgttggcagccaggccacagattttggggaggccttagtacggcatgatgagttctgagctacggaggaaccctcatttcctcaaaagtaatttatttttacagcttctggtttcacatgaaattgtttgcgctactgagactgttactacaaactttttaagacatgaaaaggcgtaatgaaaaccatcccgtccccattcctcctcctctctgagggactggagggaagccgtgcttctgaggaacaactctaattagtacacttgtgtttgtagatttacactttgtattatgtattaacatggcgtgtttatttttgtatttttctctggttgggagtatgatatgaaggatcaagatcctcaactcacacatgtagacaaacattagctctttactctttctcaaccccttttatgattttaataattctcacttaactaattttgtaagcctgagatcaataagaaatgttcaggagagaggaaagaaaaaaaatatatgctccacaatttatatttagagagagaacacttagtcttgcctgtcaaaaagtccaacatttcataggtagtaggggccacatattacattcagttgctataggtccagcaactgaacctgccattacctgggcaaggaaagatccctttgctctaggaaagcttggcccaaattgattttcttctttttccccctgtaggactgactgttggctaattttgtcaagcacagctgtggtgggaagagttagggccagtgtcttgaaaatcaatcaagtagtgaatgtgatctctttgcagagctatagatagaaacagctggaaaactaaaggaaaaatacaagtgttttcggggcatacattttttttctgggtgtgcatctgttgaaatgctcaagacttaattatttgccttttgaaatcactgtaaatgcccccatccggttcctcttcttcccaggtgtgccaaggaattaatcttggtttcactacaattaaaattcactcctttccaatcatgtcattgaaagtgcctttaacgaaagaaatggtcactgaatgggaattctcttaagaaaccctgagattaaaaaaagactatttggataacttataggaaagcctagaacctcccagtagagtggggatttttttcttcttccctttctcttttggacaatagttaaattagcagtattagttatgagtttggttgcagtgttcttatcttgtgggctgatttccaaaaaccacatgctgctgaatttaccagggatcctcatacctcacaatgcaaaccacttactaccaggcctttttctgtgtccactggagagcttgagctcacactcaaagatcagaggacctacagagagggctctttggtttgaggaccatggcttacctttcctgcctttgacccatcacaccccatttcctcctctttccctctccccgctgccaaaaaaaaaaaaaaaggaaacgtttatcatgaatcaacagggtttcagtccttatcaaagagagatgtggaaagagctaaagaaaccaccctttgttcccaactccactttacccatattttatgcaacacaaacactgtccttttgggtccctttcttacagatggacctcttgagaagaattatcgtattccacgtttttagccctcaggttaccaagataaatatatgtatatataacctttattattgctatatctttgtggataatacattcaggtggtgctgggtgatttattataatctgaacctaggtatatcctttggtcttccacagtcatgttgaggtgggctccctggtatggtaaaaagccaggtataatgtaacttcaccccagcctttgtactaagctcttgatagtggatatactcttttaagtttagccccaatatagggtaatggaaatttcctgccctctgggttccccatttttactattaagaagaccagtgataatttaataatgccaccaactctggcttagttaagtgagagtgtgaactgtgtggcaagagagcctcacacctcactaggtgcagagagcccaggccttatgttaaaatcatgcacttgaaaagcaaaccttaatctgcaaagacagcagcaagcattatacggtcatcttgaatgatccctttgaaattttttttttgtttgtttgtttaaatcaagcctgaggctggtgaacagtagctacacacccatattgtgtgttctgtgaatgctagctctcttgaatttggatattggttattttttatagagtgtaaaccaagttttatattctgcaatgcgaacaggtacctatctgtttctaaataaaactgtttacattcatta

SEQ ID NO: 113744 - DNA, 3210 bp, Homo sapiens
  Payload ID: 2223
  Gene Symbol: CALU
  Gene Name: calumenin
  Uniprot ID: O43852
  ENST ID: ENST00000535011
  CDS Start-End: 153-827
gattggtcgggaggccgccggcgaggcggatgagggcggggtgcggacccgcttccggttgggcggtgcttgcgcgcgtgagctgagccggtgggtgagcggcggccacggcatcctgtgctgtgggggctacgaggaaagatctaattatcatggacctgcgacagtttcttatgtgcctgtccctgtgcacagcctttgccttgagcaaacccacagaaaagaaggaccgtgtacatcatgagcctcagctcagtgacaaggttcacaatgatgctcagagttttgattatgaccatgatgccttcttgggtgctgaagaagcaaagacctttgatcagctgacaccagaagagagcaaggaaaggcttggaaagattgtaagtaaaatagatggcgacaaggacgggtttgtcactgtggatgagctcaaagactggattaaatttgcacaaaagcgctggatttacgaggatgtagagcgacagtggaaggggcatgacctcaatgaggacggcctcgtttcctgggaggagtataaaaatgccacctacggctacgttttagatgatccagatcctgatgatggatttaactataaacagatgatggttagagatgagcggaggtttaaaatggcagacaaggatggagacctcattgccaccaaggaggagttcacagctttcctgcaccctgaggagtatgactacatgaaagatatagtagtacaggaaacaatggaagatatagataagaatgctgatggtttcattgatctagaagagtatattggatggcaagcttaccaaggaggagatcgttgacaagtatgacttatttgttggcagccaggccacagattttggggaggccttagtacggcatgatgagttctgagctacggaggaaccctcatttcctcaaaagtaatttatttttacagcttctggtttcacatgaaattgtttgcgctactgagactgttactacaaactttttaagacatgaaaaggcgtaatgaaaaccatcccgtccccattcctcctcctctctgagggactggagggaagccgtgcttctgaggaacaactctaattagtacacttgtgtttgtagatttacactttgtattatgtattaacatggcgtgtttatttttgtatttttctctggttgggagtatgatatgaaggatcaagatcctcaactcacacatgtagacaaacattagctctttactctttctcaaccccttttatgattttaataattctcacttaactaattttgtaagcctgagatcaataagaaatgttcaggagagaggaaagaaaaaaaatatatgctccacaatttatatttagagagagaacacttagtcttgcctgtcaaaaagtccaacatttcataggtagtaggggccacatattacattcagttgctataggtccagcaactgaacctgccattacctgggcaaggaaagatccctttgctctaggaaagcttggcccaaattgattttcttctttttccccctgtaggactgactgttggctaattttgtcaagcacagctgtggtgggaagagttagggccagtgtcttgaaaatcaatcaagtagtgaatgtgatctctttgcagagctatagatagaaacagctggaaaactaaaggaaaaatacaagtgttttcggggcatacattttttttctgggtgtgcatctgttgaaatgctcaagacttaattatttgccttttgaaatcactgtaaatgcccccatccggttcctcttcttcccaggtgtgccaaggaattaatcttggtttcactacaattaaaattcactcctttccaatcatgtcattgaaagtgcctttaacgaaagaaatggtcactgaatgggaattctcttaagaaaccctgagattaaaaaaagactatttggataacttataggaaagcctagaacctcccagtagagtggggatttttttcttcttccctttctcttttggacaatagttaaattagcagtattagttatgagtttggttgcagtgttcttatcttgtgggctgatttccaaaaaccacatgctgctgaatttaccagggatcctcatacctcacaatgcaaaccacttactaccaggcctttttctgtgtccactggagagcttgagctcacactcaaagatcagaggacctacagagagggctctttggtttgaggaccatggcttacctttcctgcctttgacccatcacaccccatttcctcctctttccctctccccgctgccaaaaaaaaaaaaaaaggaaacgtttatcatgaatcaacagggtttcagtccttatcaaagagagatgtggaaagagctaaagaaaccaccctttgttcccaactccactttacccatattttatgcaacacaaacactgtccttttgggtccctttcttacagatggacctcttgagaagaattatcgtattccacgtttttagccctcaggttaccaagataaatatatgtatatataacctttattattgctatatctttgtggataatacattcaggtggtgctgggtgatttattataatctgaacctaggtatatcctttggtcttccacagtcatgttgaggtgggctccctggtatggtaaaaagccaggtataatgtaacttcaccccagcctttgtactaagctcttgatagtggatatactcttttaagtttagccccaatatagggtaatggaaatttcctgccctctgggttccccatttttactattaagaagaccagtgataatttaataatgccaccaactctggcttagttaagtgagagtgtgaactgtgtggcaagagagcctcacacctcactaggtgcagagagcccaggccttatgttaaaatcatgcacttgaaaagcaaaccttaatctgcaaagacagcagcaagcattatacggtcatcttgaatgatccctttgaaattttttttttgtttgtttgtttaaatcaagcctgaggctggtgaacagtagctacacacccatattgtgtgttctgtgaatgctagctctcttgaatttggatattggttattttttatagagtgtaaaccaagttttatattctgcaatgcgaacaggtacctatctgtttctaaataaaactgtttacattcatta

SEQ ID NO: 113745 - DNA, 2913 bp, Homo sapiens
  Payload ID: 2224
  Gene Symbol: CAMKV
  Gene Name: CaM kinase-like vesicle-associated
  Uniprot ID: Q8NCB2
  ENST ID: ENST00000296471
  CDS Start-End: 163-1584
atgctggaggttcgctagccgaagcggctgcatctggcgccgcgtctgccccgcgtgctcggagcggattctgcccgccgtccccggagccctcggcgccccgctgagcccgcgatcacttcctccctgtgaccaaccggcgctgcaggttagagcctggcaatgccgtttgggtgtgtgactctgggcgacaagaagaactataaccagccatcggaggtgactgacagatatgatttgggacaggtcatcaagactgaggagttttgtgaaatcttccgggccaaggacaagacgacaggcaagctgcacacctgcaagaagttccagaagcgggacggccgcaaggtgcggaaagctgccaagaacgagataggcatcctcaagatggtgaagcatcccaacatcctacagctggtggatgtgtttgtgacccgcaaggagtactttatcttcctggagctggccacggggagggaggtgtttgactggatcctggaccagggctactactcggagcgagacacaagcaacgtggtacggcaagtcctggaggccgtggcctatttgcactcactcaagatcgtgcacaggaatctcaagctggagaacctggtttactacaaccggctgaagaactcgaagattgtcatcagtgacttccatctggctaagctagaaaatggcctcatcaaggagccctgtgggacccccgagtatctgggcaatccacctttctatgaggaggtggaagaagatgattatgagaaccatgataagaatctcttccgcaagatcctggctggtgactatgagtttgactctccatattgggatgatatttcgcaggcagccaaagacctggtcacaaggctgatggaggtggagcaagaccagcggatcactgcagaagaggccatctcccatgagtggatttctggcaatgctgcttctgataagaacatcaaggatggtgtctgtgcccagattgaaaagaactttgccagggccaagtggaagaaggctgtccgagtgaccaccctcatgaaacggctccgggcaccagagcagtccagcacggctgcagcccagtcggcctcagccacagacactgccacccccggggctgcaggtggggccacagctgcagctgcgagtggagctacctcagcccctgagggtgatgctgctcgtgctgcaaagagtgataatgtggcccccgcagaccgtagtgccaccccagccacagatggaagtgccaccccagccactgatggcagtgtcaccccagccaccgatggaagcatcactccagccactgatgggagtgtcaccccagccactgacaggagcgctactccagccactgatgggagagccacaccagccacagaagagagcactgtgcccaccacccaaagcagtgccatgctggccaccaaggcagctgccacccctgagccggctatggcccagccggacagcacagccccagagggcgccacaggccaggctccaccctctagtaaaggggaagaggctgctggttatgcccaggagtctcaaagggaggaggccagctgagtaggcagcctggtgagggggggcaggggatgggcaggagggtgggagagtggatgaggggcttctcactgtacatagagtcactggcatgatgccctcgctcccccatgcccccacatcccagtggggcataactaggggtcacgggagagcagtctcgtctcctgtgtgtatgtgtgtgagtggtgggcaggccagtggcagggccggccccagcccctgcatggattccttgtggcttttctgtcttttgctagcttcaccagtttctgttccttgtgggatgctgctctagggatactcagggggctcctgctctccttccccttcccttcttgcctcaccattcccctaggcaggccctgcaggtcccacactctcccaggccctaaacttgggcggccttgccctgagagctggtcctccagcgaggccctgtcagcggtcttaggctcctgcacatgaaggtgtgtgcctgtggtgtgtgggctgctctaggagcagatacaggctggtatagaggatgcagaaaggtagggcagtatgtttaagtccagacttggcacatggctagggatactgctcactagctgtggaggtcctcaggagtggagagaatgagtaggagggcagaagcttccatttttgtccttcctaagaccctgttatttgtgttatttcctgcctttccgagtcctgcagtgggctgccctgtaccctgaacctcatgagcctctaagggaaaggaggaacaattaggacgtggcaatgagacctggcagggcagagtacaagcccagcacccagtgtcccagccttactgggtccttaccctgggccaaacagggagggctgatacctccttgctcttcctagatgcccacctcctacaatctcagcccacaagtcctctccaccctagggggcttgctgcatggcaataactcataatctgatttggaggtttgccctttacaggggcagattttctgctcagttcaacaatgaaatgaagaggaactccctctttctacagctcacttctatcagaggcccaggtgcctcagagccacattgagttgctttttctgggatgaggaagtagggttaaactccccagtttcctgagggaggctcctgacaggtgccctttgtcagaccctaccacagcctggataggcagccacattggtcctcgcccttgctcggcactccgtggtggtcctgcccttctccctgcatgcctgtgggtctgctctggtgtgtgaaggtcggtgggttaactgtgtgcctactgaacctggcaaataaacatcaccctgcaaagcc

SEQ ID NO: 113746 - DNA, 2818 bp, Homo sapiens
  Payload ID: 2224
  Gene Symbol: CAMKV
  Gene Name: CaM kinase-like vesicle-associated
  ENST ID: ENST00000463537
  CDS Start-End: 189-1493
aatccggtgccggcaagcggctggcgatgctggaggttcgctagccgaagcggctgcatctggcgccgcgtctgccccgcgtgctcggagcggattctgcccgccgtccccggagccctcggcgccccgctgagcccgcgatcacttcctccctgtgaccaaccggcgctgcaggttagagcctggcaatgccgtttgggtgtgtgactctgggcgacaagaagaactataaccagccatcggaggtgactgacagatatgatttgggacaggtcatcaagactgaggagttttgtgaaatcttccgggccaaggacaagacgacaggcaagctgcacacctgcaagaagttccagaagcgggacggccgcaaggtgcggaaagctgccaagaacgagataggcatcctcaagatggtgaagcatcccaacatcctacagctggtggatgtgtttgtgacccgcaaggagtactttatcttcctggagctggccacggggagggaggtgtttgactggatcctggaccagggctactactcggagcgagacacaagcaacgtggtacggcaagtcctggaggccgtggcctatttgcactcactcaagatcgtgcacaggaatctcaagctggagaacctggtttactacaaccggctgaagaactcgaagattgtcatcagtgacttccatctggctaagctagaaaatggcctcatcaaggagccctgtgggacccccgagtatctggccccagaggtggtaggccggcagcggtatggacgccctgtggactgctgggccattggagtcatcatgtacatcctgctttcaggcaatccacctttctatgaggaggtggaagaagatgattatgagaaccatgataagaatctcttccgcaagatcctggctggtgactatgagtttgactctccatattgggatgatatttcgcaggcagccaaagacctggtcacaaggctgatggaggtggagcaagaccagcggatcactgcagaagaggccatctcccatgagtggatttctggcaatgctgcttctgataagaacatcaaggatggtgtctgtgcccagattgaaaagaactttgccagggccaagtggaagaccgtagtgccaccccagccacagatggaagtgccaccccagccactgatggcagtgtcaccccagccaccgatggaagcatcactccagccactgatgggagtgtcaccccagccactgacaggagcgctactccagccactgatgggagagccacaccagccacagaagagagcactgtgcccaccacccaaagcagtgccatgctggccaccaaggcagctgccacccctgagccggctatggcccagccggacagcacagccccagagggcgccacaggccaggctccaccctctagtaaaggggaagaggctgctggttatgcccaggagtctcaaagggaggaggccagctgagtaggcagcctggtgagggggggcaggggatgggcaggagggtgggagagtggatgaggggcttctcactgtacatagagtcactggcatgatgccctcgctcccccatgcccccacatcccagtggggcataactaggggtcacgggagagcagtctcgtctcctgtgtgtatgtgtgtgagtggtgggcaggccagtggcagggccggccccagcccctgcatggattccttgtggcttttctgtcttttgctagcttcaccagtttctgttccttgtgggatgctgctctagggatactcagggggctcctgctctccttccccttcccttcttgcctcaccattcccctaggcaggccctgcaggtcccacactctcccaggccctaaacttgggcggccttgccctgagagctggtcctccagcgaggccctgtcagcggtcttaggctcctgcacatgaaggtgtgtgcctgtggtgtgtgggctgctctaggagcagatacaggctggtatagaggatgcagaaaggtagggcagtatgtttaagtccagacttggcacatggctagggatactgctcactagctgtggaggtcctcaggagtggagagaatgagtaggagggcagaagcttccatttttgtccttcctaagaccctgttatttgtgttatttcctgcctttccgagtcctgcagtgggctgccctgtaccctgaacctcatgagcctctaagggaaaggaggaacaattaggacgtggcaatgagacctggcagggcagagtacaagcccagcacccagtgtcccagccttactgggtccttaccctgggccaaacagggagggctgatacctccttgctcttcctagatgcccacctcctacaatctcagcccacaagtcctctccaccctagggggcttgctgcatggcaataactcataatctgatttggaggtttgccctttacaggggcagattttctgctcagttcaacaatgaaatgaagaggaactccctctttctacagctcacttctatcagaggcccaggtgcctcagagccacattgagttgctttttctgggatgaggaagtagggttaaactccccagtttcctgagggaggctcctgacaggtgccctttgtcagaccctaccacagcctggataggcagccacattggtcctcgcccttgctcggcactccgtggtggtcctgcccttctccctgcatgcctgtgggtctgctctggtgtgtgaaggtcggtgggttaactgtgtgcctactgaacctggcaaataaacatcaccctgcaaagcc

SEQ ID NO: 113747 - DNA, 2905 bp, Homo sapiens
  Payload ID: 2224
  Gene Symbol: CAMKV
  Gene Name: CaM kinase-like vesicle-associated
  Uniprot ID: Q8NCB2
  ENST ID: ENST00000488336
  CDS Start-End: 164-1576
gatgctggaggttcgctagccgaagcggctgcatctggcgccgcgtctgccccgcgtgctcggagcggattctgcccgccgtccccggagccctcggcgccccgctgagcccgcgatcacttcctccctgtgaccaaccggcgctgcaggttagagcctggcaatgccgtttgggtgtgtgactctgggcgacaagaagaactataaccagccatcggaggtgactgacagatatgatttgggacaggtcatcaagactgaggagttttgtgaaatcttccgggccaaggacaagacgacaggcaagctgcacacctgcaagaagttccagaagcgggacggccgcaaggtgcggaaagctgccaagaacgagataggcatcctcaagatggtgaagcatcccaacatcctacagctggtggatgtgtttgtgacccgcaaggagtactttatcttcctggagctggccacggggagggaggtgtttgactggatcctggaccagggctactactcggagcgagacacaagcaacgtggtacggcaagtcctggaggccgtggcctatttgcactcactcaagatcgtgcacaggaatctcaagctggagaacctggtttactacaaccggctgaagaactcgaagattgtcatcagtgacttccatctggctaagctagaaaatggcctcatcaaggagccctgtgggacccccgagtatctggccccagaggtggtaggccggcagcggtatggacgccctgtggactgctgggccattggagtcatcatgtacatcctgctttcaggcaatccacctttctatgaggaggtggaagaagatgattatgagaaccatgataagaatctcttccgcaagatcctggctggtgactatgagtttgactctccatattgggatgatatttcgcaggcagccaaagacctggtcacaaggctgatggaggtggagcaagaccagcggatcactgcagaagaggccatctcccatgagtggatttctggcaatgctgcttctgataagaacatcaaggatggtgtctgtgcccagattgaaaagaactttgccagggccaagtggaagaaggctgtccgagtgaccaccctcatgaaacggctccgggcaccagagcagtccagcacggctgcagcccagtcggcctcagccacagacactgccacccccggggctgcagaccgtagtgccaccccagccacagatggaagtgccaccccagccactgatggcagtgtcaccccagccaccgatggaagcatcactccagccactgatgggagtgtcaccccagccactgacaggagcgctactccagccactgatgggagagccacaccagccacagaagagagcactgtgcccaccacccaaagcagtgccatgctggccaccaaggcagctgccacccctgagccggctatggcccagccggacagcacagccccagagggcgccacaggccaggctccaccctctagtaaaggggaagaggctgctggttatgcccaggagtctcaaagggaggaggccagctgagtaggcagcctggtgagggggggcaggggatgggcaggagggtgggagagtggatgaggggcttctcactgtacatagagtcactggcatgatgccctcgctcccccatgcccccacatcccagtggggcataactaggggtcacgggagagcagtctcgtctcctgtgtgtatgtgtgtgagtggtgggcaggccagtggcagggccggccccagcccctgcatggattccttgtggcttttctgtcttttgctagcttcaccagtttctgttccttgtgggatgctgctctagggatactcagggggctcctgctctccttccccttcccttcttgcctcaccattcccctaggcaggccctgcaggtcccacactctcccaggccctaaacttgggcggccttgccctgagagctggtcctccagcgaggccctgtcagcggtcttaggctcctgcacatgaaggtgtgtgcctgtggtgtgtgggctgctctaggagcagatacaggctggtatagaggatgcagaaaggtagggcagtatgtttaagtccagacttggcacatggctagggatactgctcactagctgtggaggtcctcaggagtggagagaatgagtaggagggcagaagcttccatttttgtccttcctaagaccctgttatttgtgttatttcctgcctttccgagtcctgcagtgggctgccctgtaccctgaacctcatgagcctctaagggaaaggaggaacaattaggacgtggcaatgagacctggcagggcagagtacaagcccagcacccagtgtcccagccttactgggtccttaccctgggccaaacagggagggctgatacctccttgctcttcctagatgcccacctcctacaatctcagcccacaagtcctctccaccctagggggcttgctgcatggcaataactcataatctgatttggaggtttgccctttacaggggcagattttctgctcagttcaacaatgaaatgaagaggaactccctctttctacagctcacttctatcagaggcccaggtgcctcagagccacattgagttgctttttctgggatgaggaagtagggttaaactccccagtttcctgagggaggctcctgacaggtgccctttgtcagaccctaccacagcctggataggcagccacattggtcctcgcccttgctcggcactccgtggtggtcctgcccttctccctgcatgcctgtgggtctgctctggtgtgtgaaggtcggtgggttaactgtgtgcctactgaacctggcaaataaacatcaccctgcaaagcc

SEQ ID NO: 113748 - DNA, 3314 bp, Homo sapiens
  Payload ID: 2224
  Gene Symbol: CAMKV
  Gene Name: CaM kinase-like vesicle-associated
  Uniprot ID: Q8NCB2
  ENST ID: ENST00000477224
  CDS Start-End: 480-1985
actaatgactggcaagcgatcctatgcagctccaggactcaggctttcccccaactctccactcaccaccccttacattgggcataggaggcctcctccggccccaggctgagggcctaagggagccattgagaaccttggccagggctaagcaggccagtgctcaccagcaccgctgccatcccgcgcgctcctgctctccagtgggattctgcccttaaggctccgccagggtcggggcggggccggttgggaggccccgcccccagcccgcccccggcccggggtgcgaatccggtgccggcaagcggctggcgatgctggaggttcgctagccgaagcggctgcatctggcgccgcgtctgccccgcgtgctcggagcggattctgcccgccgtccccggagccctcggcgccccgctgagcccgcgatcacttcctccctgtgaccaaccggcgctgcaggttagagcctggcaatgccgtttgggtgtgtgactctgggcgacaagaagaactataaccagccatcggaggtgactgacagatatgatttgggacaggtcatcaagactgaggagttttgtgaaatcttccgggccaaggacaagacgacaggcaagctgcacacctgcaagaagttccagaagcgggacggccgcaaggtgcggaaagctgccaagaacgagataggcatcctcaagatggtgaagcatcccaacatcctacagctggtggatgtgtttgtgacccgcaaggagtactttatcttcctggagctggccacggggagggaggtgtttgactggatcctggaccagggctactactcggagcgagacacaagcaacgtggtacggcaagtcctggaggccgtggcctatttgcactcactcaagatcgtgcacaggaatctcaagctggagaacctggtttactacaaccggctgaagaactcgaagattgtcatcagtgacttccatctggctaagctagaaaatggcctcatcaaggagccctgtgggacccccgagtatctggccccagaggtggtaggccggcagcggtatggacgccctgtggactgctgggccattggagtcatcatgtacatcctgctttcaggcaatccacctttctatgaggaggtggaagaagatgattatgagaaccatgataagaatctcttccgcaagatcctggctggtgactatgagtttgactctccatattgggatgatatttcgcaggcagccaaagacctggtcacaaggctgatggaggtggagcaagaccagcggatcactgcagaagaggccatctcccatgagtggatttctggcaatgctgcttctgataagaacatcaaggatggtgtctgtgcccagattgaaaagaactttgccagggccaagtggaagaaggctgtccgagtgaccaccctcatgaaacggctccgggcaccagagcagtccagcacggctgcagcccagtcggcctcagccacagacactgccacccccggggctgcaggtggggccacagctgcagctgcgagtggagctacctcagcccctgagggtgatgctgctcgtgctgcaaagagtgataatgtggcccccgcagaccgtagtgccaccccagccacagatggaagtgccaccccagccactgatggcagtgtcaccccagccaccgatggaagcatcactccagccactgatgggagtgtcaccccagccactgacaggagcgctactccagccactgatgggagagccacaccagccacagaagagagcactgtgcccaccacccaaagcagtgccatgctggccaccaaggcagctgccacccctgagccggctatggcccagccggacagcacagccccagagggcgccacaggccaggctccaccctctagtaaaggggaagaggctgctggttatgcccaggagtctcaaagggaggaggccagctgagtaggcagcctggtgagggggggcaggggatgggcaggagggtgggagagtggatgaggggcttctcactgtacatagagtcactggcatgatgccctcgctcccccatgcccccacatcccagtggggcataactaggggtcacgggagagcagtctcgtctcctgtgtgtatgtgtgtgagtggtgggcaggccagtggcagggccggccccagcccctgcatggattccttgtggcttttctgtcttttgctagcttcaccagtttctgttccttgtgggatgctgctctagggatactcagggggctcctgctctccttccccttcccttcttgcctcaccattcccctaggcaggccctgcaggtcccacactctcccaggccctaaacttgggcggccttgccctgagagctggtcctccagcgaggccctgtcagcggtcttaggctcctgcacatgaaggtgtgtgcctgtggtgtgtgggctgctctaggagcagatacaggctggtatagaggatgcagaaaggtagggcagtatgtttaagtccagacttggcacatggctagggatactgctcactagctgtggaggtcctcaggagtggagagaatgagtaggagggcagaagcttccatttttgtccttcctaagaccctgttatttgtgttatttcctgcctttccgagtcctgcagtgggctgccctgtaccctgaacctcatgagcctctaagggaaaggaggaacaattaggacgtggcaatgagacctggcagggcagagtacaagcccagcacccagtgtcccagccttactgggtccttaccctgggccaaacagggagggctgatacctccttgctcttcctagatgcccacctcctacaatctcagcccacaagtcctctccaccctagggggcttgctgcatggcaataactcataatctgatttggaggtttgccctttacaggggcagattttctgctcagttcaacaatgaaatgaagaggaactccctctttctacagctcacttctatcagaggcccaggtgcctcagagccacattgagttgctttttctgggatgaggaagtagggttaaactccccagtttcctgagggaggctcctgacaggtgccctttgtcagaccctaccacagcctggataggcagccacattggtcctcgcccttgctcggcactccgtggtggtcctgcccttctccctgcatgcctgtgggtctgctctggtgtgtgaaggtcggtgggttaactgtgtgcctactgaacctggcaaataaacatcaccctgcaaagcc

SEQ ID NO: 113749 - DNA, 561 bp, Homo sapiens
  Payload ID: 2224
  Gene Symbol: CAMKV
  Gene Name: CaM kinase-like vesicle-associated
  ENST ID: ENST00000480398
  CDS Start-End: 193-561
tgcgaatccggtgccggcaagcggctggcgatgctggaggttcgctagccgaagcggctgcatctggcgccgcgtctgccccgcgtgctcggagcggattctgcccgccgtccccggagccctcggcgccccgctgagcccgcgatcacttcctccctgtgaccaaccggcgctgcaggttagagcctggcaatgccgtttgggtgtgtgactctgggcgacaagaagaactataaccagccatcggaggtgtttgactggatcctggaccagggctactactcggagcgagacacaagcaacgtggtacggcaagtcctggaggccgtggcctatttgcactcactcaagatcgtgcacaggaatctcaagctggagaacctggtttactacaaccggctgaagaactcgaagattgtcatcagtgacttccatctggctaagctagaaaatggcctcatcaaggagccctgtgggacccccgaccccagaggtggtaggccggcagcggtatggacgccctgtggactgctgggccattggagtcatcatgtacatcct

SEQ ID NO: 113750 - DNA, 1688 bp, Homo sapiens
  Payload ID: 2224
  Gene Symbol: CAMKV
  Gene Name: CaM kinase-like vesicle-associated
  ENST ID: ENST00000467248
  CDS Start-End: 351-1631
gatgctggaggttcgctagccgaagcggctgcatctggcgccgcgtctgccccgcgtgctcggagcggattctgcccgccgtccccggagccctcggcgccccgctgagcccgcgatcacttcctccctgtgaccaaccggcgctgcaggttagagcctggcaatgccgtttgggtgtgtgactctgggcgacaagaagaactataaccagccatcggagtgaggagttttgtgaaatcttccgggccaaggacaagacgacaggcaagctgcacacctgcaagaagttccagaagcgggacggccgcaaggtgcggaaagctgccaagaacgagataggcatcctcaagatggtgaagcatcccaacatcctacagctggtggatgtgtttgtgacccgcaaggagtactttatcttcctggagctggccacggggagggaggtgtttgactggatcctggaccagggctactactcggagcgagacacaagcaacgtggtacggcaagtcctggaggccgtggcctatttgcactcactcaagatcgtgcacaggaatctcaagctggagaacctggtttactacaaccggctgaagaactcgaagattgtcatcagtgacttccatctggctaagctagaaaatggcctcatcaaggagccctgtgggacccccgagtatctggccccagaggtggtaggccggcagcggtatggacgccctgtggactgctgggccattggagtcatcatgtacatcctgctttcaggcaatccacctttctatgaggaggtggaagaagatgattatgagaaccatgataagaatctcttccgcaagatcctggctggtgactatgagtttgactctccatattgggatgatatttcgcaggcagccaaagacctggtcacaaggctgatggaggtggagcaagaccagcggatcactgcagaagaggccatctcccatgagtggatttctggcaatgctgcttctgataagaacatcaaggatggtgtctgtgcccagattgaaaagaactttgccagggccaagtggaagaaggctgtccgagtgaccaccctcatgaaacggctccgggcaccagagcagtccagcacggctgcagcccagtcggcctcagccacagacactgccacccccggggctgcaggtggggccacagctgcagctgcgagtggagctacctcagcccctgagggtgatgctgctcgtgctgcaaagagtgataatgtggcccccgcagaccgtagtgccaccccagccacagatggaagtgccaccccagccactgatggcagtgtcaccccagccaccgatggaagcatcactccagccactgatgggagtgtcaccccagccactgacaggagcgctactccagccactgatgggagagccacaccagccacagaagagagcactgtgcccaccacccaaagcagtgccatgctggccaccaaggcagctgccacccctgagccggctatggcccagccggacagcacagccccagagggcgccacaggccaggctccaccctctagtaaaggggaagaggctgctggttatgcccaggagtctcaaagggaggaggccagctgagtaggcagcctggtgagggggggcaggggatgggcaggagggtgggagagtggatga

SEQ ID NO: 113751 - DNA, 1589 bp, Homo sapiens
  Payload ID: 2224
  Gene Symbol: CAMKV
  Gene Name: CaM kinase-like vesicle-associated
  ENST ID: ENST00000487726
  CDS Start-End: 161-445
gctggaggttcgctagccgaagcggctgcatctggcgccgcgtctgccccgcgtgctcggagcggattctgcccgccgtccccggagccctcggcgccccgctgagcccgcgatcacttcctccctgtgaccaaccggcgctgcaggttagagcctggcaatgccgtttgggtgtgtgactctgggcgacaagaagaactataaccagccatcggaggtgactgacagatatgatttgggacaggtcatcaagactgaggagttttgtgaaatcttccgggccaaggacaagacgacaggcaagctgcacacctgcaagaagttccagaagcgggacggccgcaagggtgaagcatcccaacatcctacagctggtggatgtgtttgtgacccgcaaggagtactttatcttcctggagctggccacggggagggaggtgtttgactggatcctggaccagggctactactcggagcgagacacaagcaacgtggtacggcaagtcctggaggccgtggcctatttgcactcactcaagatcgtgcacaggaatctcaagctggagaacctggtttactacaaccggctgaagaactcgaagattgtcatcagtgacttccatctggctaagctagaaaatggcctcatcaaggagccctgtgggacccccgagtatctggccccagaggtggtaggccggcagcggtatggacgccctgtggactgctgggccattggagtcatcatgtacatcctgctttcaggcaatccacctttctatgaggaggtggaagaagatgattatgagaaccatgataagaatctcttccgcaagatcctggctggtgactatgagtttgactctccatattgggatgatatttcgcaggcagccaaagacctggtcacaaggctgatggaggtggagcaagaccagcggatcactgcagaagaggccatctcccatgagtggatttctggcaatgctgcttctgataagaacatcaaggatggtgtctgtgcccagattgaaaagaactttgccagggccaagtggaagaaggctgtccgagtgaccaccctcatgaaacggctccgggcaccagagcagtccagcacggctgcagcccagtcggcctcagccacagacactgccacccccggggctgcagaccgtagtgccaccccagccacagatggaagtgccaccccagccactgatggcagtgtcaccccagccaccgatggaagcatcactccagccactgatgggagtgtcaccccagccactgacaggagcgctactccagccactgatgggagagccacaccagccacagaagagagcactgtgcccaccacccaaagcagtgccatgctggccaccaaggcagctgccacccctgagccggctatggcccagccggacagcacagccccagagggcgccacaggccaggctccaccctctagtaaaggggaagaggctgctggttatgcccaggagtctcaaagggaggaggccagctgagtaggcagcctggtgagggggggcaggggatgggcaggagggtgggagagtggatga

SEQ ID NO: 113752 - DNA, 1475 bp, Homo sapiens
  Payload ID: 2224
  Gene Symbol: CAMKV
  Gene Name: CaM kinase-like vesicle-associated
  ENST ID: ENST00000466940
  CDS Start-End: 167-1450
ggcgatgctggaggttcgctagccgaagcggctgcatctggcgccgcgtctgccccgcgtgctcggagcggattctgcccgccgtccccggagccctcggcgccccgctgagcccgcgatcacttcctccctgtgaccaaccggcgctgcaggttagagcctggcaatgccgtttgggtgtgtgactctgggcgacaagaagaactataaccagccatcggaggtgactgacagatatgatttgggacaggtcatcaagactgaggagttttgtgaaatcttccgggccaaggacaagacgacaggcaagctgcacacctgcaagaagttccagaagcgggacggccgcaaggtgcggaaagctgccaagaacgagataggcatcctcaagatggtgaagcatcccaacatcctacagctggtggatgtgtttgtgacccgcaaggagtactttatcttcctggagctgaatctcaagctggagaacctggtttactacaaccggctgaagaactcgaagattgtcatcagtgacttccatctggctaagctagaaaatggcctcatcaaggagccctgtgggacccccgagtatctggccccagaggtggtaggccggcagcggtatggacgccctgtggactgctgggccattggagtcatcatgtacatcctgctttcaggcaatccacctttctatgaggaggtggaagaagatgattatgagaaccatgataagaatctcttccgcaagatcctggctggtgactatgagtttgactctccatattgggatgatatttcgcaggcagccaaagacctggtcacaaggctgatggaggtggagcaagaccagcggatcactgcagaagaggccatctcccatgagtggatttctggcaatgctgcttctgataagaacatcaaggatggtgtctgtgcccagattgaaaagaactttgccagggccaagtggaagaaggctgtccgagtgaccaccctcatgaaacggctccgggcaccagagcagtccagcacggctgcagcccagtcggcctcagccacagacactgccacccccggggctgcagaccgtagtgccaccccagccacagatggaagtgccaccccagccactgatggcagtgtcaccccagccaccgatggaagcatcactccagccactgatgggagtgtcaccccagccactgacaggagcgctactccagccactgatgggagagccacaccagccacagaagagagcactgtgcccaccacccaaagcagtgccatgctggccaccaaggcagctgccacccctgagccggctatggcccagccggacagcacagccccagagggcgccacaggccaggctccaccctctagtaaaggggaagaggctgctggttatgcccaggagtctcaaagggaggaggccagctgagtaggcagcctggtgagggggggca

SEQ ID NO: 113753 - DNA, 1035 bp, Homo sapiens
  Payload ID: 2224
  Gene Symbol: CAMKV
  Gene Name: CaM kinase-like vesicle-associated
  ENST ID: ENST00000466535
  CDS Start-End: 163-594
atgctggaggttcgctagccgaagcggctgcatctggcgccgcgtctgccccgcgtgctcggagcggattctgcccgccgtccccggagccctcggcgccccgctgagcccgcgatcacttcctccctgtgaccaaccggcgctgcaggttagagcctggcaatgccgtttgggtgtgtgactctgggcgacaagaagaactataaccagccatcggaggtgactgacagatatgatttgggacaggtcatcaagactgaggagttttgtgaaatcttccgggccaaggacaagacgacaggcaagctgcacacctgcaagaagttccagaagcgggacggccgcaaggtgcggaaagctgccaagaacgagataggcatcctcaagatggtgaagcatcccaacatcctacagctggtggatgtgtttgtgacccgcaaggagtactttatcttcctggagctggctactactcggagcgagacacaagcaacgtggtacggcaagtcctggaggccgtggcctatttgcactcactcaagatcgtgcacaggaatctcaagctggagaacctggtttactacaaccggctgaagaactcgaagattgtcatcagtgacttccatctggctaagctagaaaatggcctcatcaaggagccctgtgggacccccgagtatctggccccagaggtggtaggccggcagcggtatggacgccctgtggactgctgggccattggagtcatcatgtacatcctgctttcaggcaatccacctttctatgaggaggtggaagaagatgattatgagaaccatgataagaatctcttccgcaagatcctggctggtgactatgagtttgactctccatattgggatgatatttcgcaggcagccaaagacctggtcacaaggctgatggaggtggagcaagaccagcggatcactgcagaagaggccatctcccatgagtggatttctggcaatgctgcttctgataagaacatcaaggatggtgtctgtgcccagattg

SEQ ID NO: 113754 - DNA, 1485 bp, Homo sapiens
  Payload ID: 2224
  Gene Symbol: CAMKV
  Gene Name: CaM kinase-like vesicle-associated
  Uniprot ID: Q8NCB2
  ENST ID: ENST00000620470
  CDS Start-End: 1-1422
atgccgtttgggtgtgtgactctgggcgacaagaagaactataaccagccatcggaggtgactgacagatatgatttgggacaggtcatcaagactgaggagttttgtgaaatcttccgggccaaggacaagacgacaggcaagctgcacacctgcaagaagttccagaagcgggacggccgcaaggtgcggaaagctgccaagaacgagataggcatcctcaagatggtgaagcatcccaacatcctacagctggtggatgtgtttgtgacccgcaaggagtactttatcttcctggagctggccacggggagggaggtgtttgactggatcctggaccagggctactactcggagcgagacacaagcaacgtggtacggcaagtcctggaggccgtggcctatttgcactcactcaagatcgtgcacaggaatctcaagctggagaacctggtttactacaaccggctgaagaactcgaagattgtcatcagtgacttccatctggctaagctagaaaatggcctcatcaaggagccctgtgggacccccgagtatctgggcaatccacctttctatgaggaggtggaagaagatgattatgagaaccatgataagaatctcttccgcaagatcctggctggtgactatgagtttgactctccatattgggatgatatttcgcaggcagccaaagacctggtcacaaggctgatggaggtggagcaagaccagcggatcactgcagaagaggccatctcccatgagtggatttctggcaatgctgcttctgataagaacatcaaggatggtgtctgtgcccagattgaaaagaactttgccagggccaagtggaagaaggctgtccgagtgaccaccctcatgaaacggctccgggcaccagagcagtccagcacggctgcagcccagtcggcctcagccacagacactgccacccccggggctgcaggtggggccacagctgcagctgcgagtggagctacctcagcccctgagggtgatgctgctcgtgctgcaaagagtgataatgtggcccccgcagaccgtagtgccaccccagccacagatggaagtgccaccccagccactgatggcagtgtcaccccagccaccgatggaagcatcactccagccactgatgggagtgtcaccccagccactgacaggagcgctactccagccactgatgggagagccacaccagccacagaagagagcactgtgcccaccacccaaagcagtgccatgctggccaccaaggcagctgccacccctgagccggctatggcccagccggacagcacagccccagagggcgccacaggccaggctccaccctctagtaaaggggaagaggctgctggttatgcccaggagtctcaaagggaggaggccagctgagtaggcagcctggtgagggggggcaggggatgggcaggagggtgggagagtggatgaggggct

SEQ ID NO: 113755 - DNA, 7588 bp, Homo sapiens
  Payload ID: 2225
  Gene Symbol: CREB1
  Gene Name: cAMP responsive element binding protein 1
  Uniprot ID: P16220
  ENST ID: ENST00000353267
  CDS Start-End: 232-1215
gcgcactcggcactgggcggcgctggctggctccctggctgcggctcctcagtcggcggcggctgctgctgcctgtggcccgggcggctgggagaagcggagtgttggtgagtgacgcggcggaggtgtagtttgacgcggtgtgttacgtgggggagagaataaaactccagcgagatccgggccgtgaacgaaagcagtgacggaggagcttgtaccaccggtaactaaatgaccatggaatctggagccgagaaccagcagagtggagatgcagctgtaacagaagctgaaaaccaacaaatgacagttcaagcccagccacagattgccacattagcccaggtatctatgccagcagctcatgcaacatcatctgctcccaccgtaactctagtacagctgcccaatgggcagacagttcaagtccatggagtcattcaggcggcccagccatcagttattcagtctccacaagtccaaacagttcagatttcaactattgcagaaagtgaagattcacaggagtcagtggatagtgtaactgattcccaaaagcgaagggaaattctttcaaggaggccttcctacaggaaaattttgaatgacttatcttctgatgcaccaggagtgccaaggattgaagaagagaagtctgaagaggagacttcagcacctgccatcaccactgtaacggtgccaactccaatttaccaaactagcagtggacagtatattgccattacccagggaggagcaatacagctggctaacaatggtaccgatggggtacagggcctgcaaacattaaccatgaccaatgcagcagccactcagccgggtactaccattctacagtatgcacagaccactgatggacagcagatcttagtgcccagcaaccaagttgttgttcaagctgcctctggagacgtacaaacataccagattcgcacagcacccactagcactattgcccctggagttgttatggcatcctccccagcacttcctacacagcctgctgaagaagcagcacgaaagagagaggtccgtctaatgaagaacagggaagcagctcgagagtgtcgtagaaagaagaaagaatatgtgaaatgtttagaaaacagagtggcagtgcttgaaaatcaaaacaagacattgattgaggagctaaaagcacttaaggacctttactgccacaaatcagattaatttgggatttaaattttcacctgttaaggtggaaaatggactggcttggccacaacctgaaagacaaaataaacattttattttctaaacatttctttttttctatgcgcaaaactgcctgaaagcaactacagaatttcattcatttgtgcttttgcattaaactgtgaatgttccaacacctgcctccacttctcccctcaagaaattttcaacgccaggaatcatgaagagacttctgcttttcaacccccaccctcctcaagaagtaataatttgtttacttgtaaattgatgggagaaatgaggaaaagaaaatctttttaaaaatgatttcaaggtttgtgctgagctccttgattgccttagggacagaattaccccagcctcttgagctgaagtaatgtgtgggccgcatgcataaagtaagtaaggtgcaatgaagaagtgttgattgccaaattgacatgttgtcacattctcattgtgaattatgtaaagttgttaagagacataccctctaaaaaagaactttagcatggtattgaaggaattagaaatgaatttggagtgctttttatgtatgttgtcttcttcaatactgaaaatttgtccttggttcttaaaagcattctgtactaatacagctcttccatagggcagttgttgcttcttaattcagttctgtatgtgttcaacatttttgaatacattaaaagaagtaaccaactgaacgacaaagcatggtatttgaattttaaattaaagcaaagtaaataaaagtacaaagcatattttagttagtactaaattcttagtaaaatgctgatcagtaaaccaatcccttgagttatataacaagatttttaaataaatgttattgtcctcaccttcaaaaatatttatattgtcactcatttacgtaaaaagatatttctaatttactgttgcccattgcacttacataccaccaccaagaaagccttcaagatgtcaaataaagcaaagtgatatatatttgtttatgaaatgttacatgtagaaaaatactgattttaaatattttccatattaacaatttaacagagaatctctagtgaattttttaaatgaaagaagttgtaaggatataaaaagtacagtgttagatgtgcacaaggaaagttattttcagacatatttgaatgactgctgtactgcaatatttggattgtcattcttacaaaacatttttttgttctcttgtaaaaagagtagttattagttctgctttagctttccaatatgctgtatagcctttgtcattttataattttaattcctgattaaaacagtctgtatttgtgtatatcatacattgttttcaataccacttttaattgttactcattttattcactaagctcgataaatctaacagttactcttaaaaaaaaaaaaaaaagactaaggtggattttaaaaattggaaactgacataatgttaggttataatttctcatttggagccgggcgcagtggctcacgcctgtaatcccagcactttgggaggccaaggtgggtggatcacctgtggtcaagagttcaagaccagcctggccatcatggtgaaaccccatctctactaaaaatacaaaaattagccaggcgtggtggctggcgcctgtaatcccagctactcaggaggttgaggcagcagaattgcttgaacccaggaggcagagggttgcagtgagccgagatagcaccattgcactccagcctgggcgactccatctcaaaaaataaaaataaaaaaaatgtctcatttgggaaggaaattccttttaaaaaagagttgagacacttagaaaactaatgttttatatttagtcaagagttatttaagaaagtcaagcttgtttaacaacaaaatatgaagatttaagtgttaattgctggatccattttaaaataagattttaattaacatttgtaaatggtatattttcgtttgtaacaaaccattgtcttttttcaaggatgaacagagtttatgaaggagcatcattctaagaattaagtgatgtagtctttatgtttggacagttcaccagattctcaagaaggctttcaaacaactataaagtttgatgtttgtcctgctgagctaatggggaaagttatagcataaaaattgtgtaaccgcatagatatgtcatttttaaaaactggtttaacagaaatcaagcaaagtcacaaatatgttcacaagttggaattatttattgagtcaaaatgtcgaatcgaacattttgaatgaagtaagtgttataaatgaaaaattgcctgatgtttagcagtttgtattctctaaagctttttttcaaaagttcaggctttctacttactgggaagttggtggtcctcttagtccctgataaatcaaggcaatcacattcatgtgagctggatgaatttataagttataaagaccttatccttcataccttgaggatgattgcactggttttgaagtcagttgcttaatgatgaggtgagaaatgtatcctgttgctaaatctgtcttagacccttggtgaaacttgaagatttcagtttataaagataaaatcaagcatcttttgtgcagttttctttttttaatgcaagaatggtggggaggtttgtttgtaagcatgaaactttgagaatctttattaagaaaatgacataatttttaaaaaccttgtagccaagaacatatgtggccacattaccagtaataaatgtttttctctttatattggccaaaagggaataaaaatgtcatcataggaatttgtacatatgctactgatttgcctagaaaatagcaagtttgatattgctcactttgcaaatatagggccatgtggcacttttatctataggacagattaataaaaatgaagtggggaggggtttatttttgatatattactcttatgagttttcaagctttgataatgtttaactgaaaagtggcttagaaagggctagatccaatgtgttcattattaaataattgctatcagatacaattttaagttcattctttttcaaactcaagtaccatattggcaaccataatattgtcataggtgctctcttcatttagatattcttggggggggtggcatttgtataatatatgtgtacatatatatatatatatatatatatacatacagtatataatctaaagctctgagagctcttaagtcaggaatgctgagtattatagtatattgaggtcagatgaaattttacatttttgtgtgttctgttgcattccttctggtagtttctatgactgcattactccagcactcatgattgattttatcttctaattttcttccaagtattttattttttattagttttctttggcttgatacttttaaatatgttactagtcacttgaaagcctctcccccaaaagtatttggtttgtatgctttgtctgtggcagctataacagtggtaagaacattttgaagatagctttttaaaggaaccactgattttttcaaaaatcatcctgggggaggaattttggcatttcatttgagcagggattttgtcagaaaatgtgttttgatggtaggtcagcagcagtgctagtctctgaaagcacaataccagtcaggcagcctatcccatcagatgtcatctggctgaagtttatctctgtctctcaggataaatccctgtaggacaaatccctactatcatttctaccttttggggtgacatgtggaatcatacaaaggcttaggaagaaatacgtttgtttaaaccaggatgctttacttacttgaagtgacttcaatctagatttcttttaatatttaacaaatttttaattctatgatcagccacagtcagctattaccataaattggtctctgtttattttgaagatcacggctgcttcattttgcaggattaagtagggctaatgtatcttaaagttaagatcttgaattaaagtgagttttagaaatagtgttacataccttttcagttgttttcaagaggctttatttttgttgcctttgtagccctgaaagctgttggtatattttttccctcatggacccaatagaaaagttgtatatttatttggattatatttacattctgtcctttgtaaatgtttggtgtaacttgcacttttttaaatgacccagtttgggtattagcaacttaagaaattccctcatcaagtaattctcaactttttagtctttctcctctcttcaaatcatgtgactttttaaatggaagtttttcattgattaaaatattttagcacctaaaagctagccttaaaaacagctgtaaaagaaaaacatcaggaaattagatatgactagcccagttaattaaaagacgggctcaaaccttgttttattctttttcatcttggatgaagattgaagggaaaataactcaagtgcataatatttattttcaatttttaatgagactttatcctcatcacaacattaatactgtacatagtatgccaaaatatccattaatttgtctagaatagtacaagactttttaaagcaattgtcctcacagagaccacatgtaatatactgaaatatgttcatttttaatggctttgttaacatcaaagaaatgctgcctaaatttgatttcagatgaggaaggagaaagtaaagtgtgcatagtaaggctgtaggtgaagagttgtgagataaatagttcactcagttgtacaaagcacaactagaactttttgttgggaggcttacatacatcttgaatattcttaatgtaataatgttgactattaagttggctacacagtcactgtatgtactaggaactggtttccttgacattctagaatcaatggctaggagaggcattaatctttgaggggctgaacatatcatgaagctgagtcagtatggaaaattttcaaataaacagggtgctgaagttccatctgtctcatctgcttatgataagttcttattgattagtgaatgtagcttaagcctttgtatgtgtcctcagggggcagaccgactttaagagggaccagataacgtttgaatggagggattatatttcaggtgttttagcttgaaatttattttttaaaaaaagaaaaatttaaaaaatatataaataaaatagaacaaagccggtgatgcaagttgatattataaacaggcagttttagcacagaaagaaaatactgacctgtctgcattctggtacggtgggtgcaggtcccagctgggtatgacatgatacatttttaattattctcaccagcaagtaaaaggaaaatgaacaatcttttggaattgtctttgaaaaggatcaaagagtaggaaattcacatttgacctaacattacttgcctatagaagtatggcatttccaagcttttgtctgaggagcatctcagagaagtgagagtaaatctgagttagcttaaaaattggtagggaggaagaaaatctctgcaaataatgattttatgtttgttggccaagtgaaatgatctatcattgtgtttgggaggttttattttcttatgtttttaaaattggtaaatgctttatagatgtatttttatccaagtgccactccaatttgtgtatgtaataaaattatttatattaaaagtgggaaataattgtcaacattttttttgagtatagatttattaggggtggcaaagaagagtgctagttagcagttttccatgtaaagttgtccttgactgatttgtccacatgtcagttgtaactcccccactccctgcaaaaggaattatttctaacccagatgtatcacttgaaactttttagaagcaaaataatcagggaagttcctagaaaggtgtttggctttttggtttttgagggttggggtaaagaagacttcccccacaactgtcagcacaaaacagggtattgatttttaactctgatgtttctattggagttgaatactaaataaataactataatgagggaaatacatttctaataaaattccctacattctagaaacatccctgttttaatttttttatctaaatctttttgtgctttatgtgtaaagaaaaaaatgtactgagttacaatgcattttattaacactatgtacataatagctgctttgtgttcagaatagtagcagttgctttgtatattaaagtgatccttgtgaatttgtgaaatattgtcataaagtgctttttcttactgtaatctttgtggtatcaactgtcataatgctctttttacacaaacatttatgtgcagtcacataaacatgcttttaaaaactc

SEQ ID NO: 113756 - DNA, 7650 bp, Homo sapiens
  Payload ID: 2225
  Gene Symbol: CREB1
  Gene Name: cAMP responsive element binding protein 1
  Uniprot ID: P16220
  ENST ID: ENST00000432329
  CDS Start-End: 252-1277
tgtttccgtgcgcggccgctgcgcactcggcactgggcggcgctggctggctccctggctgcggctcctcagtcggcggcggctgctgctgcctgtggcccgggcggctgggagaagcggagtgttggtgagtgacgcggcggaggtgtagtttgacgcggtgtgttacgtgggggagagaataaaactccagcgagatccgggccgtgaacgaaagcagtgacggaggagcttgtaccaccggtaactaaatgaccatggaatctggagccgagaaccagcagagtggagatgcagctgtaacagaagctgaaaaccaacaaatgacagttcaagcccagccacagattgccacattagcccaggtatctatgccagcagctcatgcaacatcatctgctcccaccgtaactctagtacagctgcccaatgggcagacagttcaagtccatggagtcattcaggcggcccagccatcagttattcagtctccacaagtccaaacagttcagtcttcctgtaaggacttaaaaagacttttctccggaacacagatttcaactattgcagaaagtgaagattcacaggagtcagtggatagtgtaactgattcccaaaagcgaagggaaattctttcaaggaggccttcctacaggaaaattttgaatgacttatcttctgatgcaccaggagtgccaaggattgaagaagagaagtctgaagaggagacttcagcacctgccatcaccactgtaacggtgccaactccaatttaccaaactagcagtggacagtatattgccattacccagggaggagcaatacagctggctaacaatggtaccgatggggtacagggcctgcaaacattaaccatgaccaatgcagcagccactcagccgggtactaccattctacagtatgcacagaccactgatggacagcagatcttagtgcccagcaaccaagttgttgttcaagctgcctctggagacgtacaaacataccagattcgcacagcacccactagcactattgcccctggagttgttatggcatcctccccagcacttcctacacagcctgctgaagaagcagcacgaaagagagaggtccgtctaatgaagaacagggaagcagctcgagagtgtcgtagaaagaagaaagaatatgtgaaatgtttagaaaacagagtggcagtgcttgaaaatcaaaacaagacattgattgaggagctaaaagcacttaaggacctttactgccacaaatcagattaatttgggatttaaattttcacctgttaaggtggaaaatggactggcttggccacaacctgaaagacaaaataaacattttattttctaaacatttctttttttctatgcgcaaaactgcctgaaagcaactacagaatttcattcatttgtgcttttgcattaaactgtgaatgttccaacacctgcctccacttctcccctcaagaaattttcaacgccaggaatcatgaagagacttctgcttttcaacccccaccctcctcaagaagtaataatttgtttacttgtaaattgatgggagaaatgaggaaaagaaaatctttttaaaaatgatttcaaggtttgtgctgagctccttgattgccttagggacagaattaccccagcctcttgagctgaagtaatgtgtgggccgcatgcataaagtaagtaaggtgcaatgaagaagtgttgattgccaaattgacatgttgtcacattctcattgtgaattatgtaaagttgttaagagacataccctctaaaaaagaactttagcatggtattgaaggaattagaaatgaatttggagtgctttttatgtatgttgtcttcttcaatactgaaaatttgtccttggttcttaaaagcattctgtactaatacagctcttccatagggcagttgttgcttcttaattcagttctgtatgtgttcaacatttttgaatacattaaaagaagtaaccaactgaacgacaaagcatggtatttgaattttaaattaaagcaaagtaaataaaagtacaaagcatattttagttagtactaaattcttagtaaaatgctgatcagtaaaccaatcccttgagttatataacaagatttttaaataaatgttattgtcctcaccttcaaaaatatttatattgtcactcatttacgtaaaaagatatttctaatttactgttgcccattgcacttacataccaccaccaagaaagccttcaagatgtcaaataaagcaaagtgatatatatttgtttatgaaatgttacatgtagaaaaatactgattttaaatattttccatattaacaatttaacagagaatctctagtgaattttttaaatgaaagaagttgtaaggatataaaaagtacagtgttagatgtgcacaaggaaagttattttcagacatatttgaatgactgctgtactgcaatatttggattgtcattcttacaaaacatttttttgttctcttgtaaaaagagtagttattagttctgctttagctttccaatatgctgtatagcctttgtcattttataattttaattcctgattaaaacagtctgtatttgtgtatatcatacattgttttcaataccacttttaattgttactcattttattcactaagctcgataaatctaacagttactcttaaaaaaaaaaaaaaaagactaaggtggattttaaaaattggaaactgacataatgttaggttataatttctcatttggagccgggcgcagtggctcacgcctgtaatcccagcactttgggaggccaaggtgggtggatcacctgtggtcaagagttcaagaccagcctggccatcatggtgaaaccccatctctactaaaaatacaaaaattagccaggcgtggtggctggcgcctgtaatcccagctactcaggaggttgaggcagcagaattgcttgaacccaggaggcagagggttgcagtgagccgagatagcaccattgcactccagcctgggcgactccatctcaaaaaataaaaataaaaaaaatgtctcatttgggaaggaaattccttttaaaaaagagttgagacacttagaaaactaatgttttatatttagtcaagagttatttaagaaagtcaagcttgtttaacaacaaaatatgaagatttaagtgttaattgctggatccattttaaaataagattttaattaacatttgtaaatggtatattttcgtttgtaacaaaccattgtcttttttcaaggatgaacagagtttatgaaggagcatcattctaagaattaagtgatgtagtctttatgtttggacagttcaccagattctcaagaaggctttcaaacaactataaagtttgatgtttgtcctgctgagctaatggggaaagttatagcataaaaattgtgtaaccgcatagatatgtcatttttaaaaactggtttaacagaaatcaagcaaagtcacaaatatgttcacaagttggaattatttattgagtcaaaatgtcgaatcgaacattttgaatgaagtaagtgttataaatgaaaaattgcctgatgtttagcagtttgtattctctaaagctttttttcaaaagttcaggctttctacttactgggaagttggtggtcctcttagtccctgataaatcaaggcaatcacattcatgtgagctggatgaatttataagttataaagaccttatccttcataccttgaggatgattgcactggttttgaagtcagttgcttaatgatgaggtgagaaatgtatcctgttgctaaatctgtcttagacccttggtgaaacttgaagatttcagtttataaagataaaatcaagcatcttttgtgcagttttctttttttaatgcaagaatggtggggaggtttgtttgtaagcatgaaactttgagaatctttattaagaaaatgacataatttttaaaaaccttgtagccaagaacatatgtggccacattaccagtaataaatgtttttctctttatattggccaaaagggaataaaaatgtcatcataggaatttgtacatatgctactgatttgcctagaaaatagcaagtttgatattgctcactttgcaaatatagggccatgtggcacttttatctataggacagattaataaaaatgaagtggggaggggtttatttttgatatattactcttatgagttttcaagctttgataatgtttaactgaaaagtggcttagaaagggctagatccaatgtgttcattattaaataattgctatcagatacaattttaagttcattctttttcaaactcaagtaccatattggcaaccataatattgtcataggtgctctcttcatttagatattcttggggggggtggcatttgtataatatatgtgtacatatatatatatatatatatatatacatacagtatataatctaaagctctgagagctcttaagtcaggaatgctgagtattatagtatattgaggtcagatgaaattttacatttttgtgtgttctgttgcattccttctggtagtttctatgactgcattactccagcactcatgattgattttatcttctaattttcttccaagtattttattttttattagttttctttggcttgatacttttaaatatgttactagtcacttgaaagcctctcccccaaaagtatttggtttgtatgctttgtctgtggcagctataacagtggtaagaacattttgaagatagctttttaaaggaaccactgattttttcaaaaatcatcctgggggaggaattttggcatttcatttgagcagggattttgtcagaaaatgtgttttgatggtaggtcagcagcagtgctagtctctgaaagcacaataccagtcaggcagcctatcccatcagatgtcatctggctgaagtttatctctgtctctcaggataaatccctgtaggacaaatccctactatcatttctaccttttggggtgacatgtggaatcatacaaaggcttaggaagaaatacgtttgtttaaaccaggatgctttacttacttgaagtgacttcaatctagatttcttttaatatttaacaaatttttaattctatgatcagccacagtcagctattaccataaattggtctctgtttattttgaagatcacggctgcttcattttgcaggattaagtagggctaatgtatcttaaagttaagatcttgaattaaagtgagttttagaaatagtgttacataccttttcagttgttttcaagaggctttatttttgttgcctttgtagccctgaaagctgttggtatattttttccctcatggacccaatagaaaagttgtatatttatttggattatatttacattctgtcctttgtaaatgtttggtgtaacttgcacttttttaaatgacccagtttgggtattagcaacttaagaaattccctcatcaagtaattctcaactttttagtctttctcctctcttcaaatcatgtgactttttaaatggaagtttttcattgattaaaatattttagcacctaaaagctagccttaaaaacagctgtaaaagaaaaacatcaggaaattagatatgactagcccagttaattaaaagacgggctcaaaccttgttttattctttttcatcttggatgaagattgaagggaaaataactcaagtgcataatatttattttcaatttttaatgagactttatcctcatcacaacattaatactgtacatagtatgccaaaatatccattaatttgtctagaatagtacaagactttttaaagcaattgtcctcacagagaccacatgtaatatactgaaatatgttcatttttaatggctttgttaacatcaaagaaatgctgcctaaatttgatttcagatgaggaaggagaaagtaaagtgtgcatagtaaggctgtaggtgaagagttgtgagataaatagttcactcagttgtacaaagcacaactagaactttttgttgggaggcttacatacatcttgaatattcttaatgtaataatgttgactattaagttggctacacagtcactgtatgtactaggaactggtttccttgacattctagaatcaatggctaggagaggcattaatctttgaggggctgaacatatcatgaagctgagtcagtatggaaaattttcaaataaacagggtgctgaagttccatctgtctcatctgcttatgataagttcttattgattagtgaatgtagcttaagcctttgtatgtgtcctcagggggcagaccgactttaagagggaccagataacgtttgaatggagggattatatttcaggtgttttagcttgaaatttattttttaaaaaaagaaaaatttaaaaaatatataaataaaatagaacaaagccggtgatgcaagttgatattataaacaggcagttttagcacagaaagaaaatactgacctgtctgcattctggtacggtgggtgcaggtcccagctgggtatgacatgatacatttttaattattctcaccagcaagtaaaaggaaaatgaacaatcttttggaattgtctttgaaaaggatcaaagagtaggaaattcacatttgacctaacattacttgcctatagaagtatggcatttccaagcttttgtctgaggagcatctcagagaagtgagagtaaatctgagttagcttaaaaattggtagggaggaagaaaatctctgcaaataatgattttatgtttgttggccaagtgaaatgatctatcattgtgtttgggaggttttattttcttatgtttttaaaattggtaaatgctttatagatgtatttttatccaagtgccactccaatttgtgtatgtaataaaattatttatattaaaagtgggaaataattgtcaacattttttttgagtatagatttattaggggtggcaaagaagagtgctagttagcagttttccatgtaaagttgtccttgactgatttgtccacatgtcagttgtaactcccccactccctgcaaaaggaattatttctaacccagatgtatcacttgaaactttttagaagcaaaataatcagggaagttcctagaaaggtgtttggctttttggtttttgagggttggggtaaagaagacttcccccacaactgtcagcacaaaacagggtattgatttttaactctgatgtttctattggagttgaatactaaataaataactataatgagggaaatacatttctaataaaattccctacattctagaaacatccctgttttaatttttttatctaaatctttttgtgctttatgtgtaaagaaaaaaatgtactgagttacaatgcattttattaacactatgtacataatagctgctttgtgttcagaatagtagcagttgctttgtatattaaagtgatccttgtgaatttgtgaaatattgtcataaagtgctttttcttactgtaatctttgtggtatcaactgtcataatgctctttttacacaaacatttatgtgcagtcacataaacatgcttttaaaaactc

SEQ ID NO: 113757 - DNA, 430 bp, Homo sapiens
  Payload ID: 2225
  Gene Symbol: CREB1
  Gene Name: cAMP responsive element binding protein 1
  ENST ID: ENST00000457101
  CDS Start-End: 37-430
tctgtgcttgaaattctgtgactcttccctgtatctatgccagcagctcatgcaacatcatctgctcccaccgtaactctagtacagctgcccaatgggcagacagttcaagtccatggagtcattcaggcggcccagccatcagttattcagtctccacaagtccaaacagttcagtcttcctgtaaggacttaaaaagacttttctccggaacacagatttcaactattgcagaaagtgaagattcacaggagtcagtggatagtgtaactgattcccaaaagcgaagggaaattctttcaaggaggccttcctacaggaaaattttgaatgacttatcttctgatgcaccaggagtgccaaggattgaagaagagaagtctgaagaggagacttcagcacctgccatcaccactgtaacggtgccaa

SEQ ID NO: 113758 - DNA, 518 bp, Homo sapiens
  Payload ID: 2225
  Gene Symbol: CREB1
  Gene Name: cAMP responsive element binding protein 1
  ENST ID: ENST00000452474
  CDS Start-End: 122-518
gaaagcagtgacggaggagcttgtaccaccggaactgttggggacacagtgactaaggcaaaatatgtgtcaaaagaaagcagtcaaaggaaaaagggatcacctttggtgaagtaactaaatgaccatggaatctggagccgagaaccagcagagtggagatgcagctgtaacagaagctgaaaaccaacaaatgacagttcaagcccagccacagattgccacattagcccaggtatctatgccagcagctcatgcaacatcatctgctcccaccgtaactctagtacagctgcccaatgggcagacagttcaagtccatggagtcattcaggcggcccagccatcagttattcagtctccacaagtccaaacagttcagtcttcctgtaaggacttaaaaagacttttctccggaacacagatttcaactattgcagaaagtgaagattcacaggagtcagtggatagtgtaactgattcccaaaagcgaagggaaattctttcaaggaggcctt

SEQ ID NO: 113759 - DNA, 730 bp, Homo sapiens
  Payload ID: 2225
  Gene Symbol: CREB1
  Gene Name: cAMP responsive element binding protein 1
  ENST ID: ENST00000455757
  CDS Start-End: 1-423
ggaggagcaatacagctggctaacaatggtaccgatggggtacagggcctgcaaacattaaccatgaccaatgcagcagccactcagccgggtactaccattctacagtatgcacagaccactgatggacagcagatcttagtgcccagcaaccaagttgttgttcaagctgcctctggagacgtacaaacataccagattcgcacagcacccactagcactattgcccctggagttgttatggcatcctccccagcacttcctacacagcctgctgaagaagcagcacgaaagagagaggtccgtctaatgaagaacaggtacaaatactgcatttacttagattgttatgtgttaagtgtgtcttcacattctgctggatgtgtatctttacatctactggtaataggatctttgcattgaattttttttttccagcagaattaatggatcttgctaaattttctttatttaataagctgcacttataagatagctgtatgattatgggtcaatctttgatcgtggagtagttttctttcatgcagtttccccacaggagatttaatgcacaacttccctatgtctgcactccaaccagttagccaggttatttaaaaatggtttcttttcatgtatagtattgttcaagaagatcaagagtttcatatatgtatattaactgtgtgttaaattttatctatattaaatttacttgatataaagtaaa

SEQ ID NO: 113760 - DNA, 713 bp, Homo sapiens
  Payload ID: 2225
  Gene Symbol: CREB1
  Gene Name: cAMP responsive element binding protein 1
  ENST ID: ENST00000421139
  CDS Start-End: 202-713
ggctccctggctgcggctcctcagtcggcggcggctgctgctgcctgtggcccgggcggctgggagaagcggagtgttggtgagtgacgcggcggaggtgtagtttgacgcggtgtgttacgtgggggagagaataaaactccagcgagatccgggccgtgaacgaaagcagtgacggaggagcttgtaccaccggtatctatgccagcagctcatgcaacatcatctgctcccaccgtaactctagtacagctgcccaatgggcagacagttcaagtccatggagtcattcaggcggcccagccatcagttattcagtctccacaagtccaaacagttcagatttcaactattgcagaaagtgaagattcacaggagtcagtggatagtgtaactgattcccaaaagcgaagggaaattctttcaaggaggccttcctacaggaaaattttgaatgacttatcttctgatgcaccaggagtgccaaggattgaagaagagaagtctgaagaggagacttcagcacctgccatcaccactgtaacggtgccaactccaatttaccaaactagcagtggacagtatactgcctctggagacgtacaaacataccagattcgcacagcacccactagcactattgcccctggagttgttatggcatcctccccagcacttcctacacagcctgctgaagaagcagcacgaaagag

SEQ ID NO: 113761 - DNA, 580 bp, Homo sapiens
  Payload ID: 2225
  Gene Symbol: CREB1
  Gene Name: cAMP responsive element binding protein 1
  ENST ID: ENST00000414681
  CDS Start-End: 344-580
gaattcaggaggagttgcccacttgttagtgtgcagggaaatgtgtttttctcatttctagttgaggtcattctttttttttttttttttttaaaccatagcatgtgttccattagttatgaatgtattatttctttagagtcaaaattcacaactcatttctttgaatattatctctgatcctagatgggatcaaaattgccctagatttaggagttttaaaagtttactaggttgtggggaagatgggtttatttttcataaacttgaactagaatgttgacgattataaggactgggacacttcctaaaggtcaaaatattttaaggcgaaagtaactaaatgaccatggaatctggagccgagaaccagcagagtggagatgcagctgtaacagaagctgaaaaccaacaaatgacagttcaagcccagccacagattgccacattagcccaggtatctatgccagcagctcatgcaacatcatctgctcccaccgtaactctagtacagctgcccaatgggcagacagttcaagtccatggagtcattcaggcggcccagccatcagttattcag

SEQ ID NO: 113762 - DNA, 2005 bp, Homo sapiens
  Payload ID: 2225
  Gene Symbol: CREB1
  Gene Name: cAMP responsive element binding protein 1
  Uniprot ID: P16220
  ENST ID: ENST00000430624
  CDS Start-End: 291-1274
agaccactcctcccggcgccgggctcagcccgccttcgccttccctctccccgcggaaccccttctcgtcgcccgaagaaacccgaaggtcttcggcaagttccgtccccagcgcgggggcggggccgctcgagctgctccgggcctagctcggctgtttccgtgcgcggccgctgcgcactcggcactgggcggcgctggctggctccctggctgcggctcctcagtcggcggcggctgctgctgcctgtggcccgggcggctgggagaagcggagtgttggtaactaaatgaccatggaatctggagccgagaaccagcagagtggagatgcagctgtaacagaagctgaaaaccaacaaatgacagttcaagcccagccacagattgccacattagcccaggtatctatgccagcagctcatgcaacatcatctgctcccaccgtaactctagtacagctgcccaatgggcagacagttcaagtccatggagtcattcaggcggcccagccatcagttattcagtctccacaagtccaaacagttcagatttcaactattgcagaaagtgaagattcacaggagtcagtggatagtgtaactgattcccaaaagcgaagggaaattctttcaaggaggccttcctacaggaaaattttgaatgacttatcttctgatgcaccaggagtgccaaggattgaagaagagaagtctgaagaggagacttcagcacctgccatcaccactgtaacggtgccaactccaatttaccaaactagcagtggacagtatattgccattacccagggaggagcaatacagctggctaacaatggtaccgatggggtacagggcctgcaaacattaaccatgaccaatgcagcagccactcagccgggtactaccattctacagtatgcacagaccactgatggacagcagatcttagtgcccagcaaccaagttgttgttcaagctgcctctggagacgtacaaacataccagattcgcacagcacccactagcactattgcccctggagttgttatggcatcctccccagcacttcctacacagcctgctgaagaagcagcacgaaagagagaggtccgtctaatgaagaacagggaagcagctcgagagtgtcgtagaaagaagaaagaatatgtgaaatgtttagaaaacagagtggcagtgcttgaaaatcaaaacaagacattgattgaggagctaaaagcacttaaggacctttactgccacaaatcagattaatttgggatttaaattttcacctgttaaggtggaaaatggactggcttggccacaacctgaaagacaaaataaacattttattttctaaacatttctttttttctatgcgcaaaactgcctgaaagcaactacagaatttcattcatttgtgcttttgcattaaactgtgaatgttccaacacctgcctccacttctcccctcaagaaattttcaacgccaggaatcatgaagagacttctgcttttcaacccccaccctcctcaagaagtaataatttgtttacttgtaaattgatgggagaaatgaggaaaagaaaatctttttaaaaatgatttcaaggtttgtgctgagctccttgattgccttagggacagaattaccccagcctcttgagctgaagtaatgtgtgggccgcatgcataaagtaagtaaggtgcaatgaagaagtgttgattgccaaattgacatgttgtcacattctcattgtgaattatgtaaagttgttaagagacataccctctaaaaaagaactttagcatggtattgaaggaattagaaatgaatttggagtgctttttatgtatgttgtcttcttcaatactgaaaatttgtccttggttcttaaaagcattctgtactaatacagctcttccatagggcagttgttgcttcttaattcagttctgtatgtgttcaacatttttgaatacattaaaagaagtaaccaact

SEQ ID NO: 113763 - DNA, 829 bp, Homo sapiens
  Payload ID: 2225
  Gene Symbol: CREB1
  Gene Name: cAMP responsive element binding protein 1
  ENST ID: ENST00000448277
  CDS Start-End: 75-829
atgtgtgctgtttctctttgcttttgccactactccactctgtgcttgaaattctgtgactcttccctgtatctatgccagcagctcatgcaacatcatctgctcccaccgtaactctagtacagctgcccaatgggcagacagttcaagtccatggagtcattcaggcggcccagccatcagttattcagtctccacaagtccaaacagttcagatttcaactattgcagaaagtgaagattcacaggagtcagtggatagtgtaactgattcccaaaagcgaagggaaattctttcaaggaggccttcctacaggaaaattttgaatgacttatcttctgatgcaccaggagtgccaaggattgaagaagagaagtctgaagaggagacttcagcacctgccatcaccactgtaacggtgccaactccaatttaccaaactagcagtggacagtatattgccattacccagggaggagcaatacagctggctaacaatggtaccgatggggtacagggcctgcaaacattaaccatgaccaatgcagcagccactcagccgggtactaccattctacagtatgcacagaccactgatggacagcagatcttagtgcccagcaaccaagttgttgttcaagctgcctctggagacgtacaaacataccagattcgcacagcacccactagcactattgcccctggagttgttatggcatcctccccagcacttcctacacagcctgctgaagaagcagcacgaaagagagaggtccgtctaatgaagaacagggaagcagctcgagagtgtcgtagaaagaagaaaga

SEQ ID NO: 113764 - DNA, 651 bp, Homo sapiens
  Payload ID: 2225
  Gene Symbol: CREB1
  Gene Name: cAMP responsive element binding protein 1
  ENST ID: ENST00000445803
  CDS Start-End: 105-651
actgggcggcgctggctggctccctggctgcggctcctcagtcggcggcggctgctgctgcctgtggcccgggcggctgggagaagcggagtgttggtaactaaatgaccatggaatctggagccgagaaccagcagagtggagatgcagctgtaacagaagctgaaaaccaacaaatgacagttcaagcccagccacagattgccacattagcccaggtatctatgccagcagctcatgcaacatcatctgctcccaccgtaactctagtacagctgcccaatgggcagacagttcaagtccatggagtcattcaggcggcccagccatcagttattcagtctccacaagtccaaacagttcagtcttcctgtaaggacttaaaaagacttttctccggaacacagatttcaactattgcagaaagtgaagattcacaggagtcagtggatagtgtaactgattcccaaaagcgaagggaaattctttcaaggaggccttcctacaggaaaattttgaatgacttatcttctgatgcaccaggagtgccaaggattgaagaagagaagtctgaagaggagacttcagcacctgccatcaccactgtaacggtgccaactccaatttaccaaactagcagtggacagtata

SEQ ID NO: 113765 - DNA, 893 bp, Homo sapiens
  Payload ID: 2225
  Gene Symbol: CREB1
  Gene Name: cAMP responsive element binding protein 1
  ENST ID: ENST00000418081
  CDS Start-End: 1-545
gagtcattcaggcggcccagccatcagttattcagtctccacaagtccaaacagttcagtcttcctgtaaggacttaaaaagacttttctccggaacacagatttcaactattgcagaaagtgaagattcacaggagtcagtggatagtgtaactgattcccaaaagcgaagggaaattctttcaaggaggccttcctacaggaaaattttgaatgacttatcttctgatgcaccaggagtgccaaggattgaagaagagaagtctgaagaggagacttcagcacctgccatcaccactgtaacggtgccaactccaatttaccaaactagcagtggacagtatattgccattacccagggaggagcaatacagctggctaacaatggtaccgatggggtacagggcctgcaaacattaaccatgaccaatgcagcagccactcagccgggtactaccattctacagtatgcacagaccactgatggacagcagatcttagtgcccagcaaccaagttgttgttcaaggtactcaaaaattgtaaagcaggatgtcagtgaatttgaattctgaacgtcagtttgaagatgagtctacttgaaattttttaatatgaatttaccaatatcaaaggaagacactgaggactatactctatctaggaagatcatccaagctgtgccccacttaccttttagacttaagctgcctctggagacgtacaaacataccagattcgcacagcacccactagcactattgcccctggagttgttatggcatcctccccagcacttcctacacagcctgctgaagaagcagcacgaaagagagaggtccgtctaatgaagaacagggaagcagctcgagagtgtcgtagaaagaagaaaga

SEQ ID NO: 113766 - DNA, 1832 bp, Homo sapiens
  Payload ID: 2226
  Gene Symbol: CREB3
  Gene Name: cAMP responsive element binding protein 3
  Uniprot ID: O43889
  ENST ID: ENST00000353704
  CDS Start-End: 439-1554
gcgcaatccggagaggacgccaggacgacgcccgagttccctttcaggctagaactcttcctttttctagcttggggtagaaggcggagccggagccccggaacccccgccctcggggtgcgaggcggcagcagggccgtcccctacatttgcatagcccctgggacgtggcgctgcacccaagcctcttctcagttggagggaactccaagtcccacagtgccacggggtggggtgcgtcactttcgctgcgttggaggctgaggagaattgagcctgggaggcgggtccggagagggctatggaaagccgccggcggggaatcccggccgtagagggacagtggataggtgcccgaggcctacagctggcctggggctcgtgtctgggcttcggacgttggggcccggtggcccaccctttccgtagttgtcccaaatggagctggaattggatgctggtgaccaagacctgctggccttcctgctagaggaaagtggagatttggggacggcacccgatgaggccgtgagggccccactggactgggcgctgccgctttctgaggtaccgagcgactgggaagtagatgatttgctgtgctccctgctgagtcccccagcgtcgttgaacattctcagctcctccaacccctgccttgtccaccatgaccacacctactccctcccacgggaaactgtctctatggatctagagagtgagagctgtagaaaagaggggacccagatgactccacagcatatggaggagctggcagagcaggagattgctaggctagtactgacagatgaggagaagagtctattggagaaggaggggcttattctgcctgagacacttcctctcactaagacagaggaacaaattctgaaacgtgtgcggaggaagattcgaaataaaagatctgctcaagagagccgcaggaaaaagaaggtgtatgttgggggtttagagagcagggtcttgaaatacacagcccagaatatggagcttcagaacaaagtacagcttctggaggaacagaatttgtcccttctagatcaactgaggaaactccaggccatggtgattgagatatcaaacaaaaccagcagcagcagcacctgcatcttggtcctactagtctccttctgcctcctccttgtacctgctatgtactcctctgacacaagggggagcctgccagctgagcatggagtgttgtcccgccagcttcgtgccctccccagtgaggacccttaccagctggagctgcctgccctgcagtcagaagtgccgaaagacagcacacaccagtggttggacggctcagactgtgtactccaggcccctggcaacacttcctgcctgctgcattacatgcctcaggctcccagtgcagagcctcccctggagtggccattccctgacctcttctcagagcctctctgccgaggtcccatcctccccctgcaggcaaatctcacaaggaagggaggatggcttcctactggtagcccctctgtcattttgcaggacagatactcaggctagatatgaggatatgtggggggtctcagcaggagcctggggggctccccatctgtgtccaaataaaaagcggtgggcaagggctggccgcagctcctgtgccctgtcaggacgactgagggctcaaacacaccacacttaatggctttctgggtcttttatttgtacccatgtgtctgtcacaccatgaatgtacctggggaaatcaactgacctccctgaacatttcacgcagtcagggaacaggtgaggaaagaaataaataagtgattctaatgctg

SEQ ID NO: 113767 - DNA, 1919 bp, Homo sapiens
  Payload ID: 2226
  Gene Symbol: CREB3
  Gene Name: cAMP responsive element binding protein 3
  ENST ID: ENST00000613913
  CDS Start-End: 454-1638
ggaagcgagggtgcggcgcaatccggagaggacgccaggacgacgcccgagttccctttcaggctagaactcttcctttttctagcttggggtagaaggcggagccggagccccggaacccccgccctcggggtgcgaggcggcagcagggccgtcccctacatttgcatagcccctgggacgtggcgctgcacccaagcctcttctcagttggagggaactccaagtcccacagtgccacggggtggggtgcgtcactttcgctgcgttggaggctgaggagaattgagcctgggaggcgggtccggagagggctatggaaagccgccggcggggaatcccggccgtagagggacagtggataggtgcccgaggcctacagctggcctggggctcgtgtctgggcttcggacgttggggcccggtggcccaccctttccgtagttgtcccaaatggagctggaattggatgctggtgaccaagacctgctggccttcctgctagaggaaagtggagatttggggacggcacccgatgaggccgtgagggccccactggactgggcgctgccgctttctgaggtaccgagcgactgggaagtagatgatttgctgtgctccctgctgagtcccccagcgtcgttgaacattctcagctcctccaacccctgccttgtccaccatgaccacacctactccctcccacgggaaactgtctctatggatctaggtgagtctgaaataagtttggggaggacagggttcatgggcctggctattcatactttcccttttgcagagagtgagagctgtagaaaagaggggacccagatgactccacagcatatggaggagctggcagagcaggagattgctaggctagtactgacagatgaggagaagagtctattggagaaggaggggcttattctgcctgagacacttcctctcactaagacagaggaacaaattctgaaacgtgtgcggaggaagattcgaaataaaagatctgctcaagagagccgcaggaaaaagaaggtgtatgttgggggtttagagagcagggtcttgaaatacacagcccagaatatggagcttcagaacaaagtacagcttctggaggaacagaatttgtcccttctagatcaactgaggaaactccaggccatggtgattgagatatcaaacaaaaccagcagcagcagcacctgcatcttggtcctactagtctccttctgcctcctccttgtacctgctatgtactcctctgacacaagggggagcctgccagctgagcatggagtgttgtcccgccagcttcgtgccctccccagtgaggacccttaccagctggagctgcctgccctgcagtcagaagtgccgaaagacagcacacaccagtggttggacggctcagactgtgtactccaggcccctggcaacacttcctgcctgctgcattacatgcctcaggctcccagtgcagagcctcccctggagtggccattccctgacctcttctcagagcctctctgccgaggtcccatcctccccctgcaggcaaatctcacaaggaagggaggatggcttcctactggtagcccctctgtcattttgcaggacagatactcaggctagatatgaggatatgtggggggtctcagcaggagcctggggggctccccatctgtgtccaaataaaaagcggtgggcaagggctggccgcagctcctgtgccctgtcaggacgactgagggctcaaacacaccacacttaatggctttctgggtcttttatttgtacccatgtgtctgtcacaccatgaatgtacctggggaaatcaactgacctccctgaacatttcacgcagtcagggaacaggtgaggaaagaaataaataagtgattctaatgctgcct

SEQ ID NO: 113768 - DNA, 561 bp, Homo sapiens
  Payload ID: 2227
  Gene Symbol: CREB3L1
  Gene Name: cAMP responsive element binding protein 3-like 1
  ENST ID: ENST00000534787
  CDS Start-End: 245-561
ggcgcgctgaggctgcttctggtcagggaaaccattctcctacaccgaccccagcaggcagctgcgcccccagagctttaccctgtctctgcactgaccttggggaaggaatttagggaggggtaaaacaaggctagagctggtaccattactgccccgggagagtcccctctgccgccaccagagacagccaccaaagcgccccacgcactttcctgagcacctggaccactttacggagaacatggaggacttctccaatgacctgttcagcagcttctttgatgaccctgtgctggatgagaagagccctctattggacatggaactggactcccctacgccaggcatccaggcggagcacagctactccctgagcggcgactcagcgccccagagcccccttgtgcccatcaagatggaggacaccacccaagatgcagagcatggagcatgggcgctgggacacaaactgtgctccatcatggtgaagcaggagcagagcccggagctgcccgtggaccctctggctgccccctcggccatggctgccgcggccgc

SEQ ID NO: 113769 - DNA, 528 bp, Homo sapiens
  Payload ID: 2227
  Gene Symbol: CREB3L1
  Gene Name: cAMP responsive element binding protein 3-like 1
  ENST ID: ENST00000530518
  CDS Start-End: 1-372
atctccacctccccactcctcactgcccctcacaaattacaggggacatcagggccactgctcctgacagaggaggagaagcggaccctgattgctgagggctaccccatccccacaaaactccccctcaccaaagccgaggagaaggccttgaagagagtccggaggaaaatcaagaacaagatctcagcccaggagagccgtcgtaagaagaaggagtatgtggagtgtctagaaaagaaggtggagacatttacatctgagaacaatgaactgtggaagaaggtggagaccctggagaatgccaacagcttctccagcgggatccagccactcctctgttccctgattggcctggagaatcccacctgaccccccaccccacccctctgtctctggctggggttcctttctggcccaaagtaggtccaagcccttgtagttatttcgccacctgctgtacattgtgggaactgcaacccctacgtgcccgtttgggtggagagagattaaacatttgcccaccaa

SEQ ID NO: 113770 - DNA, 2687 bp, Homo sapiens
  Payload ID: 2227
  Gene Symbol: CREB3L1
  Gene Name: cAMP responsive element binding protein 3-like 1
  Uniprot ID: Q96BA8
  ENST ID: ENST00000621158
  CDS Start-End: 452-2011
cagagaggaaagtgacagaagacgtgcggagggagacgcagagacagaggagaggccggcagccacccagtctcgggggagcacttagctcccccgccccggctcccaccctgtccggggggctcctgaagccctcagccccaaccccgggctccccatggaagccagctgtgccccaggaggagcaggaggaggtggagtcggctgaatgcccacggtgcgcccggggcccctgagcccatcccgctcctagccgctgccctaaggcccccgcgcgccccgcgccccccacccggggccgcgccgcctccgtccgcccctcccccggggcttcgccccggacctgccccccgcccgtttgccagcgctcaggcaggagctctggactgggcgcgccgccgccctggagtgagggaagcccagtggaagggggtcccgggagccggctgcgatggacgccgtcttggaacccttcccggccgacaggctgttccccggatccagcttcctggacttgggggatctgaacgagtcggacttcctcaacaatgcgcactttcctgagcacctggaccactttacggagaacatggaggacttctccaatgacctgttcagcagcttctttgatgaccctgtgctggatgagaagagccctctattggacatggaactggactcccctacgccaggcatccaggcggagcacagctactccctgagcggcgactcagcgccccagagcccccttgtgcccatcaagatggaggacaccacccaagatgcagagcatggagcatgggcgctgggacacaaactgtgctccatcatggtgaagcaggagcagagcccggagctgcccgtggaccctctggctgccccctcggccatggctgccgcggccgccatggccaccaccccgctgctgggcctcagccccttgtccaggctgcccatcccccaccaggccccgggagagatgactcagctgccagtgatcaaagcagagcctctggaggtgaaccagttcctcaaagtgacaccggaggacctggtgcagatgcctccgacgccccccagcagccatggcagtgacagcgacggctcccagagtccccgctctctgcccccctccagccctgtcaggcccatggcgcgctcctccacggccatctccacctccccactcctcactgcccctcacaaattacaggggacatcagggccactgctcctgacagaggaggagaagcggaccctgattgctgagggctaccccatccccacaaaactccccctcaccaaagccgaggagaaggccttgaagagagtccggaggaaaatcaagaacaagatctcagcccaggagagccgtcgtaagaagaaggagtatgtggagtgtctagaaaagaaggtggagacatttacatctgagaacaatgaactgtggaagaaggtggagaccctggagaatgccaacaggaccctgctccagcagctgcagaaactccagactctggtcaccaacaagatctccagaccttacaagatggccgccacccagactgggacctgcctcatggtggcagccttgtgctttgttctggtgctgggctccctcgtgccctgccttcccgagttctcctccggctcccagactgtgaaggaagaccccctggccgcagacggcgtctacacggccagccagatgccctcccgaagcctcctattctacgatgacggggcaggcttatgggaagatggccgcagcaccctgctgcccatggagcccccagatggctgggaaatcaaccccggggggccggcagagcagcggccccgggaccacctgcagcatgatcacctggacagcacccacgagaccaccaagtacctgagtgaggcctggcctaaagacggtggaaacggcaccagccccgacttctcccactccaaggagtggttccacgacagggatctgggccccaacaccaccatcaaactctcctaggccatgccaagacccaggacataggacggacccctggtacccagaagaggagttcttgctcactaacccggatccgcctcgtgcccctgcctcctggagcttcccattccaggagaaaaggctccacttcccagcccttccttgcccctgacatttggactcttcccttgggccgaccactctgttctcattctccttcccaccaacatccatccgtccttctcagacaaaccactcactgggtaccccacctcctctctcatatgcccaacacgaccactgcctccctgcccccacacctgcacccaaacagacacatcaacgcaccccactcacagacaccccttaccccacccccactgtacagagaccaagaacagaaattgtttgtaaataatgaaccttattttttattattgccaatcccctaagatattgtattttacaaatctccctcttcccttcgcccctcccttgttttatattttatgaagttagtgcgggctttgctgctccctggcccaggaaagagggactacctgaccctcacctggcacccccctgctgctgcccaagccgctgggcctttttaattgccaaactgctctcttcatcagctcagcacatgctttaagaaagcaaaaccaaaaaaaaaaaaaaaaagatgcagcatcaa

SEQ ID NO: 113771 - DNA, 7412 bp, Homo sapiens
  Payload ID: 2228
  Gene Symbol: CREB3L2
  Gene Name: cAMP responsive element binding protein 3-like 2
  Uniprot ID: Q70SY1
  ENST ID: ENST00000330387
  CDS Start-End: 353-1915
gtttgtgtctggagccgtagcggcaagtgggcttgcggctaagggattttcctgggatgagagcgggtcttctgccttcattttggatgcacatcccgctttagccccggcagcctttggtccggctcgtgtccctggggattctcggatctccgaggacaccggacgggagcgcttggccatcctctctccggcagaggagcagacgtttgctttccaagtgcaaaactacagacacgcgcgcgcacacacgcaagcacacgcggagagagaggaaccttgccggtccgaggcagctctgcgcgtcccctcctgcgcttagcatcctcggcccagcgcggcccgcaccgccatggaggtgctggagagcggggagcagggcgtgctgcagtgggaccgcaagctgagcgagctgtcagagcccggggacggcgaggccctcatgtaccacacgcacttctcagaacttctggatgagttttcccagaacgtcttgggtcagctcctgaatgatcctttcctctcagagaagagtgtgtcaatggaggtggaaccttccccgacgtccccggcgcctctcatccaggctgagcacagctactccctgtgcgaggagcctcgggcccagtcgcccttcacccacattaccaccagtgacagcttcaatgacgatgaggtggaaagtgagaaatggtacctgtctacagacttcccttcaacatccatcaagacagagccagttacagacgaaccacccccaggactcgttccgtctgtcactctgaccatcacagccatctccaccccgttggaaaaggaggaacctcctctggaaatgaacactggggttgattcctcgtgccagaccattattcctaaaattaagctggagcctcatgaagtggatcagtttctaaacttctctcctaaagaagccccagtggaccacctgcatttgccgcccacccctccgagcagtcacggcagtgactcagagggcagcctgagtcccaacccacgcctgcaccccttcagcctgcctcagacccacagcccctccagagctgcaccccgggccccctccgccctctccagctcccctctcctcacggctcctcataaactgcagggatcaggccctctggtcctgacagaggaggagaagaggaccctgatcgctgagggctatcccatccccaccaaattgcccctgtcaaaatcagaggagaaggccctgaagaaaattcggaggaagatcaagaataagatttctgctcaggaaagtaggagaaagaagaaagaatacatggacagcctggagaaaaaagtggagtcttgttcaactgagaacttggagcttcggaagaaggtagaggttctagagaacactaataggactctccttcagcaactccagaagcttcagactttggtgatgggcaaggtttctcgaacctgcaagttagctggcacgcagactggcacctgcctcatggttgtggtgctgtgctttgccgttgcattcggcagcttctttcaaggctacgggccctatccttctgccaccaagatggctctgcccagccagcattccctgcaggagccctacacagcctccgtggtgagatccagaaacctgctgatctacgaggaacattctcccccagaggagtcatccagcccgggctcggctggggagctggggggctgggatagaggttcctccctgctcagggtgtcagggctggagtccaggccggatgtggatcttccccatttcattatctcgaatgagaccagcctggagaagtcagtgcttttggagctgcagcagcacctggtcagcgccaaactggaggggaatgaaacactaaaagttgtagaactcgacagaagagtgaacaccactttctaaagaggctgcctgcaccccctccctttcccttaactctacttttacatccccaaaccacctttgtcatcagcttttcctctttgccactggatcttcatggagacatgggcaagcattagtggcttcagattggagaccagcctgggacttccctgcagtgagagagcatctccccctggtccatgcccctcctgtgcagaagggagcctgcatccctcccttcctttctcttactgccataggaaattattttaggggttggaggtgggacaagcaggcttgtttccaccaatagtgccaaaaagatattgcctaatgtgcacctgtgaggtgtaaccccccgctttggagacgagatggctcttgttcagtcaagaccccagactctggccacaaaaatgccataatgcctgttggtatttggcaaagcactgacccgtgtcctccgttgctcgcactggggtctctggtgtgaacacccccgacagcagccctccgcccactctgccccctgggagccctcgctggatcgtctcgtctcctgcagcagcactggcaggcgagggctctcgttcatattctcaggccgcaagtgcaatgcctgaggggatcaggcttttctactccaggcaaacctgccccatcttgtcgcttttaggacctcccacaacctggttccccacacatccatagttctgcctccccagcttctcctccccagttgtaaatagtatttattagcttgccgaggcttcctgctagcaaccacactgaagagatcgatgcctcctttcaagctagccaagttttctgcgagccttcagagctaggagggcaccctaggctctgggatcccgtgtctttccagacaatgttttgtttcctttcctttgttttttcttttaactggaataattaccattgaaaaagaagttcctttgagcatgtatgtgtctgcctctaggatgagctcagagcgagagatgacacaatgcctcactcaggccccgggctccctggccacaagctttttctatcctgttttcatgacagagaaggggaagccctgttctgacaacagacatttcagacaaccttgctggctttccacacctgcctggccccctcctccctccacacttccactttgtcctcctcgtcccctacctcaacaaagcagggtggggtaggtgacatttgtgtatccacattcttacctttggtagtcaggtttggctactttgcagctcgcccaaagagatacaacctaatccccaacctacttttagtttttttgttttttttttatggttaaaagtaacttttgtagtttaaaaaaatctttcctctttcatataaataagaagtggaaattgcctttttattgtgtaatgtagaaaaccctcaagtgttttttccgagcttgggaaagattttgtgtaggaaatgtgcatagagtttgtattttatttttattagcagctgaaatgcctttggttttggcttctctctctccctctctctctctgtctctccttctctctctccccccaccacccacccccacacacgtcatctgcattgttattggagcctgtacttagagggattaagcccacaccctggcttccattccatatcaggtacaggatttgatgttattaacatttgtcgtcatacctcataagtcggtccctgccttgtctgtctaggcccatttggggctccctgtgagtgattcccctctctctgctatgctggagacggttccagcctggaaagcggccaagttcatcttctcactgtgagtggaagctggatcgggcccccgtagtcctggcagccctgttgtctggagggttcttgttgtccctcccattagccagggcggagactgtctgagctgtgcaggaggagggttgctagtaggttctgcttctgcttctctctgctccactgtctgcagcccagatcctgttgggcctggctggtgtctggtaaccatgggcctccactgacccatccctctcttttaaactgtcaggtcattatcaggcataggcagcctatagggcccaaagaaggcaaaaagataagatttactcaagtagcatttgggcaatgaggaaggaaaggtttcaaatttaggggcagaagtgagagaatgagccaacccatgtacctgctgcaactgaaccagactgggttttcaaggctcccagacgtagagtaggaaacgtgctcttctaaatgaggagggagaagataaaggaaacttctagcccctgtccttagtgctttgaggattttattttctcccttactacgcttgcttgacgtcactctctctcgacctccaaacagcaggactctttctctgggaaaccatccttccaaaacggaatctatgtagacaatgggacgttaggcagagagctcagatggcccttttaagggggctccaagaaccaacatcactgctcttttagataaacctctgccctccactccttgcttgagtgggttaaaggaactaacagttgtccctttaggaggacaaaatggggtcaagaggacacagaagagttgtatagcaccagattggttccaaatagttaatggatgtgtgcacattttctgttcagggattaagaccagaatatcagtggatttgttttccccaccaagtggcctcttagactagtcattaacttatgattagctctaaagatttcaaatagtggcagacagtgtcttctgaatgtaagttttgagaaatacgagtctgtcagagcggccataagccataaagagtcaatctcttaattatatttttcatcatgtaaacaagtttcccatttccctttcttagattgcaccagtgaaggagatgttttgcaaagattcagagaactaatttttcactggataagacctgagtaacccagaccccccaccgtggttcttttcacagccctcgactttgcacttaaaaagggatattgtaaatgaaaggctgcagtgccagttttaagaaagaatttctgtgaagtgtgaggactctggagtctagctcacataaagagagtgttatataaaaatccgacagctgaactaggttgctcttttttggcagggagtggggatgagatttgacaccaatatgggcaaaattagataaccttttggttaatataaatgattttgatttggaggcctaatttgtagattgtgaaagcagcttttagtttaacttattcacagaccccttataattaccatgtttttttttttcttcctaaatctcttggttcagcttgtgaatcttacgtgcccgtaaagttgggatgttgaattggctcttctttgttctggcagtgagtcaagtgtccagcattttttcataagtgttttttaaaattgttctccagcattttatggctcctccctcccatgtcctcagacccagcaaaagcgtagaggcagaattagaggcctctccaggccagctcctctgcccacatgtcatacaaggtgtgaatttgagcacagtccagaaatggagacatcccacccccagttgaataatggcccattcatgccaaccttgccaacacggagagggcagagatgcactagaagaccttcatcctccccttcctctgccccaagtcactacagttggttctattgaagccagtctttaagaaacctgggttaaagacaccagcacttctgcttgctgggctggctggacctgtgaagccatgggcaggtagtgccctcttgagagtcattttatttggccaccttcaggtgagactatccatagacacatgctaggataggccccgctgggagggcagttacaggagagagtaggtggtggtgacgtgagggctgtgaaggatccagagacaagacttagatgtttcgttcattcactcactcattcagttactcctaagacttttcagtttcataaggaagagtgttgcctgaggccctagggaatattggggaatagaagggattgaggaaacattaataatagttattcaaaagacccaaatgcttatacttctctctcccttcttctctctctgacacacacacacacacacacacacacacacacacacacgtgcacattcctcccttacatgctcatttgtgccttaaatgtgccttataggtaaatccaggatgactgaggaatccctcgtcactgggagattttgtatatattcttttattattagattgagttgggtgtggggaaaaatttttttctgaaggctcaaaagtggtttcctaaaagtgagccactatcagatttgcacatcaggagaaaagaaatagggttacgtccattaggaaaatcccagtttgcaggagtgcaatcacatcaaaaaaacaaccagccaggattaaaggtattataaatcctcatagcggaacatttctcagggcaaaggaacctggctcatttgaagattaatgttccatgcctttgtggtcaaagggtcagcacttaacacaggaaaaaactaggtgttgttttgttttgttattttggacaacataaaattcaggaatgttttatttagccttggtttctagaaggaagggaaataatatttcttgagcatttactagggtgttgcgtgctgtgctaagtaaattttaagtctttcagttttatagatacggaaaacaagggtgactctttaccacaggatgaataaagaactaagtaatatgggaaatgcagcaatttctggactagctgagccgattccttcctgtgagcacactgtaagctttcaagttctctgggcaggaattacagcacctgtcccctgcaatggccctgctgtgtgatgctcatcgcttcccttcgtgctggagcagtcccccaggtgtccatctcctatctttttgttccaatcttctgtgagttccagctagcaggctttacatctggggaaaggaaaaccaggggttttagctctgttctctgctcccatccttcgctcaccagctgagtgagaacatgaactttttgcaccatgtacccatggcttacactacttagaaaatcaccttttcagataaaacagtttatgagttcatagagaacaccagcactctttgacaaaactgtgagtgaccctttttaaacaatgctgagcaggccctgagctataatcaacggtgagctttaatgtctatgctgacagttaggttttgctctcttttgtaacaggttacgtagaccagcagtgtttaaatctaaatacgttgtgagtctgttatctgtcctatcgcgttttttaaatgactttttattctttatcatagctaagtaaataccaaaaaaaaaaaaaagctttgtaggacacttgtacttagtttgggaaaaaaaaataaattgaaattgttatgcttttgtatttccatttcttgcaaataaatattttttcttaaatagtaa

SEQ ID NO: 113772 - DNA, 776 bp, Homo sapiens
  Payload ID: 2228
  Gene Symbol: CREB3L2
  Gene Name: cAMP responsive element binding protein 3-like 2
  ENST ID: ENST00000458726
  CDS Start-End: 216-773
gatgggcccactctggcccgatcctggcaccagcaatgggatgttgacctgtctgctgagtcttggagcccaccactgccaaggacacccagctggagctaatttgctgggctgagtcatagcatctgcacttctcagaacttctggatgagttttcccagaacgtcttgggtcagctcctgaatgatcctttcctctcagagaagagtgtgtcaatggaggtggaaccttccccgacgtccccggcgcctctcatccaggctgagcacagctactccctgtgcgaggagcctcgggcccagtcgcccttcacccacattaccaccagtgacagcttcaatgacgatgaggtggaaagtgagaaatggtacctgtctacagacttcccttcaacatccatcaagacagagccagttacagacgaaccacccccaggactcgttccgtctgtcactctgaccatcacagccatctccaccccgttggaaaaggaggaacctcctctggaaatgaacactggggttgattcctcgtgccagaccattattcctaaaattaagctggagcctcatgaagtggatcagtttctaaacttctctcctaaagaaggtctgtctgccctccctgtgtccctttgggttatggatatggtctctgggtctacagagagggaatatggcgagagagctgggatgagtttgtaccacagatgttgtagctggctttatgaaatagctctgttcttaaaaaataaaaattttgcttccaaataaaaa

SEQ ID NO: 113773 - DNA, 719 bp, Homo sapiens
  Payload ID: 2228
  Gene Symbol: CREB3L2
  Gene Name: cAMP responsive element binding protein 3-like 2
  ENST ID: ENST00000420629
  CDS Start-End: 1-719
aaccttccccgacgtccccggcgcctctcatccaggctgagcacagctactccctgtgcgaggagcctcgggcccagtcgcccttcacccacattaccaccagtgacagcttcaatgacgatatgttacataaatagtaaatggatgtacggtccgccctccctgtgcttgggttttgcatcctatgaatactgtattttcaatccacgtttatttgaaaaaaatctgcttgtgagtggacccgcatggttcaaaacccgtgttgttcaaggaccaactgcgtatgtgtttttctcatatgaggtggaaagtgagaaatggtacctgtctacagacttcccttcaacatccatcaagacagagccagttacagacgaaccacccccaggactcgttccgtctgtcactctgaccatcacagccatctccaccccgttggaaaaggaggaacctcctctggaaatgaacactggggttgattcctcgtgccagaccattattcctaaaattaagctggagcctcatgaagtggatcagtttctaaacttctctcctaaagaaggtctgtctgccctccctgtgtccctttgggttatggatatggtctctgggtctacagagagggaatatggcgagagagctgggatgagtttgtaccacagatgttgtagctggctttatgaaatagctctgttcttaaaaaataaaaattttgcttc

SEQ ID NO: 113774 - DNA, 2360 bp, Homo sapiens
  Payload ID: 2228
  Gene Symbol: CREB3L2
  Gene Name: cAMP responsive element binding protein 3-like 2
  Uniprot ID: Q70SY1
  ENST ID: ENST00000456390
  CDS Start-End: 363-1745
gtccctcaaagtttgtgtctggagccgtagcggcaagtgggcttgcggctaagggattttcctgggatgagagcgggtcttctgccttcattttggatgcacatcccgctttagccccggcagcctttggtccggctcgtgtccctggggattctcggatctccgaggacaccggacgggagcgcttggccatcctctctccggcagaggagcagacgtttgctttccaagtgcaaaactacagacacgcgcgcgcacacacgcaagcacacgcggagagagaggaaccttgccggtccgaggcagctctgcgcgtcccctcctgcgcttagcatcctcggcccagcgcggcccgcaccgccatggaggtgctggagagcggggagcagggcgtgctgcagtgggaccgcaagctgagcgagctgtcagagcccggggacggcgaggccctcatgtaccacacgcacttctcagaacttctggatgagttttcccagaacgtcttgggtcagctcctgaatgatcctttcctctcagagaagagtgtgtcaatggaggtggaaccttccccgacgtccccggcgcctctcatccaggctgagcacagctactccctgtgcgaggagcctcgggcccagtcgcccttcacccacattaccaccagtgacagcttcaatgacgatgaggtggaaagtgagaaatggtacctgtctacagacttcccttcaacatccatcaagacagagccagttacagacgaaccacccccaggactcgttccgtctgtcactctgaccatcacagccatctccaccccgttggaaaaggaggaacctcctctggaaatgaacactggggttgattcctcgtgccagaccattattcctaaaattaagctggagcctcatgaagtggatcagtttctaaacttctctcctaaagaagccccagtggaccacctgcatttgccgcccacccctccgagcagtcacggcagtgactcagagggcagcctgagtcccaacccacgcctgcaccccttcagcctgcctcagacccacagcccctccagagctgcaccccgggccccctccgccctctccagctcccctctcctcacggctcctcataaactgcagggatcaggccctctggtcctgacagaggaggagaagaggaccctgatcgctgagggctatcccatccccaccaaattgcccctgtcaaaatcagaggagaaggccctgaagaaaattcggaggaagatcaagaataagatttctgctcaggaaagtaggagaaagaagaaagaatacatggacagcctggagaaaaaagtggagtcttgttcaactgagaacttggagcttcggaagaaggtagaggttctagagaacactaataggactctccttcagcaactccagaagcttcagactttggtgatgggcaaggtttctcgaacctgcaagttagctggcacgcagactggcacctgcctcatggttgtggtgctgtgctttgccgttgcattcggcagcttctttcaaggctacgggccctatccttctgccaccaagatggctctgcccagccagcattccctgcaggagccctacacagcctccgtgggtaagacagcatgtggcaagttgggcagggtcttgttttatttccctagagctgggtttctcagtcttccaaaaggaatcttctgtgaaagtccaatgtttaaaaagtggtaaaagtggagcttctccctttgaagaggcaagtgggggttcccctggggcccctcatccactggactgcggcatcactgggaattctccagagcttgacagagcacagtttgcaaactgctgttctagactgtgttccctgatccattctgacatctaatttttgagttctgataagggagagggaagcagatgagggaaagagtctgtcgctttctgtgacgttttaagagaactgctgtgtttctgcctccactgagtggaattgtatgagtaatgtaatgcaatgtatatagtaagggcttgtaaagtgaaattaaataaacagcaaggtcagggccgggcgtggtggctcacgcctgtaaccccagcactttgggaggccgaggcgggcagatcacgaggtcaggagattgagactatcctggctaacactgtgaaaccccatcgccactaaaaaatacaaaaaaattagccgggcgtggtggcaggtacctgtagtcccagctactggggaggctgaggcaggagaatattgtgaacctgggaggcggagtttgcagtgagccgagatcgcaccactgcactccagcctagacgacagagcgagactccatc

SEQ ID NO: 113775 - DNA, 1105 bp, Homo sapiens
  Payload ID: 2228
  Gene Symbol: CREB3L2
  Gene Name: cAMP responsive element binding protein 3-like 2
  Uniprot ID: Q70SY1
  ENST ID: ENST00000452463
  CDS Start-End: 343-1089
ggagccgtagcggcaagtgggcttgcggctaagggattttcctgggatgagagcgggtcttctgccttcattttggatgcacatcccgctttagccccggcagcctttggtccggctcgtgtccctggggattctcggatctccgaggacaccggacgggagcgcttggccatcctctctccggcagaggagcagacgtttgctttccaagtgcaaaactacagacacgcgcgcgcacacacgcaagcacacgcggagagagaggaaccttgccggtccgaggcagctctgcgcgtcccctcctgcgcttagcatcctcggcccagcgcggcccgcaccgccatggaggtgctggagagcggggagcagggcgtgctgcagtgggaccgcaagctgagcgagctgtcagagcccggggacggcgaggccctcatgtaccacacgcacttctcagaacttctggatgagttttcccagaacgtcttgggtcagctcctgaatgatcctttcctctcagagaagagtgtgtcaatggaggtggaaccttccccgacgtccccggcgcctctcatccaggctgagcacagctactccctgtgcgaggagcctcgggcccagtcgcccttcacccacattaccaccagtgacagcttcaatgacgatgaggtggaaagtgagaaatggtacctgtctacagacttcccttcaacatccatcaagacagagccagttacagacgaaccacccccaggactcgttccgtctgtcactctgaccatcacagccatctccaccccgttggaaaaggaggaacctcctctggaaatgaacactggggttgattcctcgtgccagaccattattcctaaaattaagctggagcctcatgaagtggatcagtttctaaacttctctcctaaagaaggtctgtctgccctccctgtgtccctttgggttatggatatggtctctgggtctacagagagggaatatggcgagagagctgggatgagtttgtaccacagatgttgtagctggctttatgaaatagctctgttcttaaaaaataaaaattttgcttccaaataaaaattttgcaagctaa

SEQ ID NO: 113776 - DNA, 7133 bp, Homo sapiens
  Payload ID: 2228
  Gene Symbol: CREB3L2
  Gene Name: cAMP responsive element binding protein 3-like 2
  ENST ID: ENST00000616381
  CDS Start-End: 123-575
acagacacgcgcgcgcacacacgcaagcacacgcggagagagaggaaccttgccggtccgaggcagctctgcgcgtcccctcctgcgcttagcatcctcggcccagcgcggcccgcaccgccatggaggtgctggagagcggggagcagggcgtgctgcagtgggaccgcaagctgagcgagctgtcagagcccggggacggcgaggccctcatgtaccacacgcacttctcagaacttctggatgagttttcccagaacgtcttgggtcagctcctgaatgatcctttcctctcagagaagagtgtgtcaatggaggtggaaccttccccgacgtccccggcgcctctcatccaggctgagcacagctactccctgtgcgaggagcctcgggcccagtcgcccttcacccacattaccaccagtgacagcttcaatgacgatgaggtggaaagtgagaaatggtacctgtctacagacttcccttcaacatccatctgtcactctgaccatcacagccatctccaccccgttggaaaaggaggaacctcctctggaaatgaacactggggttgattcctcgtgccagaccattattcctaaaattaagctggagcctcatgaagtggatcagtttctaaacttctctcctaaagaagccccagtggaccacctgcatttgccgcccacccctccgagcagtcacggcagtgactcagagggcagcctgagtcccaacccacgcctgcaccccttcagcctgcctcagacccacagcccctccagagctgcaccccgggccccctccgccctctccagctcccctctcctcacggctcctcataaactgcagggatcaggccctctggtcctgacagaggaggagaagaggaccctgatcgctgagggctatcccatccccaccaaattgcccctgtcaaaatcagaggagaaggccctgaagaaaattcggaggaagatcaagaataagatttctgctcaggaaagtaggagaaagaagaaagaatacatggacagcctggagaaaaaagtggagtcttgttcaactgagaacttggagcttcggaagaaggtagaggttctagagaacactaataggactctccttcagcaactccagaagcttcagactttggtgatgggcaaggtttctcgaacctgcaagttagctggcacgcagactggcacctgcctcatggttgtggtgctgtgctttgccgttgcattcggcagcttctttcaaggctacgggccctatccttctgccaccaagatggctctgcccagccagcattccctgcaggagccctacacagcctccgtggtgagatccagaaacctgctgatctacgaggaacattctcccccagaggagtcatccagcccgggctcggctggggagctggggggctgggatagaggttcctccctgctcagggtgtcagggctggagtccaggccggatgtggatcttccccatttcattatctcgaatgagaccagcctggagaagtcagtgcttttggagctgcagcagcacctggtcagcgccaaactggaggggaatgaaacactaaaagttgtagaactcgacagaagagtgaacaccactttctaaagaggctgcctgcaccccctccctttcccttaactctacttttacatccccaaaccacctttgtcatcagcttttcctctttgccactggatcttcatggagacatgggcaagcattagtggcttcagattggagaccagcctgggacttccctgcagtgagagagcatctccccctggtccatgcccctcctgtgcagaagggagcctgcatccctcccttcctttctcttactgccataggaaattattttaggggttggaggtgggacaagcaggcttgtttccaccaatagtgccaaaaagatattgcctaatgtgcacctgtgaggtgtaaccccccgctttggagacgagatggctcttgttcagtcaagaccccagactctggccacaaaaatgccataatgcctgttggtatttggcaaagcactgacccgtgtcctccgttgctcgcactggggtctctggtgtgaacacccccgacagcagccctccgcccactctgccccctgggagccctcgctggatcgtctcgtctcctgcagcagcactggcaggcgagggctctcgttcatattctcaggccgcaagtgcaatgcctgaggggatcaggcttttctactccaggcaaacctgccccatcttgtcgcttttaggacctcccacaacctggttccccacacatccatagttctgcctccccagcttctcctccccagttgtaaatagtatttattagcttgccgaggcttcctgctagcaaccacactgaagagatcgatgcctcctttcaagctagccaagttttctgcgagccttcagagctaggagggcaccctaggctctgggatcccgtgtctttccagacaatgttttgtttcctttcctttgttttttcttttaactggaataattaccattgaaaaagaagttcctttgagcatgtatgtgtctgcctctaggatgagctcagagcgagagatgacacaatgcctcactcaggccccgggctccctggccacaagctttttctatcctgttttcatgacagagaaggggaagccctgttctgacaacagacatttcagacaaccttgctggctttccacacctgcctggccccctcctccctccacacttccactttgtcctcctcgtcccctacctcaacaaagcagggtggggtaggtgacatttgtgtatccacattcttacctttggtagtcaggtttggctactttgcagctcgcccaaagagatacaacctaatccccaacctacttttagtttttttgttttttttttatggttaaaagtaacttttgtagtttaaaaaaatctttcctctttcatataaataagaagtggaaattgcctttttattgtgtaatgtagaaaaccctcaagtgttttttccgagcttgggaaagattttgtgtaggaaatgtgcatagagtttgtattttatttttattagcagctgaaatgcctttggttttggcttctctctctccctctctctctctgtctctccttctctctctccccccaccacccacccccacacacgtcatctgcattgttattggagcctgtacttagagggattaagcccacaccctggcttccattccatatcaggtacaggatttgatgttattaacatttgtcgtcatacctcataagtcggtccctgccttgtctgtctaggcccatttggggctccctgtgagtgattcccctctctctgctatgctggagacggttccagcctggaaagcggccaagttcatcttctcactgtgagtggaagctggatcgggcccccgtagtcctggcagccctgttgtctggagggttcttgttgtccctcccattagccagggcggagactgtctgagctgtgcaggaggagggttgctagtaggttctgcttctgcttctctctgctccactgtctgcagcccagatcctgttgggcctggctggtgtctggtaaccatgggcctccactgacccatccctctcttttaaactgtcaggtcattatcaggcataggcagcctatagggcccaaagaaggcaaaaagataagatttactcaagtagcatttgggcaatgaggaaggaaaggtttcaaatttaggggcagaagtgagagaatgagccaacccatgtacctgctgcaactgaaccagactgggttttcaaggctcccagacgtagagtaggaaacgtgctcttctaaatgaggagggagaagataaaggaaacttctagcccctgtccttagtgctttgaggattttattttctcccttactacgcttgcttgacgtcactctctctcgacctccaaacagcaggactctttctctgggaaaccatccttccaaaacggaatctatgtagacaatgggacgttaggcagagagctcagatggcccttttaagggggctccaagaaccaacatcactgctcttttagataaacctctgccctccactccttgcttgagtgggttaaaggaactaacagttgtccctttaggaggacaaaatggggtcaagaggacacagaagagttgtatagcaccagattggttccaaatagttaatggatgtgtgcacattttctgttcagggattaagaccagaatatcagtggatttgttttccccaccaagtggcctcttagactagtcattaacttatgattagctctaaagatttcaaatagtggcagacagtgtcttctgaatgtaagttttgagaaatacgagtctgtcagagcggccataagccataaagagtcaatctcttaattatatttttcatcatgtaaacaagtttcccatttccctttcttagattgcaccagtgaaggagatgttttgcaaagattcagagaactaatttttcactggataagacctgagtaacccagaccccccaccgtggttcttttcacagccctcgactttgcacttaaaaagggatattgtaaatgaaaggctgcagtgccagttttaagaaagaatttctgtgaagtgtgaggactctggagtctagctcacataaagagagtgttatataaaaatccgacagctgaactaggttgctcttttttggcagggagtggggatgagatttgacaccaatatgggcaaaattagataaccttttggttaatataaatgattttgatttggaggcctaatttgtagattgtgaaagcagcttttagtttaacttattcacagaccccttataattaccatgtttttttttttcttcctaaatctcttggttcagcttgtgaatcttacgtgcccgtaaagttgggatgttgaattggctcttctttgttctggcagtgagtcaagtgtccagcattttttcataagtgttttttaaaattgttctccagcattttatggctcctccctcccatgtcctcagacccagcaaaagcgtagaggcagaattagaggcctctccaggccagctcctctgcccacatgtcatacaaggtgtgaatttgagcacagtccagaaatggagacatcccacccccagttgaataatggcccattcatgccaaccttgccaacacggagagggcagagatgcactagaagaccttcatcctccccttcctctgccccaagtcactacagttggttctattgaagccagtctttaagaaacctgggttaaagacaccagcacttctgcttgctgggctggctggacctgtgaagccatgggcaggtagtgccctcttgagagtcattttatttggccaccttcaggtgagactatccatagacacatgctaggataggccccgctgggagggcagttacaggagagagtaggtggtggtgacgtgagggctgtgaaggatccagagacaagacttagatgtttcgttcattcactcactcattcagttactcctaagacttttcagtttcataaggaagagtgttgcctgaggccctagggaatattggggaatagaagggattgaggaaacattaataatagttattcaaaagacccaaatgcttatacttctctctcccttcttctctctctgacacacacacacacacacacacacacacacacacacacgtgcacattcctcccttacatgctcatttgtgccttaaatgtgccttataggtaaatccaggatgactgaggaatccctcgtcactgggagattttgtatatattcttttattattagattgagttgggtgtggggaaaaatttttttctgaaggctcaaaagtggtttcctaaaagtgagccactatcagatttgcacatcaggagaaaagaaatagggttacgtccattaggaaaatcccagtttgcaggagtgcaatcacatcaaaaaaacaaccagccaggattaaaggtattataaatcctcatagcggaacatttctcagggcaaaggaacctggctcatttgaagattaatgttccatgcctttgtggtcaaagggtcagcacttaacacaggaaaaaactaggtgttgttttgttttgttattttggacaacataaaattcaggaatgttttatttagccttggtttctagaaggaagggaaataatatttcttgagcatttactagggtgttgcgtgctgtgctaagtaaattttaagtctttcagttttatagatacggaaaacaagggtgactctttaccacaggatgaataaagaactaagtaatatgggaaatgcagcaatttctggactagctgagccgattccttcctgtgagcacactgtaagctttcaagttctctgggcaggaattacagcacctgtcccctgcaatggccctgctgtgtgatgctcatcgcttcccttcgtgctggagcagtcccccaggtgtccatctcctatctttttgttccaatcttctgtgagttccagctagcaggctttacatctggggaaaggaaaaccaggggttttagctctgttctctgctcccatccttcgctcaccagctgagtgagaacatgaactttttgcaccatgtacccatggcttacactacttagaaaatcaccttttcagataaaacagtttatgagttcatagagaacaccagcactctttgacaaaactgtgagtgaccctttttaaacaatgctgagcaggccctgagctataatcaacggtgagctttaatgtctatgctgacagttaggttttgctctcttttgtaacaggttacgtagaccagcagtgtttaaatctaaatacgttgtgagtctgttatctgtcctatcgcgttttttaaatgactttttattctttatcatagctaagtaaataccaaaaaaaaaaaaaagctttgtaggacacttgtacttagtttgggaaaaaaaaataaattgaaattgttatgcttttgtatttccatttcttgcaaataaatattttttcttaaatagt

SEQ ID NO: 113777 - DNA, 1053 bp, Homo sapiens
  Payload ID: 2228
  Gene Symbol: CREB3L2
  Gene Name: cAMP responsive element binding protein 3-like 2
  ENST ID: ENST00000620715
  CDS Start-End: 162-689
cggcagaggagcagacgtttgctttccaagtgcaaaactacagacacgcgcgcgcacacacgcaagcacacgcggagagagaggaaccttgccggtccgaggcagctctgcgcgtcccctcctgcgcttagcatcctcggcccagcgcggcccgcaccgccatggaggtgctggagagcggggagcagggcgtgctgcagtgggaccgcaagctgagcgagctgtcagagcccggggacggcgaggccctcatgtaccacacgcacttctcagaacttctggatgagttttcccagaacgtcttgggtcagctcctgaatgatcctttcctctcagagaagagtgtgtcaatggaggtggaaccttccccgacgtccccggcgcctctcatccaggctgagcacagctactccctgtgcgaggagcctcgggcccagtcgcccttcacccacattaccaccagtgacagcttcaatgacgatgaggtggaaagtgagaaatggtacctgtctacagacttcccttcaacatccatcaagacagagccagttacagacgaaccacccccaggactcgttccgtctgtcactctgaccatcacagccatctccaccccgttggaaaaggaggaacctcctctggaaatgaacactggggttgattcctcgtgccagaccaatacaacctaatccccaacctacttttagtttttttgttttttttttatggttaaaagtaacttttgtagtttaaaaaaatctttcctctttcatataaataagaagtggaaattgcctttttattgtgtaatgtagaaaaccctcaagtgttttttccgagcttgggaaagattttgtgtaggaaatgtgcatagagtttgtattttatttttattagcagctgaaatgcctttggttttggcttctctctctccctctctctctctgtctctccttctctctctccccccaccacccacccccacacacgtcatctgcattgttattggagcctgtacttagagggattaagcccacaccctggcttccattc

SEQ ID NO: 113778 - DNA, 2618 bp, Homo sapiens
  Payload ID: 2229
  Gene Symbol: CREB3L3
  Gene Name: cAMP responsive element binding protein 3-like 3
  Uniprot ID: Q68CJ9
  ENST ID: ENST00000078445
  CDS Start-End: 148-1533
gtgaccgcttcagcatcttttgggagtggtgacagagccacagagggctgtgagcttgcccggccccaggtaacgctggcggtgggtgggcctccagcttggagcagagaccccccgaggcatctgcagacagaactggatggacccatgaatacggatttagctgctggaaagatggcttctgctgcctgctccatggaccccatcgacagctttgagctcctggatctcctgtttgaccggcaggacggcatcctgagacacgtggagctgggcgagggctggggtcacgtcaaggaccagcaggtcctgccaaaccccgactctgacgacttcctcagctccatcctgggctctggagactcactgcccagctccccactctggtcccccgaaggcagtgatagtggcatctccgaagacctcccctccgacccccaggacacccctccacgcagcggaccagccacctcccccgccggctgccatcctgcccagcctggcaaggggccctgcctctcctatcatcctggcaactcttgctccaccacaaccccagggccagtgatccaagtacctgaagcctctgtgaccatagacctggaaatgtggagcccaggaggaaggatctgtgctgagaagccggctgatccggtggacctgtccccacgatgcaatctcaccgtgaaagacctcctcctttcgggcagcagtggggacctgcaacagcatcacctgggggcctcctacctcctgcgacctggggctgggcactgtcaggagctggtgctcaccgaggatgagaagaagctgctggctaaagaaggcatcaccctgcccactcagctgcccctcactaagtacgaggagcgagtgctgaaaaaaatccgccggaaaatccggaacaagcagtcggcgcaagaaagcaggaagaagaagaaggaatatatcgatggcctggagactcggatgtcagcttgcactgctcagaatcaggagttacagaggaaagtcttgcatctcgagaagcaaaacctgtccctcttggagcaactgaagaaactccaggccattgtggtgcagtccaccagcaagtcagcccagacaggcacctgtgtcgcagtcctgttgctgtcctttgccctcatcatcctcccctccatcagcccttttggccccaacaaaaccgagagccctggggactttgcgcctgtacgagtgttctccagaactttgcacaacgatgctgcctcccgcgtggctgctgatgctgtgccaggctccgaggccccaggaccccgacccgaggctgacacaacccgagaagagtctccaggaagccccggggcagactggggcttccaggacaccgcgaacctgaccaattcgacggaggagctggacaacgccaccctggtcctgaggaatgcaacagaggggctgggccaggtcgccctgctggactgggtggcgcctgggccgagcactggctcaggacgtgcagggctggaggcggcgggagacgagctgtgagccccgccaggactatgctcccaggcccctctgcccaggggtgccttggggatgctgcactgggcagctacccacctggggatgggacgtgaggccaagaccccagcagagatgccagaatgggggaggcacagctcatagccacacacccagggcctgactgaggcccacgcaggaaccgacactcagacacaaggcaaagagggccacaggacccgggaaatacacacagagccaggagcagaagcaaagagcagacacacatacagcctgaaacagacctggacagacagacacagcctgaaacagacccggacagacagacacagcctgaaacagacccagacaaacagacagacagacacagcctgaaacagacccagacagacagacagacagcctgaaacagacccagacacagcctgaaacagatccggacagacagacagaaacagcctgaaacagacccagacagacagacagacacagcctgaaacagacccggacagacagacagacacagcctgaaacagacccggacagacagacagacacagcctgaaacagacccggacagacagacagacacagcctgaaacagacctagacagacagacacagattgaaacagacccagacaaacagacagacacagcctgaaacagacccagacacagcctgaaacagacccggacagacagacagacacagcctgaaacagacccagacagacagacagacacagcctgaaacagacccagacagacagaccgacgcagcctgaaagagacccagacagagagacaggcagacacagcctaaaacagacctggacagacaggcagacgtagtctgaaacagacctgaacagacagacagacgcacacacacaacagatgcgcagcaactccccgcccagggacccctcccggcctccctcgcacactgggaggaggaagccgccgagactgcagggagcctggccccggagccccgggtgcgccctggtctttggagcagccacggcccacaatcaccccccttttctaagactgcctgatccgaaataaagtattttgacagaa

SEQ ID NO: 113779 - DNA, 1491 bp, Homo sapiens
  Payload ID: 2229
  Gene Symbol: CREB3L3
  Gene Name: cAMP responsive element binding protein 3-like 3
  Uniprot ID: Q68CJ9
  ENST ID: ENST00000595923
  CDS Start-End: 109-1491
acagagggctgtgagcttgcccggccccaggtaacgctggcggtgggtgggcctccagcttggagcagagaccccccgaggcatctgcagacagaactggatggacccatgaatacggatttagctgctggaaagatggcttctgctgcctgctccatggaccccatcgacagctttgagctcctggatctcctgtttgaccggcaggacggcatcctgagacacgtggagctgggcgagggctggggtcacgtcaaggaccaggtcctgccaaaccccgactctgacgacttcctcagctccatcctgggctctggagactcactgcccagctccccactctggtcccccgaaggcagtgatagtggcatctccgaagacctcccctccgacccccaggacacccctccacgcagcggaccagccacctcccccgccggctgccatcctgcccagcctggcaaggggccctgcctctcctatcatcctggcaactcttgctccaccacaaccccagggccagtgatccaagtacctgaagcctctgtgaccatagacctggaaatgtggagcccaggaggaaggatctgtgctgagaagccggctgatccggtggacctgtccccacgatgcaatctcaccgtgaaagacctcctcctttcgggcagcagtggggacctgcaacagcatcacctgggggcctcctacctcctgcgacctggggctgggcactgtcaggagctggtgctcaccgaggatgagaagaagctgctggctaaagaaggcatcaccctgcccactcagctgcccctcactaagtacgaggagcgagtgctgaaaaaaatccgccggaaaatccggaacaagcagtcggcgcaagaaagcaggaagaagaagaaggaatatatcgatggcctggagactcggatgtcagcttgcactgctcagaatcaggagttacagaggaaagtcttgcatctcgagaagcaaaacctgtccctcttggagcaactgaagaaactccaggccattgtggtgcagtccaccagcaagtcagcccagacaggcacctgtgtcgcagtcctgttgctgtcctttgccctcatcatcctcccctccatcagcccttttggccccaacaaaaccgagagccctggggactttgcgcctgtacgagtgttctccagaactttgcacaacgatgctgcctcccgcgtggctgctgatgctgtgccaggctccgaggccccaggaccccgacccgaggctgacacaacccgagaagagtctccaggaagccccggggcagactggggcttccaggacaccgcgaacctgaccaattcgacggaggagctggacaacgccaccctggtcctgaggaatgcaacagaggggctgggccaggtcgccctgctggactgggtggcgcctgggccgagcactggctcaggacgtgcagggctggaggcggcgggagacgagctgtga

SEQ ID NO: 113780 - DNA, 1382 bp, Homo sapiens
  Payload ID: 2229
  Gene Symbol: CREB3L3
  Gene Name: cAMP responsive element binding protein 3-like 3
  Uniprot ID: Q68CJ9
  ENST ID: ENST00000602147
  CDS Start-End: 81-1094
aggtaacgctggcggtgggtgggcctccagcttggagcagagaccccccgaggcatctgcagacagaactggatggacccatgaatacggatttagctgctggaaagatggcttctgctgcctgctccatggaccccatcgacagctttgagctcctggatctcctgtttgaccggcaggacggcatcctgagacacgtggagctgggcgagggctggggtcacgtcaaggaccagcaggtcctgccaaaccccgactctgacgacttcctcagctccatcctgggctctggagactcactgcccagctccccactctggtcccccgaaggcagtgatagtggcatctccgaagacctcccctccgacccccaggacacccctccacgcagcggaccagccacctcccccgccggctgccatcctgcccagcctggcaaggggccctgcctctcctatcatcctggcaactcttgctccaccacaaccccagggccagtgatccaagtacctgaagcctctgtgaccatagacctggaaatgtggagcccaggaggaaggatctgtgctgagaagccggctgatccggtggacctgtccccacgatgcaatctcaccgtgaaagacctcctcctttcgggcagcagtggggacctgcaacagcatcacctgggggcctcctacctcctgcgacctggggctgggcactgtcaggagctggtgctcaccgaggatgagaagaagctgctggctaaagaaggcatcaccctgcccactcagctgcccctcactaaggatgtcagcttgcactgctcagaatcaggagttacagaggaaagtcttgcatctcgagaagcaaaacctgtccctcttggagcaactgaagaaactccaggccattgtggtgcagtccaccagcaagtcagcccagacaggcacctgtgtcgcagtcctgttgctgtcctttgccctcatcatcctcccctccatcagcccttttggccccaacaaaaccgagagccctggggactttgcgcctgtacgagtgttctccagaactttgcacaacgatgctgcctcccgcgtggctgctgatgctgtgccaggctccgaggccccaggaccccgacccgaggctgacacaacccgagaagagtctccaggaagccccggggcagactggggcttccaggacaccgcgaacctgaccaattcgacggaggagctggacaacgccaccctggtcctgaggaatgcaacagaggggctgggccaggtcgccctgctggactgggtggcgcctgggccgagcactggctcaggacgtgcagggctggaggcggcgggagacgagctgtgagccccgccaggactatgctccca

SEQ ID NO: 113781 - DNA, 1475 bp, Homo sapiens
  Payload ID: 2229
  Gene Symbol: CREB3L3
  Gene Name: cAMP responsive element binding protein 3-like 3
  Uniprot ID: Q68CJ9
  ENST ID: ENST00000602257
  CDS Start-End: 81-1460
aggtaacgctggcggtgggtgggcctccagcttggagcagagaccccccgaggcatctgcagacagaactggatggacccatgaatacggatttagctgctggaaagatggcttctgctgcctgctccatggaccccatcgacagctttgagctcctggatctcctgtttgaccggcaggacggcatcctgagacacgtggagctgggcgagggctggggtcacgtcaaggaccagcaggtcctgccaaaccccgactctgacgacttcctcagctccatcctgggctctggagactcactgcccagctccccactctggtcccccgaaggcagtgatagtggcatctccgaagacctcccctccgacccccaggacacccctccacgcagcggaccagccacctcccccgccggctgccatcctgcccagcctggcaaggggccctgcctctcctatcatcctggcaactcttgctccaccacaaccccagggccagtgatccaagtacctgaagcctctgtgaccatagacctggaaatgtggagcccaggaggaaggatctgtgctgagaagccggctgatccggtggacctgtccccacgatgcaatctcaccgtgaaagacctcctcctttcgggcagcagtggggacctgcatcacctgggggcctcctacctcctgcgacctggggctgggcactgtcaggagctggtgctcaccgaggatgagaagaagctgctggctaaagaaggcatcaccctgcccactcagctgcccctcactaagtacgaggagcgagtgctgaaaaaaatccgccggaaaatccggaacaagcagtcggcgcaagaaagcaggaagaagaagaaggaatatatcgatggcctggagactcggatgtcagcttgcactgctcagaatcaggagttacagaggaaagtcttgcatctcgagaagcaaaacctgtccctcttggagcaactgaagaaactccaggccattgtggtgcagtccaccagcaagtcagcccagacaggcacctgtgtcgcagtcctgttgctgtcctttgccctcatcatcctcccctccatcagcccttttggccccaacaaaaccgagagccctggggactttgcgcctgtacgagtgttctccagaactttgcacaacgatgctgcctcccgcgtggctgctgatgctgtgccaggctccgaggccccaggaccccgacccgaggctgacacaacccgagaagagtctccaggaagccccggggcagactggggcttccaggacaccgcgaacctgaccaattcgacggaggagctggacaacgccaccctggtcctgaggaatgcaacagaggggctgggccaggtcgccctgctggactgggtggcgcctgggccgagcactggctcaggacgtgcagggctggaggcggcgggagacgagctgtgagccccgccaggacta

SEQ ID NO: 113782 - DNA, 1750 bp, Homo sapiens
  Payload ID: 2230
  Gene Symbol: CREB3L4
  Gene Name: cAMP responsive element binding protein 3-like 4
  Uniprot ID: Q8TEY5
  ENST ID: ENST00000271889
  CDS Start-End: 269-1456
ccatgatctccctcttgcaaaagcgagggctacagaacaggcattcaggagtcctgtgctccagtcacagccttttctgttcttcagctaggagacaccaaaccctcaggaagatttactatagctaagagaaaactgcagcagaaagggcgcggctacctacttcttaaattccgtttgtggaccctcagactcttagtcccctactcccagatacagcggccctaccgtggctcctggcaaggtggcatccacttttgtagtaagcatggatctcggaatccctgacctgctggacgcgtggctggagcccccagaggatatcttctcgacaggatccgtcctggagctgggactccactgcccccctccagaggttccggtaactaggctacaggaacagggactgcaaggctggaagtccggtggggaccgtggctgtggccttcaagagagtgagcctgaagatttcttgaagcttttcattgatcccaatgaggtgtactgctcagaagcatctcctggcagtgacagtggcatctctgaggacccctgccatccagacagtccccctgcccccagggcaaccagttctcctatgctctatgaggttgtctatgaggcaggggccctggagaggatgcagggggaaactgggccaaatgtaggccttatctccatccagctagatcagtggagcccagcatttatggtgcctgattcctgcatggtcagtgagctgccctttgatgctcatgcccacatcctgcccagagcaggcaccgtagccccagtgccctgtacaaccctgctgccctgtcaaaccctgttcctgaccgatgaggagaagcgtctgctggggcaggaaggggtttccctgccctctcacctgcccctcaccaaggcagaggagagggtcctcaagaaggtcaggaggaaaatccgtaacaagcagtcagctcaggacagtcggcggcggaagaaggagtacattgatgggctggagagcagggtggcagcctgttctgcacagaaccaagaattacagaaaaaagtccaggagctggagaggcacaacatctccttggtagctcagctccgccagctgcagacgctaattgctcaaacttccaacaaagctgcccagaccagcacttgtgttttgattcttcttttttccctggctctcatcatcctgcccagcttcagtccattccagagtcgaccagaagctgggtctgaggattaccagcctcacggagtgacttccagaaatatcctgacccacaaggacgtaacagaaaatctggagacccaagtggtagagtccagactgagggagccacctggagccaaggatgcaaatggctcaacaaggacactgcttgagaagatgggagggaagccaagacccagtgggcgcatccggtccgtgctgcatgcagatgagatgtgagctggaacagaccttcctggcccacttcctgatcacaaggaatcctgggcttccttatggctttgcttcccactgggattcctacttaggtgtctgccctcaggggtccaaatcacttcaggacaccccaagagatgtcctttagtctctgcctgaggcctagtctgcatttgtttgcatatatgagagggtacctcaaatacttctgttatgtatctgtgattttatttcttctttgggtatagggttgaggggaaataagttttgagtgagaaataaacgttttagctgaaa

SEQ ID NO: 113783 - DNA, 1496 bp, Homo sapiens
  Payload ID: 2230
  Gene Symbol: CREB3L4
  Gene Name: cAMP responsive element binding protein 3-like 4
  Uniprot ID: Q8TEY5
  ENST ID: ENST00000368600
  CDS Start-End: 73-1200
aaaaggtgtagtgtttggggaggtcaacgggctatgctggcttgacagggctgggctcttcagaacagaagcatggatctcggaatccctgacctgctggacgcgtggctggagcccccagaggatatcttctcgacaggatccgtcctggagctgggactccactgcccccctccagaggttccgggccttcaagagagtgagcctgaagatttcttgaagcttttcattgatcccaatgaggtgtactgctcagaagcatctcctggcagtgacagtggcatctctgaggacccctgccatccagacagtccccctgcccccagggcaaccagttctcctatgctctatgaggttgtctatgaggcaggggccctggagaggatgcagggggaaactgggccaaatgtaggccttatctccatccagctagatcagtggagcccagcatttatggtgcctgattcctgcatggtcagtgagctgccctttgatgctcatgcccacatcctgcccagagcaggcaccgtagccccagtgccctgtacaaccctgctgccctgtcaaaccctgttcctgaccgatgaggagaagcgtctgctggggcaggaaggggtttccctgccctctcacctgcccctcaccaaggcagaggagagggtcctcaagaaggtcaggaggaaaatccgtaacaagcagtcagctcaggacagtcggcggcggaagaaggagtacattgatgggctggagagcagggtggcagcctgttctgcacagaaccaagaattacagaaaaaagtccaggagctggagaggcacaacatctccttggtagctcagctccgccagctgcagacgctaattgctcaaacttccaacaaagctgcccagaccagcacttgtgttttgattcttcttttttccctggctctcatcatcctgcccagcttcagtccattccagagtcgaccagaagctgggtctgaggattaccagcctcacggagtgacttccagaaatatcctgacccacaaggacgtaacagaaaatctggagacccaagtggtagagtccagactgagggagccacctggagccaaggatgcaaatggctcaacaaggacactgcttgagaagatgggagggaagccaagacccagtgggcgcatccggtccgtgctgcatgcagatgagatgtgagctggaacagaccttcctggcccacttcctgatcacaaggaatcctgggcttccttatggctttgcttcccactgggattcctacttaggtgtctgccctcaggggtccaaatcacttcaggacaccccaagagatgtcctttagtctctgcctgaggcctagtctgcatttgtttgcatatatgagagggtacctcaaatacttctgttatgtatctgtgattttatttcttctttgggtatagggttgaggggaaataagttttgagtgagaaataaacgttttagctgaaatt

SEQ ID NO: 113784 - DNA, 950 bp, Homo sapiens
  Payload ID: 2230
  Gene Symbol: CREB3L4
  Gene Name: cAMP responsive element binding protein 3-like 4
  ENST ID: ENST00000368601
  CDS Start-End: 79-732
agaaagaaaaggtgtagtgtttggggaggtcaacgggctatgctggcttgacagggctgggctcttcagaacagaagcatggatctcggaatccctgacctgctggacgcgtggctggagcccccagaggatatcttctcgacaggatccgtcctggagctgggactccactgcccccctccagaggttccggtaactaggctacaggaacagggactgcaaggctggaagtccggtggggaccgtggctgtggccttcaagagagtgagcctgaagatttcttgaagcttttcattgatcccaatgaggtgtactgctcagaagcatctcctggcagtgacagtggcatctctgaggacccctgccatccagacagtccccctgcccccagggcaaccagttctcctatgctctatgaggttgtctatgaggcaggggccctggagaggatgcagggggaaactgggccaaatgtaggccttatctccatccagctagatcagtggagcccagcatttatggtgcctgattcctgcatggtcagtgagctgccctttgatgctcatgcccacatcctgcccagagcaggcaccgtagccccagtgccctgtacaaccctgctgccctgtcaaaccctgttcctgaccgatgaggagaagcgtctgctggggcaggaaggggtttccctgccctctcacctgcccctcaccaaggtaacatgcttcccctaagggtatcccaacccaggggcctcaccatgacctctgaggggccaatatcccaggagaagcattggggagttgggggcaggtgaaggacccaggactcacacatcctgggcctccaaggcagaggagagggtcctcaagaaggtcaggaggaaaatccgtaacaagcagtcagctcaggacagtcggcggcggaagaaggagtacattgatgggctgga

SEQ ID NO: 113785 - DNA, 1557 bp, Homo sapiens
  Payload ID: 2230
  Gene Symbol: CREB3L4
  Gene Name: cAMP responsive element binding protein 3-like 4
  Uniprot ID: Q8TEY5
  ENST ID: ENST00000368603
  CDS Start-End: 79-1266
agaaagaaaaggtgtagtgtttggggaggtcaacgggctatgctggcttgacagggctgggctcttcagaacagaagcatggatctcggaatccctgacctgctggacgcgtggctggagcccccagaggatatcttctcgacaggatccgtcctggagctgggactccactgcccccctccagaggttccggtaactaggctacaggaacagggactgcaaggctggaagtccggtggggaccgtggctgtggccttcaagagagtgagcctgaagatttcttgaagcttttcattgatcccaatgaggtgtactgctcagaagcatctcctggcagtgacagtggcatctctgaggacccctgccatccagacagtccccctgcccccagggcaaccagttctcctatgctctatgaggttgtctatgaggcaggggccctggagaggatgcagggggaaactgggccaaatgtaggccttatctccatccagctagatcagtggagcccagcatttatggtgcctgattcctgcatggtcagtgagctgccctttgatgctcatgcccacatcctgcccagagcaggcaccgtagccccagtgccctgtacaaccctgctgccctgtcaaaccctgttcctgaccgatgaggagaagcgtctgctggggcaggaaggggtttccctgccctctcacctgcccctcaccaaggcagaggagagggtcctcaagaaggtcaggaggaaaatccgtaacaagcagtcagctcaggacagtcggcggcggaagaaggagtacattgatgggctggagagcagggtggcagcctgttctgcacagaaccaagaattacagaaaaaagtccaggagctggagaggcacaacatctccttggtagctcagctccgccagctgcagacgctaattgctcaaacttccaacaaagctgcccagaccagcacttgtgttttgattcttcttttttccctggctctcatcatcctgcccagcttcagtccattccagagtcgaccagaagctgggtctgaggattaccagcctcacggagtgacttccagaaatatcctgacccacaaggacgtaacagaaaatctggagacccaagtggtagagtccagactgagggagccacctggagccaaggatgcaaatggctcaacaaggacactgcttgagaagatgggagggaagccaagacccagtgggcgcatccggtccgtgctgcatgcagatgagatgtgagctggaacagaccttcctggcccacttcctgatcacaaggaatcctgggcttccttatggctttgcttcccactgggattcctacttaggtgtctgccctcaggggtccaaatcacttcaggacaccccaagagatgtcctttagtctctgcctgaggcctagtctgcatttgtttgcatatatgagagggtacctcaaatacttctgttatgtatctgtgattttatttcttctttgggtatagggttgaggggaaataagttttgagtgagaaataaacgttttagctg

SEQ ID NO: 113786 - DNA, 1752 bp, Homo sapiens
  Payload ID: 2230
  Gene Symbol: CREB3L4
  Gene Name: cAMP responsive element binding protein 3-like 4
  Uniprot ID: Q8TEY5
  ENST ID: ENST00000368607
  CDS Start-End: 267-1454
cctttgtttacaaccctgccatgatctccctcttgcaaaagcgagggctacagaacaggcattcaggagtcctgtgctccagtcacagccttttctgttcttcagctaggagacaccaaaccctcaggaagatttactatagctaagagaaaactgcagcagaaagggcgcggctacctacttcttaaattccgtttgtggaccctcagactcttagtcccctactcccagatacagcggccctaccgtggctcctggcaagaagcatggatctcggaatccctgacctgctggacgcgtggctggagcccccagaggatatcttctcgacaggatccgtcctggagctgggactccactgcccccctccagaggttccggtaactaggctacaggaacagggactgcaaggctggaagtccggtggggaccgtggctgtggccttcaagagagtgagcctgaagatttcttgaagcttttcattgatcccaatgaggtgtactgctcagaagcatctcctggcagtgacagtggcatctctgaggacccctgccatccagacagtccccctgcccccagggcaaccagttctcctatgctctatgaggttgtctatgaggcaggggccctggagaggatgcagggggaaactgggccaaatgtaggccttatctccatccagctagatcagtggagcccagcatttatggtgcctgattcctgcatggtcagtgagctgccctttgatgctcatgcccacatcctgcccagagcaggcaccgtagccccagtgccctgtacaaccctgctgccctgtcaaaccctgttcctgaccgatgaggagaagcgtctgctggggcaggaaggggtttccctgccctctcacctgcccctcaccaaggcagaggagagggtcctcaagaaggtcaggaggaaaatccgtaacaagcagtcagctcaggacagtcggcggcggaagaaggagtacattgatgggctggagagcagggtggcagcctgttctgcacagaaccaagaattacagaaaaaagtccaggagctggagaggcacaacatctccttggtagctcagctccgccagctgcagacgctaattgctcaaacttccaacaaagctgcccagaccagcacttgtgttttgattcttcttttttccctggctctcatcatcctgcccagcttcagtccattccagagtcgaccagaagctgggtctgaggattaccagcctcacggagtgacttccagaaatatcctgacccacaaggacgtaacagaaaatctggagacccaagtggtagagtccagactgagggagccacctggagccaaggatgcaaatggctcaacaaggacactgcttgagaagatgggagggaagccaagacccagtgggcgcatccggtccgtgctgcatgcagatgagatgtgagctggaacagaccttcctggcccacttcctgatcacaaggaatcctgggcttccttatggctttgcttcccactgggattcctacttaggtgtctgccctcaggggtccaaatcacttcaggacaccccaagagatgtcctttagtctctgcctgaggcctagtctgcatttgtttgcatatatgagagggtacctcaaatacttctgttatgtatctgtgattttatttcttctttgggtatagggttgaggggaaataagttttgagtgagaaataaacgttttagctgaaattgt

SEQ ID NO: 113787 - DNA, 982 bp, Homo sapiens
  Payload ID: 2230
  Gene Symbol: CREB3L4
  Gene Name: cAMP responsive element binding protein 3-like 4
  ENST ID: ENST00000449724
  CDS Start-End: 298-982
gactctttccgcctttgtttacaaccctgccatgatctccctcttgcaaaagcgagggctacagaacaggcattcaggagtcctgtgctccagtcacagccttttctgttcttcagctaggagacaccaaaccctcaggaagatttactatagctaagagaaaactgcagcagaaagggcgcggctacctacttcttaaattccgtttgtggaccctcagactcttagtcccctactcccagatacagcggccctaccgtggctcctggcaaggtggcatccacttttgtagtaagcatggatctcggaatccctgacctgctggacgcgtggctggagcccccagaggatatcttctcgacaggatccgtcctggagctgggactccactgcccccctccagaggttccgggccttcaagagagtgagcctgaagatttcttgaagcttttcattgatcccaatgaggtgtactgctcagaagcatctcctggcagtgacagtggcatctctgaggacccctgccatccagacagtccccctgcccccagggcaaccagttctcctatgctctatgaggttgtctatgaggcaggggccctggagaggatgcagggggaaactgggccaaatgtaggccttatctccatccagctagatcagtggagcccagcatttatggtgcctgattcctgcatggtcagtgagctgccctttgatgctcatgcccacatcctgcccagagcaggcaccgtagccccagtgccctgtacaaccctgctgccctgtcaaaccctgttcctgaccgatgaggagaagcgtctgctggggcaggaaggggtttccctgccctctcacctgcccctcaccaaggcagaggagagggtcctcaagaaggtcaggaggaaaatccgtaacaagcagtcagctcaggacagtcggcggcggaagaaggagtacattgatgggctggagagcaggt

SEQ ID NO: 113788 - DNA, 602 bp, Homo sapiens
  Payload ID: 2230
  Gene Symbol: CREB3L4
  Gene Name: cAMP responsive element binding protein 3-like 4
  ENST ID: ENST00000431292
  CDS Start-End: 57-602
ggtaatgcttggggggggcctctttgtctaaacctgagggatagggctgaagaagcatggatctcggaatccctgacctgctggacgcgtggctggagcccccagaggatatcttctcgacaggatccgtcctggagctgggactccactgcccccctccagaggttccggtaactaggctacaggaacagggactgcaaggctggaagtccggtggggaccgtggctgtggccttcaagagagtgagcctgaagatttcttgaagcttttcattgatcccaatgaggtgtactgctcagaagcatctcctggcagtgacagtggcatctctgaggacccctgccatccagacagtccccctgcccccagggcaaccagttctcctatgctctatgaggttgtctatgaggcaggggccctggagaggatgcagggggaaactgggccaaatgtaggccttatctccatccagctagatcagtggagcccagcatttatggtgcctgattcctgcatggtcagtgagctgccctttgatgctcatgcccacatcctgcccagagcaggcaccgtagccccagtgccctgtacaaccctggtg

SEQ ID NO: 113789 - DNA, 8532 bp, Homo sapiens
  Payload ID: 2231
  Gene Symbol: CREB5
  Gene Name: cAMP responsive element binding protein 5
  Uniprot ID: Q02930
  ENST ID: ENST00000357727
  CDS Start-End: 391-1917
aacatttacaacaaagttgattctgtgtagggttggaggctagacagttccacaaatttttagtcacattttccatgtcagttaaatctagggagttcaagactactggaaaaattagtctcattactaaaagaaacttagagaacgagggaggtaccagagtctaggaggtacctctgggttgcagaagtaattgtaaaataccagacctgttctttttactaaaagctagtttcactatcttctggtctgaaatactgaggcaaatactcaagacttattttcttcctaatcttgctggtgaaacagaagttactagaaagaaaggaagaaaaaacttgatttggtgactgcaggaagcaacacgttgctgcttttattctacagataatgatttatgaggaatccaagatgaatttggagcaggagaggccgtttgtctgcagtgccccaggctgctcccagcgcttcccaacagaggaccatctgatgattcataggcacaaacatgaaatgactttgaagtttccttcaataaaaacagacaatatgttatcagatcaaactccgaccccaacgagattcctgaagaactgcgaggaggtgggcctcttcagcgagctggactgctccctggagcacgagttcaggaaggctcaggaagaggagagcagcaagcggaatatctcgatgcataatgcagttggtggggccatgacggggcccggaactcaccagcttagcagcgctcggctgcccaaccatgacaccaacgttgtgattcagcaagccatgccgtcgcctcagtccagctctgtcatcactcaggcaccttccaccaaccgccagatcgggcctgtcccaggctctctatcttctctgctacatctccacaacagacagagacagcccatgccagcctccatgcctgggaccctgcccaaccctacaatgccaggatcttccgccgtcttgatgccaatggagcgacaaatgtcagtgaactccagcatcatggggatgcaaggtccaaatctcagcaacccctgtgcttctccccaggtccagccaatgcattcagaagccaaaatgaggttgaaggctgcattgactcaccaccctgctgccatgtcaaatgggaacatgaacaccatgggacacatgatggagatgatgggctcccggcaggaccagacgccacaccatcacatgcactcgcacccgcatcagcaccagacactgccaccccatcacccttacccacaccagcaccagcacccagcacaccatcctcaccctcaaccccatcaccagcagaaccatccacatcaccactcccattcccaccttcatgcacacccagcacatcaccagacctcgccacatccgcccctgcacaccggcaaccaagcacaggtttcaccagcaacacaacagatgcagccaacccagacaatacagccaccccagcccacaggggggcgccggcgaagggtggtagacgaggatccggacgagaggcggcggaaatttctggaacggaaccgggcagctgccacccgctgcagacagaagaggaaggtctgggtgatgtcattggaaaagaaagcagaagaactcacccagacaaacatgcagcttcagaatgaagtgtctatgttgaaaaatgaggtggcccagctgaaacagttgttgttaacacataaagactgcccaataacagccatgcagaaagaatcacaaggatatctaagtccagagagtagccctcctgctagtcctgtcccagcttgctcccagcaacaagtcatccagcataataccatcactacttcctcatcggtcagcgaggtggtaggaagctccaccctcagccagctcaccactcacagaacagacctgaatccgattctttaaaatgcaccatcagacctggcctccaagaagagctgtagcgtaccatgcgtcctttcttttaagggcatttttagaattaactcagacctggaagactcctcagttcttcaaagactggctttcatttttatagttattatggaaatgttgtcttttatacttagttatataagaaaaaagggagttatgcaattaatatctatcagcttgggaaacgctttggtgcttttctccagttttctggtaccagttacttgtttataaactgaaccttttctgtatatagccatggtttcattcttatcagtccaaccctttgcctgaaacattgaatcttgttaaaccacagcttttagctaaaatgaggtatacctagatgtcaagtaagacagatccaaggtaactgggtaggaaatcttttgacatcttaactcatgttgagtttgtgctgtggtgtcaccagaattccagataaacacacagcctttcccatacctttttttttcttactataaaatattataagatccattgatgtccaaataataccaccaagcatctcttcacctctcctcctcttggtccacttgctaatgcccagttttcttctccatttccactttttcttaggctccctatttactattcattttgacttccttctgttttatttttttccctttagcattgcatgtgaataagaaaataatgtttaaagaaaaaaaaaaaaaagcaaacctccaaaacgtggacctaaccattgcttcacttacacttcacccacagctggagttcattcaactcttgcttttcacaaaatagtaaccaggagatgtttaatgtgcctgatttaatgtttttaataatcacagcaaatgaaaggtggtttagttataagtgaagcatggttgaataccagctggggagacactagggaagggagctttgtaagccttgattgcgaaagtccaaattttgatgtggggctataacatgacacccttggattgcgactggttttatacggcctgcctataacgttgaaaatccatgtactacataataattcagaagggctctattcactacacagattacattgttcaatcatcagctgctaatagcctaagatttatttttttttttttcttaagcctatggaaccggctttgctgttctggggggtgaaaatagactaactactggagaaacaaagagagaaagaaaacccagtgtttccataggggcacttttagccttcccacaacagttaagcactctttgactgctgaaggaaccccatggatgaggtgcaggctacttcactctttttttttcttttttgagacagagtctcacctattgcccagactgaagtgcagtggtgcgatcatggatcactgcagcagcatcctccgagttcaagctatccttccacctccgcctcctgagtagctgggaccacaggttcacataaccatgcctggctaatttatttttacttttattttaaaataaaagatgaggtctgtcttatgttgcccaggctggtctcaaactatcctacttcttcctcccaaagtgttgggattataggtgtgagccactgcacccagcctacttcactcttctgaattattctgatttattttcaacaacttttgtgaacttgcccgtgatacaaagcagatagtccctgaaccacagtcgtgcctccttgaaacaagccattctactgtgctaatgttttaatatcacatctcacaaataacaggggtgaatgtttctctctagcaatctaggcaggtgctggtgtttcatctccatttgaatgcttgacctcttaatgtgtgtgtgtgtgtgtgtgtgtgtgtgtgtgttcatgggttttaaaagaacagtattttacaaaaggtgtagcttttataagagtgcagaaaagggaaggatgtgtttttttctctcactatagtataagaatctattttggagaaaaaaagaaaatatgagggtctcgaagcatgatttttatataactagtttcagttttatctaataacttactttttaaatcaatatttatcaacaatctttccttgtatgcagtgctttcaaaagatggttttgagtgtccagtgaaacttatgacttggatatatggttgaagaatcaaaacaaaagcaaaaaaaaaaagcaaaaaaagaaaagagaaaaaaagaaaaaatgcaaatggaataattttctattatattttagacaaacatatcattttcgagtattttaaatactgaattcatagttgttgttttttaaattccaacagtaacagctgaatggtttaatctgactggcttcctaagaaatgtttaagactcagctttaaaaagaagttaacattcatatctctgttttgaaatcaaaaatcatatttcaaaattctttcctaggaccatctatgtgtctcccctcccctccacaaaaaggagaaagagtgcattaaaatgtttagttgggttttttaatttttaatttttatgttatgttttgctttgttttaagtaaacaaaaatttttctttctttactgcatgcatagcacttaataaaatggatttttaaaaaatccactagtaatatcagaatgtccagggagtgactgtcactacaatgatggtttagtttacttctgttccaccttttgattgaaatatttagttgttaggctgaaagcctcggcagttaagaacttgcctgagttttcttcgttcagcaacttgacagtttgactgatgtgcattatatatagctcaattatgtctgttttttatgctaagtaggaaaaccaaccacacacattagcaaaccggcctcaacatataattagaataaactgtcttcttgttctactcagggcctttaggtgtgttcattcacggtatggaaatacagtaaatgaaagattccaactagttgtcagtgcttcttgaaattccaaacagaaagatacattggtcaaatccaacacttggcttatcaatattaagtcttttacctaaaggcccagccgtcaccagacaacagaataatcaatctgcctgaaaatccctcctccttgtcctacactttttgcctgtttgggagaatatctttgtactccattctcctccctcagccagttactgggtcacccatccatgtgttcatgaatcaatcatcacggcctgcagagcacctgtcctaaggagggaaaatcctgtcacactgcctctccccattcgtgtgtggttttcttgatcggtgagatctgtctctgaagtcactgccagcctccctgggaacgtctatagtgcctcccctgccttatgtgatgggagttaacaactcagataagtacacctgagagcatttctatcaggtaaactgtcacttaaatggaggtgtccacatcttaattgtttctccttgacacatttctcaatccacgaagccaggagaggtagagtgaaaatcccagccatggatgaatgtactaatttgaaagccaagtgttaagtcggatgttttcccgttacactactactcagccctctcctgcggccacatcaacggatgcaagtcacagtcttaacacagcctgtgggagacaagcagtttgtgtgctcacagtatatattatagtaattagggtgacttagagcaaatactcttcagatcctatgtagtcagtgaaacaaaatggagagcgtattctgatagaaggacgtcgacggtgaatgttctggtggttgttgcctgttaagtaaactttagtgtgtaagttgagtttgtcattaaaatcataaaccagctgcggtaacagacaagcctttggctggggagttttaagcctcggtaactgctataaaactagccatccagttaggatagaatgtgtttctttctggttaaaaaaaggaaaaaccatctaagaaaatatatatgtatgtatgtgtgtatacagtggaattcaaaggaccaaagcaaaatttgaacaggaatctattaatttagaattttataagatatttattaataaatgttatttttaaacattccatttgaacagtattctgtaggatctacttgtttttaaagtgttagtccataataaactactatagttatgtgtattttcatttttcagggtttcaaatggctattctccatcatttggtggaaatgtttgcttagatctctgtgcatagacatttcaaggatttttattgctctgtgagttattttttaatcaacattctgaacagttttttttaaacatttatttctgtgtgttcatttttaaagtaagctctttcatttaggaagcagagttcagctaaagggaatcagtaactctaactggaacagctttcttgtagaagtgtaaaaacagcttcatctctgcctctctccaccccaccccaatttcctagaaagccttgcactattcagctcccttagtgctttttgtcccttcccgaacaatatgcagtagctttaagccattcaagctccattatgcagtatatctgagaagggaaaggaaacaacccatttaaatttgaataaaaccgtgcctatgcgaacagtagcaatttagaatctcttttctgcttttaaaataatttatatttaaaaattgcactttagctttttgatccctttgtatttctcttattctctttctaacctcttctctgtcctcaaacttgcctttgctctcctttacaataccccccacccctcctccaaggctctgagcggcatcatttaaaatactttacagatatttgcaccaggtacatttatgtgcgtccattggtagcacagctgagacctgtgtctcacatcagcctaggtgaagcctactacaagaatgccaaggagaagagccagtacactatatggtttatactctttatccctttattcatagcatgttttttaaaaatgttatattatgcaacagatgtgaggcagcagctaagctatacttaagaattttctctcaccttccaaaccaaagtgtcctgaataagccaggagacttattcttttgtgcaccctggtgcacatctgactgttgtcctagccatagactctctgaggccactgaaagaacagtggccctatcgatttcattcctaggtctcaaaaatacaatgttgccttgtaacataattagggacagcacctctatttcacaattataatctaaggtaggataagacgacacagcagcaataaacttacaagtaaaattcaataccaaaacaaacacaaagaaatttaaaaaacaaaaaacctagctcatcatgttgtgaaaatgaaaaagtgaatgtccattcaaaatattttactatttcttgtggagtttttcagtgatgtaatgcttgtagccaaattgcttaaagagtgtttatatatttttttccttataaattgtctattttttaaaaaagctatttaaccacagctgaagtggggggtaaggccaaattgccaacacttgttaaaagattaatactcttaagtggcactctgatacctttccaacttgtcatcagaaaggaatcaataattaccaactgttgtatttagaccaacttacaatatctagctcattagaagccaggatctagaaagctccttctaagccatttaagatattcttacattgagcttcatattatagaactttataggattggatattttacaatagaataatttagcctcaggactgagaatgtggaagctgaataaattagctttaaatacatcattaaaatcttatgcacaataagctcattagattctagttttctcctttagaataccaatgccacagacactacaggagataatgaaaggtatcagttgtgttgagtggagggagtttaagagaaaggacccttcccaaccagcagccagtagaaaatacaacctactcacctttttcccttctaagttctgctaaatcacatctgcctcatagagaaaggaatgttgcctttgagaactgtcttggagaacagataagcttgaaatgttctctctagagaggacatagggtttgggatcctctgaaaaggcccagaaaaatagctcagttcaaatacaatgttctaggacaattggaatataaatattgtccaaaaatataattaaaagaaaaaagtttagcactgtgtaaagtaagtgttaactgaggaagtcccaaaaaggtgctgtcactttaagttctggacttggggttctttgtatttgtaaacagcaaagcatttgtgtttgtttgtctatttgtaaagcaaccaccttccttattggaaggagaaaaaaaggggtacatacatgtaaatacttgctgcagcatttaatatgtttaattttgtgttaagctttttgttgcatcgtgaacacatttattgttaccaatggacaatgagttcattaagactgttcaactaggtcagatttttacatctctttctagcaagaagagacaagattttgtgcatttgtacaaatgttaatatcactgcaattccaatataataaagcactcaaatgcaaataa

SEQ ID NO: 113790 - DNA, 2001 bp, Homo sapiens
  Payload ID: 2231
  Gene Symbol: CREB5
  Gene Name: cAMP responsive element binding protein 5
  Uniprot ID: Q02930
  ENST ID: ENST00000396298
  CDS Start-End: 171-1280
agagagcaagtgagcgagagcccagccggagggagagccagagctaggcgcaaaagaagggccagcacattacatcatcgcttggcctggaatcaaatgggaaggatatgactcactcaagctagttaagctttggctcaaattctacacacactcattccagagctctcatgttctgcacctcaggagggaattcagcctcagtgatgtccatgaggcctgtcccaggctctctatcttctctgctacatctccacaacagacagagacagcccatgccagcctccatgcctgggaccctgcccaaccctacaatgccaggatcttccgccgtcttgatgccaatggagcgacaaatgtcagtgaactccagcatcatggggatgcaaggtccaaatctcagcaacccctgtgcttctccccaggtccagccaatgcattcagaagccaaaatgaggttgaaggctgcattgactcaccaccctgctgccatgtcaaatgggaacatgaacaccatgggacacatgatggagatgatgggctcccggcaggaccagacgccacaccatcacatgcactcgcacccgcatcagcaccagacactgccaccccatcacccttacccacaccagcaccagcacccagcacaccatcctcaccctcaaccccatcaccagcagaaccatccacatcaccactcccattcccaccttcatgcacacccagcacatcaccagacctcgccacatccgcccctgcacaccggcaaccaagcacaggtttcaccagcaacacaacagatgcagccaacccagacaatacagccaccccagcccacaggggggcgccggcgaagggtggtagacgaggatccggacgagaggcggcggaaatttctggaacggaaccgggcagctgccacccgctgcagacagaagaggaaggtctgggtgatgtcattggaaaagaaagcagaagaactcacccagacaaacatgcagcttcagaatgaagtgtctatgttgaaaaatgaggtggcccagctgaaacagttgttgttaacacataaagactgcccaataacagccatgcagaaagaatcacaaggatatctaagtccagagagtagccctcctgctagtcctgtcccagcttgctcccagcaacaagtcatccagcataataccatcactacttcctcatcggtcagcgaggtggtaggaagctccaccctcagccagctcaccactcacagaacagacctgaatccgattctttaaaatgcaccatcagacctggcctccaagaagagctgtagcgtaccatgcgtcctttcttttaagggcatttttagaattaactcagacctggaagactcctcagttcttcaaagactggctttcatttttatagttattatggaaatgttgtcttttatacttagttatataagaaaaaagggagttatgcaattaatatctatcagcttgggaaacgctttggtgcttttctccagttttctggtaccagttacttgtttataaactgaaccttttctgtatatagccatggtttcattcttatcagtccaaccctttgcctgaaacattgaatcttgttaaaccacagcttttagctaaaatgaggtatacctagatgtcaagtaagacagatccaaggtaactgggtaggaaatcttttgacatcttaactcatgttgagtttgtgctgtggtgtcaccagaattccagataaacacacagcctttcccatacctttttttttcttactataaaatattataagatccattgatgtccaaataataccaccaagcatctcttcacctctcctcctcttggtccacttgctaatgcccagttttcttctccatttccactttttcttaggctccctatttactattcattttgacttccttctgttttatttttttccctttagcattgcatgtgaataagaaaataatgtttaaagaaa

SEQ ID NO: 113791 - DNA, 2294 bp, Homo sapiens
  Payload ID: 2231
  Gene Symbol: CREB5
  Gene Name: cAMP responsive element binding protein 5
  Uniprot ID: Q02930
  ENST ID: ENST00000396299
  CDS Start-End: 146-1573
gatctgatgaatccaaggagtggagcaagaggcagattttggacacggttatgagaatgacagaaactgcctaaagcatttatgctctggcattcgtccctgtttctggaggtccagtaagcgcttcccaacagaggaccatctgatgattcataggcacaaacatgaaatgactttgaagtttccttcaataaaaacagacaatatgttatcagatcaaactccgaccccaacgagattcctgaagaactgcgaggaggtgggcctcttcagcgagctggactgctccctggagcacgagttcaggaaggctcaggaagaggagagcagcaagcggaatatctcgatgcataatgcagttggtggggccatgacggggcccggaactcaccagcttagcagcgctcggctgcccaaccatgacaccaacgttgtgattcagcaagccatgccgtcgcctcagtccagctctgtcatcactcaggcaccttccaccaaccgccagatcgggcctgtcccaggctctctatcttctctgctacatctccacaacagacagagacagcccatgccagcctccatgcctgggaccctgcccaaccctacaatgccaggatcttccgccgtcttgatgccaatggagcgacaaatgtcagtgaactccagcatcatggggatgcaaggtccaaatctcagcaacccctgtgcttctccccaggtccagccaatgcattcagaagccaaaatgaggttgaaggctgcattgactcaccaccctgctgccatgtcaaatgggaacatgaacaccatgggacacatgatggagatgatgggctcccggcaggaccagacgccacaccatcacatgcactcgcacccgcatcagcaccagacactgccaccccatcacccttacccacaccagcaccagcacccagcacaccatcctcaccctcaaccccatcaccagcagaaccatccacatcaccactcccattcccaccttcatgcacacccagcacatcaccagacctcgccacatccgcccctgcacaccggcaaccaagcacaggtttcaccagcaacacaacagatgcagccaacccagacaatacagccaccccagcccacaggggggcgccggcgaagggtggtagacgaggatccggacgagaggcggcggaaatttctggaacggaaccgggcagctgccacccgctgcagacagaagaggaaggtctgggtgatgtcattggaaaagaaagcagaagaactcacccagacaaacatgcagcttcagaatgaagtgtctatgttgaaaaatgaggtggcccagctgaaacagttgttgttaacacataaagactgcccaataacagccatgcagaaagaatcacaaggatatctaagtccagagagtagccctcctgctagtcctgtcccagcttgctcccagcaacaagtcatccagcataataccatcactacttcctcatcggtcagcgaggtggtaggaagctccaccctcagccagctcaccactcacagaacagacctgaatccgattctttaaaatgcaccatcagacctggcctccaagaagagctgtagcgtaccatgcgtcctttcttttaagggcatttttagaattaactcagacctggaagactcctcagttcttcaaagactggctttcatttttatagttattatggaaatgttgtcttttatacttagttatataagaaaaaagggagttatgcaattaatatctatcagcttgggaaacgctttggtgcttttctccagttttctggtaccagttacttgtttataaactgaaccttttctgtatatagccatggtttcattcttatcagtccaaccctttgcctgaaacattgaatcttgttaaaccacagcttttagctaaaatgaggtatacctagatgtcaagtaagacagatccaaggtaactgggtaggaaatcttttgacatcttaactcatgttgagtttgtgctgtggtgtcaccagaattccagataaacacacagcctttcccatacctttttttttcttactataaaatattataagatccattgatgtccaaataataccaccaagcatctcttcacctctcctcctcttggtccacttgctaatgcccagttttcttctccatttccactttttcttaggctccctatttactattcattttgacttccttctgttttatttttttccctttagcattgcatgtgaataagaaaataatgtttaaagaaa

SEQ ID NO: 113792 - DNA, 2319 bp, Homo sapiens
  Payload ID: 2231
  Gene Symbol: CREB5
  Gene Name: cAMP responsive element binding protein 5
  Uniprot ID: Q02930
  ENST ID: ENST00000396300
  CDS Start-End: 93-1598
ttttagtggtggagtcaatttatttctgaaacgatctcatttacctgaatgaggagctcatatttattttcaggatttatgaggaatccaagatgaatttggagcaggagaggccgtttgtctgcagtgccccaggctgctcccagcgcttcccaacagaggaccatctgatgattcataggcacaaacatgaaatgactttgaagtttccttcaataaaaacagacaatatgttatcagatcaaactccgaccccaacgagattcctgaagaactgcgaggaggtgggcctcttcagcgagctggactgctccctggagcacgagttcaggaaggctcaggaagaggagagcagcaagcggaatatctcgatgcataatgcagttggtggggccatgacggggcccggaactcaccagcttagcagcgctcggctgcccaaccatgacaccaacgttgtgattcagcaagccatgccgtcgcctcagtccagctctgtcatcactcaggcaccttccaccaaccgccagatcgggcctgtcccaggctctctatcttctctgctacatctccacaacagacagagacagcccatgccagcctccatgcctgggaccctgcccaaccctacaatgccaggatcttccgccgtcttgatgccaatggagcgacaaatgtcagtgaactccagcatcatggggatgcaaggtccaaatctcagcaacccctgtgcttctccccaggtccagccaatgcattcagaagccaaaatgaggttgaaggctgcattgactcaccaccctgctgccatgtcaaatgggaacatgaacaccatgggacacatgatggagatgatgggctcccggcaggaccagacgccacaccatcacatgcactcgcacccgcatcagcaccagacactgccaccccatcacccttacccacaccagcaccagcacccagcacaccatcctcaccctcaaccccatcaccagcagaaccatccacatcaccactcccattcccaccttcatgcacacccagcacatcaccagacctcgccacatccgcccctgcacaccggcaaccaagcacaggtttcaccagcaacacaacagatgcagccaacccagacaatacagccaccccagcccacaggggggcgccggcgaagggtggtagacgaggatccggacgagaggcggcggaaatttctggaacggaaccgggcagctgccacccgctgcagacagaagaggaaggtctgggtgatgtcattggaaaagaaagcagaagaactcacccagacaaacatgcagcttcagaatgaagtgtctatgttgaaaaatgaggtggcccagctgaaacagttgttgttaacacataaagactgcccaataacagccatgcagaaagaatcacaaggatatctaagtccagagagtagccctcctgctagtcctgtcccagcttgctcccagcaacaagtcatccagcataataccatcactacttcctcatcggtcagcgaggtggtaggaagctccaccctcagccagctcaccactcacagaacagacctgaatccgattctttaaaatgcaccatcagacctggcctccaagaagagctgtagcgtaccatgcgtcctttcttttaagggcatttttagaattaactcagacctggaagactcctcagttcttcaaagactggctttcatttttatagttattatggaaatgttgtcttttatacttagttatataagaaaaaagggagttatgcaattaatatctatcagcttgggaaacgctttggtgcttttctccagttttctggtaccagttacttgtttataaactgaaccttttctgtatatagccatggtttcattcttatcagtccaaccctttgcctgaaacattgaatcttgttaaaccacagcttttagctaaaatgaggtatacctagatgtcaagtaagacagatccaaggtaactgggtaggaaatcttttgacatcttaactcatgttgagtttgtgctgtggtgtcaccagaattccagataaacacacagcctttcccatacctttttttttcttactataaaatattataagatccattgatgtccaaataataccaccaagcatctcttcacctctcctcctcttggtccacttgctaatgcccagttttcttctccatttccactttttcttaggctccctatttactattcattttgacttccttctgttttatttttttccctttagcattgcatgtgaataagaaaataatgtttaaagaaa

SEQ ID NO: 113793 - DNA, 1944 bp, Homo sapiens
  Payload ID: 2231
  Gene Symbol: CREB5
  Gene Name: cAMP responsive element binding protein 5
  Uniprot ID: Q02930
  ENST ID: ENST00000409603
  CDS Start-End: 159-1586
ctttcaagagcactaggcagtgacgggaagcggagtgatataacggtagcctgagaaggaaacagtttttttaaaaattaaaggatagccgagctggagtttgtcaagaacaagaaaccagtgagacagaagggcgcttcccaacagaggaccatctgatgattcataggcacaaacatgaaatgactttgaagtttccttcaataaaaacagacaatatgttatcagatcaaactccgaccccaacgagattcctgaagaactgcgaggaggtgggcctcttcagcgagctggactgctccctggagcacgagttcaggaaggctcaggaagaggagagcagcaagcggaatatctcgatgcataatgcagttggtggggccatgacggggcccggaactcaccagcttagcagcgctcggctgcccaaccatgacaccaacgttgtgattcagcaagccatgccgtcgcctcagtccagctctgtcatcactcaggcaccttccaccaaccgccagatcgggcctgtcccaggctctctatcttctctgctacatctccacaacagacagagacagcccatgccagcctccatgcctgggaccctgcccaaccctacaatgccaggatcttccgccgtcttgatgccaatggagcgacaaatgtcagtgaactccagcatcatggggatgcaaggtccaaatctcagcaacccctgtgcttctccccaggtccagccaatgcattcagaagccaaaatgaggttgaaggctgcattgactcaccaccctgctgccatgtcaaatgggaacatgaacaccatgggacacatgatggagatgatgggctcccggcaggaccagacgccacaccatcacatgcactcgcacccgcatcagcaccagacactgccaccccatcacccttacccacaccagcaccagcacccagcacaccatcctcaccctcaaccccatcaccagcagaaccatccacatcaccactcccattcccaccttcatgcacacccagcacatcaccagacctcgccacatccgcccctgcacaccggcaaccaagcacaggtttcaccagcaacacaacagatgcagccaacccagacaatacagccaccccagcccacaggggggcgccggcgaagggtggtagacgaggatccggacgagaggcggcggaaatttctggaacggaaccgggcagctgccacccgctgcagacagaagaggaaggtctgggtgatgtcattggaaaagaaagcagaagaactcacccagacaaacatgcagcttcagaatgaagtgtctatgttgaaaaatgaggtggcccagctgaaacagttgttgttaacacataaagactgcccaataacagccatgcagaaagaatcacaaggatatctaagtccagagagtagccctcctgctagtcctgtcccagcttgctcccagcaacaagtcatccagcataataccatcactacttcctcatcggtcagcgaggtggtaggaagctccaccctcagccagctcaccactcacagaacagacctgaatccgattctttaaaatgcaccatcagacctggcctccaagaagagctgtagcgtaccatgcgtcctttcttttaagggcatttttagaattaactcagacctggaagactcctcagttcttcaaagactggctttcatttttatagttattatggaaatgttgtcttttatacttagttatataagaaaaaagggagttatgcaattaatatctatcagcttgggaaacgctttggtgcttttctccagttttctggtaccagttacttgtttataaactgaaccttttctgtatatagccatggtttcattcttatcagtccaaccctttgcctgaaacattgaatcttgttaaaccacagcttttagct

SEQ ID NO: 113794 - DNA, 563 bp, Homo sapiens
  Payload ID: 2231
  Gene Symbol: CREB5
  Gene Name: cAMP responsive element binding protein 5
  ENST ID: ENST00000424599
  CDS Start-End: 219-563
acccgggctccgctcttgccttctccacacttgtttgagacctggcaaggtgcggagccctccagaagtgcggtcaagcggcagcggagacggcgagccaggaacctccccccgcgtccccagcttcccagcgtggcggcggaacccccggagaaagaataaagactggatacaggtccattacgtcattctgcaggccaatttatgaggaatccaagatgaatttggagcaggagaggccgtttgtctgcagtgccccaggctgctcccagcgcttcccaacagaggaccatctgatgattcataggcacaaacatgaaatgactttgaagtttccttcaataaaaacagacaatatgttatcagatcaaactccgaccccaacgagattcctgaagaactgcgaggaggtgggcctcttcagcgagctggactgctccctggagcacgagttcaggaaggctcaggaagaggagagcagcaagcggaatatctcgatgcataatgcagttggtggggccatgacggggcccggaactcaccagcttagcagcgctcggctg

SEQ ID NO: 113795 - DNA, 753 bp, Homo sapiens
  Payload ID: 2231
  Gene Symbol: CREB5
  Gene Name: cAMP responsive element binding protein 5
  ENST ID: ENST00000426500
  CDS Start-End: 119-753
gacagaagtacagctttaaatagccttgcagatacatttttctaaaaatgcagacctgaggcctgtcccaggctctctatcttctctgctacatctccacaacagacagagacagcccatgccagcctccatgcctgggaccctgcccaaccctacaatgccaggatcttccgccgtcttgatgccaatggagcgacaaatgtcagtgaactccagcatcatggggatgcaaggtccaaatctcagcaacccctgtgcttctccccaggtccagccaatgcattcagaagccaaaatgaggttgaaggctgcattgactcaccaccctgctgccatgtcaaatgggaacatgaacaccatgggacacatgatggagatgatgggctcccggcaggaccagacgccacaccatcacatgcactcgcacccgcatcagcaccagacactgccaccccatcacccttacccacaccagcaccagcacccagcacaccatcctcaccctcaaccccatcaccagcagaaccatccacatcaccactcccattcccaccttcatgcacacccagcacatcaccagacctcgccacatccgcccctgcacaccggcaaccaagcacaggtttcaccagcaacacaacagatgcagccaacccagacaatacagccaccccagcccacaggggggcgccggcgaagggtggtagacgaggatccggacgagaggcggcggaaatttctggaacggaaccg

SEQ ID NO: 113796 - DNA, 588 bp, Homo sapiens
  Payload ID: 2231
  Gene Symbol: CREB5
  Gene Name: cAMP responsive element binding protein 5
  ENST ID: ENST00000498316
  CDS Start-End: 1-120
cttcagaatgaagtgtctatgttgaaaaatgaggtggcccagctgaaacagttgttgttaacacataaagactgcccaataacagccatgcagaaagaatcacaaggatatctaaattgagcaacacagattctcccaccacatgtccagagagtagccctcctgctagtcctgtcccagcttgctcccagcaacaagtcatccagcataataccatcactacttcctcatcggtcagcgaggtggtaggaagctccaccctcagccagctcaccactcacagaacagacctgaatccgattctttaaaatgcaccatcagacctggcctccaagaagagctgtagcgtaccatgcgtcctttcttttaagggcatttttagaattaactcagacctggaagactcctcagttcttcaaagactggctttcatttttatagttattatggaaatgttgtcttttatacttagttatataagaaaaaagggagttatgcaattaatatctatcagcttgggaaacgctttggtgcttttctccagttttctggtaccagttacttgtttataaactgaaccttttctgt

SEQ ID NO: 113797 - DNA, 3754 bp, Homo sapiens
  Payload ID: 2232
  Gene Symbol: CREBL2
  Gene Name: cAMP responsive element binding protein-like 2
  Uniprot ID: O60519
  ENST ID: ENST00000228865
  CDS Start-End: 282-644
cagagcgtctgtaaacacccagagactgtcatggagggggaggaggaggcggcggcggcgaagggaggcgtttggggccgcctccagggtccgctctgccattcctgaactggtccctcgtccccgtgactctggcatcagggaagcgaactgttaggcgagaggaggaggcagccagaaccatatccccttcttcctcggggcgggggccgggccaggccggctgagccgggggagggctccgggagggagtgcctggccaggccggcctgtctgccgcgatggatgacagtaaggtggttggaggcaaagtaaagaagcccggtaaacgtggtcggaagccagccaaaattgacttgaaagcaaaacttgagaggagccggcagagtgcaagagaatgccgagcccgaaaaaagctgagatatcagtatttggaagagttggtatccagtcgagaaagagctatatgtgccctcagagaggaactggaaatgtacaagcagtggtgcatggcaatggaccaaggaaaaatcccttctgaaataaaggccctactcactggagaagagcagaacaaatctcagcagaactcaagcaggcataccaaggctgggaagacagatgctaatagcaattcctggtgaagattatataaagatgagtcagtgattgaagccaatattctgattcccatggaagatggatgggcaagagtgtacttcttggctccatttactacctactgctcagtagtcatctctgtaaatctgcaatttctaccaaaatgtgtgatcgtagatctcaaaggatcttgctttaactttcaacacttagaaaatctacaaacattcagacctgtctgggttggtattgccacccatgacatttaacatgttgtgatgcttgaaaacacaggagtagagaaaatcgatgaagattgtatttttgcaccttaactccacattgctttattggttaatttatattctttccatgtaattcatgtaattgtatgtctgtgtgtgttttatgtgtcaccacctttcatgtttttgattgccctacaaagagaaaccaaatgagctgattactgactataagttctcagcctttatggacctaatcttatttttatttacttgagtaatgtttattctctgcatgaaccatgatttctcctgtgagccattccagcataagctgtgaatatgtattaacaaatatatacatttctatttttataatccataaggatatgcctgttttaaataacatacatattaacaatatctatcaggaaaaccctcaagacagcttctagttaaaacctttgttgctgtcctctcaaactatatttataaaaatttgctagggccaaatccatacttgcagaataattcatcaaattttatttttaagtgaaaagtaacctttcaggcatttcagcagcatacattgacaatctagggtatatatgtatgtatgtttcttattgtatgtctatatatgtatgtggggaggacaggagtgaatgttcacacacttttcttgcgtactcaactaaattggagaatgtttctgaagaaaattggatgaaattagctgctgagattgagtttctgccttaaaatctgaaacaaaaaaagggacaaattgctggtagatctactgactgtagccatcaccagaacacttagtttcttcccagacatgaatttcctgacaggctctgagccagaaacacactgtgggcgtgcatctggttcagccctggatatgcctccactgtggagggaagcattggaactggagttgtgcacagcaccgcagctagtgggcctggctgggggtgcagaagggcagggtagttctttccatttccccttgcagctacacttactttctccctgactaccaaatggagtgacggttgaagaatcaagctcataatatgatacacccagacagacccagaaatcttttgatttccccagcgagatacttaccactctctcttctctttcccatggttaaaacaggagttgtgttctctgtcgctgctaaattattcttcacttgagtgaagcaaatatttagcttccaaataaagtatattttgttctgaactggcagtttaagaggagataccgtagtctagattgtctttgaggtagaatatatgatggaccacatagtttaagattacaaggtactttccctcttctctcaggccatgcatttgaataaagtgcctcccttagcctgagctcctaaagacctcttgtacttggttgcaaactcagatctctagtctagtctagtctagtctagtctagtcatgtgtgactgtgtactgagataccactagcccagtttgctgggtctctatgttttggaagttgggggtttaataatatttaatgtctttttaggatcataaacataaataggtttgttgatattcaggccttcagaatttaagggttttaaatatagcattcagattgtaattggtatgtttttgccatctggtccactcaattgtatatttttattttgcaaaacaacccaaaacttactttatgttgctttgttcagtaccttttgaattcccccagaagagttgttttcaaaacaaacattccagaatgaatgtcgctcttcaatggaacgtctttattgtgcttgaagtatttcttctctggttgtaattctaaattacagagtcatttgagctttctcccctcccgctagtatctttacaggagcagggaagagcagtagaggatgtataattttgggcgaagttaaattacaatttatttgaggttattcctaaacctatttatttggtgttttggaggagatcacacactaagagaacgttgattgcctcggctattgtgctggctggacactttggtcacttttgaagcatgttaataaatgtcactgattaaaacagctggagcatttccttccctttccagtgaaggagcagcatagtgaaatcctggcacccctcacctttttgtgatgacaagatggctgacagtcacggagtccaggagaaggtgctgctctccttgctttctgagtaaacagagtaatgttttttttcttattttcccaaagaaagaaaagggggaaaatatatttgtatgtttagaccagccaaattctgtcattattttagtatcaacctgctgtatattagagcaactgaatataatatggaataagtttgaccaggtcaagttttaggatatagttgaatttctttaaaaagttttctattttatctaaaatctttccattatatctaaattagaatgatcatcctgcgcaaattcagattactgtttgctggctaattgacagtatttctcagcatcactatgtagcattctgttttagcatctttgaattatgatcatttgatttggctaattacaaaaagtacaggtttaaactggacttagcttgagttaaaggcaaagaaaatctaaaaacataaatgttatatttcacaagaaatcagttgcatattatccattacatatttagttttaaaaggaggagtcaccttgaattattttctgagtcaccttgagttatttgatctctcagcctgctttctcatctgtaaaaaaggggggaggataactttcacagggtaattggtaggctaaataggagttacagaaaactgttaaatagggaagaactacattaaatttaaatattcacatta

SEQ ID NO: 113798 - DNA, 2220 bp, Homo sapiens
  Payload ID: 2233
  Gene Symbol: CREM
  Gene Name: cAMP responsive element modulator
  Uniprot ID: Q03060
  ENST ID: ENST00000345491
  CDS Start-End: 163-1065
gacccgcctgcctcctcgcgaacttgggacgagttggaaaatcctccctgagagagccgtgcggctcaggggagcggtttaactcggaaaaggaaaaggaatccagaagataaataaagaaaacaggaaaggaggaaagcattgattacaaatatcttaacaatgagcaaatgtgcaaggaaaaaatatattaagacaaatccaagacaaatgaccatggaaacagttgaatcccagcatgatggaagtataacagcttctttgacagagagcaagtctgctcatgtgcagactcagactggccaaaattcaatccctgctttagctcaggtagcagcaattgcagagacagatgaatctgcagaatcagaaggtgtaattgattctcataaacgtagagaaatcctttcacgaagaccctcttataggaaaatactgaatgaactgtcctctgatgtgcctggtgttcccaagattgaagaagagagatcagaggaagaaggaacaccacctagtattgctaccatggcagtaccaactagcatatatcagactagcacggggcaatacattgctatagcccaaggtggaacaatccagatttctaacccaggatctgatggtgttcagggactgcaggcattaacaatgacaaattcaggagctcctccaccaggtgctacaattgtacagtacgcagcacaatcagctgatggcacacagcagttctttgtcccaggcagccaggttgttgttcaagctgccactggtgacatgccaacttaccagatccgagctcctactgctgctttgccacagggagtggtgatggctgcatcgcccggaagtttgcacagtccccagcagctggcagaagaagcaacacgcaaacgagagctgaggctaatgaaaaacagggaagctgccaaagaatgtcgacgtcgaaagaaagaatatgtaaaatgtctggagagccgagttgcagtgctggaagtccagaacaagaagcttatagaggaacttgaaaccttgaaagacatttgttctcccaaaacagattactagaaatatttaactatgaactgaaggcagcatgtatagttgcttttgaaggaatacaatatatagctggcaagaatggtggcttcttttctttgtatcattcatcttcttctttaatcacttaacattcctaaaatgcttcactgtacgtagttaagtcgtagctataacttcaaattttttaaaagagacaaactgtaaaaaatgtgtgtattcttaaaatgcaatatttgtaaggcttgttccaatgccacatacttgcagctcccattctatgtgtcatcaatagtgtcctatgcaataaaattatttgcaggtctttaaatcattttaggaaaggatgatcaaaaataatgcatccagcagtacaataaaagtaaaccacaaaaaaatacctcaggaaagaatagaaagaaagtctatctaatgacatgcctatatgagaagaatagcctagatatgaatatatggcatttgcagatttttatattagttgctttgttaaaaaaaaaaagattgtattgctgtccttgaatgccatagtcaaagagagtttttaatagaaccatgttggttgcactttgtagtgtttggtgctcatttaaatatctgaacatttactacagtttttaactctactgtgtaatataaaagatcttgcagaagttcttagtgttggtttaatattacctaatgaaagtgatgacatattttttatatctggaatgagcctgttgggatcgcattgcataccttcggggtacaagtcagtttctacactgggtgctgatccttgcacgcgccctttctaccatctcacggtggggatggccgcagggctgtgcacccagaagaagatggctgttagcgtttcggccttcataatggcctgagactttctttctgtaggtggtctggagctgtccggctggtggccccctattttgccatttagcgaacaaccacaggaattttaaaaacaaaaacatcccaagattttttcatttcaaaatgcttcaaagtccacattagatcagatactccgctgtcggcacattcagctgaggttcattacaatcgagactgcaatgtgatctatgtttcatcttgtttttataataaaaagcttcagggaacaagcccaaagccctcaccaca

SEQ ID NO: 113799 - DNA, 900 bp, Homo sapiens
  Payload ID: 2233
  Gene Symbol: CREM
  Gene Name: cAMP responsive element modulator
  Uniprot ID: Q03060
  ENST ID: ENST00000337656
  CDS Start-End: 1-900
atgagcaaatgtgcaaggaaaaaatatattaagacaaatccaagacaaatgaccatggaaacagttgaatcccagcatgatggaagtataacagcttctttgacagagagcaagtctgctcatgtgcagactcagactggccaaaattcaatccctgctttagctcaggtagcagcaattgcagagacagatgaatctgcagaatcagaaggtgtaattgattctcataaacgtagagaaatcctttcacgaagaccctcttataggaaaatactgaatgaactgtcctctgatgtgcctggtgttcccaagattgaagaagagagatcagaggaagaaggaacaccacctagtattgctaccatggcagtaccaactagcatatatcagactagcacggggcaatacattgctatagcccaaggtggaacaatccagatttctaacccaggatctgatggtgttcagggactgcaggcattaacaatgacaaattcaggagctcctccaccaggtgctacaattgtacagtacgcagcacaatcagctgatggcacacagcagttctttgtcccaggcagccaggttgttgttcaagctgccactggtgacatgccaacttaccagatccgagctcctactgctgctttgccacagggagtggtgatggctgcatcgcccggaagtttgcacagtccccagcagctggcagaagaagcaacacgcaaacgagagctgaggctaatgaaaaacagggaagctgcccgggagtgtcgcaggaagaagaaagaatatgtcaaatgtcttgaaaatcgtgtggctgtgcttgaaaaccaaaacaagactctcattgaggaactcaaggccctcaaagatctttattgccataaagtagagtaa

SEQ ID NO: 113800 - DNA, 1541 bp, Homo sapiens
  Payload ID: 2233
  Gene Symbol: CREM
  Gene Name: cAMP responsive element modulator
  Uniprot ID: Q03060
  ENST ID: ENST00000342105
  CDS Start-End: 111-848
ggaacattcttagccaccgaagtatgggcaccaaaagcgataaggagcatgtgttccttaataaatgtcacatcagaaaatgactgttccaggacagtaaccacctcccgatggtagcagcaattgcagagacagatgaatctgcagaatcagaaggtgtaattgattctcataaacgtagagaaatcctttcacgaagaccctcttataggaaaatactgaatgaactgtcctctgatgtgcctggtgttcccaagattgaagaagagagatcagaggaagaaggaacaccacctagtattgctaccatggcagtaccaactagcatatatcagactagcacggggcaatacattgctatagcccaaggtggaacaatccagatttctaacccaggatctgatggtgttcagggactgcaggcattaacaatgacaaattcaggagctcctccaccaggtgctacaattgtacagtacgcagcacaatcagctgatggcacacagcagttctttgtcccaggcagccaggttgttgttcaagctgccactggtgacatgccaacttaccagatccgagctcctactgctgctttgccacagggagtggtgatggctgcatcgcccggaagtttgcacagtccccagcagctggcagaagaagcaacacgcaaacgagagctgaggctaatgaaaaacagggaagctgccaaagaatgtcgacgtcgaaagaaagaatatgtaaaatgtctggagagccgagttgcagtgctggaagtccagaacaagaagcttatagaggaacttgaaaccttgaaagacatttgttctcccaaaacagattactagaaatatttaactatgaactgaaggcagcatgtatagttgcttttgaaggaatacaatatatagctggcaagaatggtggcttcttttctttgtatcattcatcttcttctttaatcacttaacattcctaaaatgcttcactgtacgtagttaagtcgtagctataacttcaaattttttaaaagagacaaactgtaaaaaatgtgtgtattcttaaaatgcaatatttgtaaggcttgttccaatgccacatacttgcagctcccattctatgtgtcatcaatagtgtcctatgcaataaaattatttgcaggtctttaaatcattttaggaaaggatgatcaaaaataatgcatccagcagtacaataaaagtaaaccacaaaaaaatacctcaggaaagaatagaaagaaagtctatctaatgacatgcctatatgagaagaatagcctagatatgaatatatggcatttgcagatttttatattagttgctttgttaaaaaaaaaaagattgtattgctgtccttgaatgccatagtcaaagagagtttttaatagaaccatgttggttgcactttgtagtgtttggtgctcatttaaatatctgaacatttactacagtttttaactctactgtgtaatataaaagatcttgcagaagttcttagtgttggtttaatattacctaatg

SEQ ID NO: 113801 - DNA, 1625 bp, Homo sapiens
  Payload ID: 2233
  Gene Symbol: CREM
  Gene Name: cAMP responsive element modulator
  ENST ID: ENST00000344351
  CDS Start-End: 241-528
cagatttagagttaactagctcaccactgcctctgcctccaagctgccttttagactgaatagcttttcttgttagccctactttaacatttcttttgaagtggttgtctgcttgaagagggaaacacgtcatgaaactgtaatgcatgaacagaactcaggagttgtctggccagcttagtggtaagatcgagcctcctactgaggccgtccctgcatgcgcctgctgccactggtgacatgccaacttaccagatccgagctcctactgctgctttgccacagggagtggtgatggctgcatcgcccggaagtttgcacagtccccagcagctggcagaagaagcaacacgcaaacgagagctgaggctaatgaaaaacagggaagctgcccgggagtgtcgcaggaagaagaaagaatatgtcaaatgtcttgaaaatcgtgtggctgtgcttgaaaaccaaaacaagactctcattgaggaactcaaggccctcaaagatctttattgccataaagtagagtaactgtctttgacttggaccttgtttactctaatcaaggcaggagatgcagcagtcctacttattgccatgtggacttgtgggaaggacacgtgtgacccttaagaatccagtttggattagtgtttgaaattgaattgggaatgttgttccaggatgtggaatgcagccgtgatcacacttaccgagcttactttgatctgtttgtcaatagcatgcaaaaaatgctttgtttgccctttgcttctgctttttttcagggaagctgccaaagaatgtcgacgtcgaaagaaagaatatgtaaaatgtctggagagccgagttgcagtgctggaagtccagaacaagaagcttatagaggaacttgaaaccttgaaagacatttgttctcccaaaacagattactagaaatatttaactatgaactgaaggcagcatgtatagttgcttttgaaggaatacaatatatagctggcaagaatggtggcttcttttctttgtatcattcatcttcttctttaatcacttaacattcctaaaatgcttcactgtacgtagttaagtcgtagctataacttcaaattttttaaaagagacaaactgtaaaaaatgtgtgtattcttaaaatgcaatatttgtaaggcttgttccaatgccacatacttgcagctcccattctatgtgtcatcaatagtgtcctatgcaataaaattatttgcaggtctttaaatcattttaggaaaggatgatcaaaaataatgcatccagcagtacaataaaagtaaaccacaaaaaaatacctcaggaaagaatagaaagaaagtctatctaatgacatgcctatatgagaagaatagcctagatatgaatatatggcatttgcagatttttatattagttgctttgttaaaaaaaaaaagattgtattgctgtccttgaatgccatagtcaaagagagtttttaatagaaccatgttggttgcactttgtagtgtttggtgctcatttaaatatctgaacatttactacagtttttaactctactgtgtaatataaaagatcttgcagaagttcttagtgttggtttaatattacctaat

SEQ ID NO: 113802 - DNA, 1821 bp, Homo sapiens
  Payload ID: 2233
  Gene Symbol: CREM
  Gene Name: cAMP responsive element modulator
  Uniprot ID: Q03060
  ENST ID: ENST00000348787
  CDS Start-End: 1-666
atgaccatggaaacagttgaatcccagcatgatggaagtataacagcttctttgacagagagcaagtctgctcatgtgcagactcagactggccaaaattcaatccctgctttagctcaggtagcagcaattgcagagacagatgaatctgcagaatcagaaggtgtaattgattctcataaacgtagagaaatcctttcacgaagaccctcttataggaaaatactgaatgaactgtcctctgatgtgcctggtgttcccaagattgaagaagagagatcagaggaagaaggaacaccacctagtattgctaccatggcagtaccaactagcatatatcagactagcacggggcaatacactgccactggtgacatgccaacttaccagatccgagctcctactgctgctttgccacagggagtggtgatggctgcatcgcccggaagtttgcacagtccccagcagctggcagaagaagcaacacgcaaacgagagctgaggctaatgaaaaacagggaagctgccaaagaatgtcgacgtcgaaagaaagaatatgtaaaatgtctggagagccgagttgcagtgctggaagtccagaacaagaagcttatagaggaacttgaaaccttgaaagacatttgttctcccaaaacagattactagaaatatttaactatgaactgaaggcagcatgtatagttgcttttgaaggaatacaatatatagctggcaagaatggtggcttcttttctttgtatcattcatcttcttctttaatcacttaacattcctaaaatgcttcactgtacgtagttaagtcgtagctataacttcaaattttttaaaagagacaaactgtaaaaaatgtgtgtattcttaaaatgcaatatttgtaaggcttgttccaatgccacatacttgcagctcccattctatgtgtcatcaatagtgtcctatgcaataaaattatttgcaggtctttaaatcattttaggaaaggatgatcaaaaataatgcatccagcagtacaataaaagtaaaccacaaaaaaatacctcaggaaagaatagaaagaaagtctatctaatgacatgcctatatgagaagaatagcctagatatgaatatatggcatttgcagatttttatattagttgctttgttaaaaaaaaaaagattgtattgctgtccttgaatgccatagtcaaagagagtttttaatagaaccatgttggttgcactttgtagtgtttggtgctcatttaaatatctgaacatttactacagtttttaactctactgtgtaatataaaagatcttgcagaagttcttagtgttggtttaatattacctaatgaaagtgatgacatattttttatatctggaatgagcctgttgggatcgcattgcataccttcggggtacaagtcagtttctacactgggtgctgatccttgcacgcgccctttctaccatctcacggtggggatggccgcagggctgtgcacccagaagaagatggctgttagcgtttcggccttcataatggcctgagactttctttctgtaggtggtctggagctgtccggctggtggccccctattttgccatttagcgaacaaccacaggaattttaaaaacaaaaacatcccaagattttttcatttcaaaatgcttcaaagtccacattagatcagatactccgctgtcggcacattcagctgaggttcattacaatcgagactgcaatgtgatctatgtttcatcttgtttttataataaaaagcttcagggaacaagcccaaagccctcaccaca

SEQ ID NO: 113803 - DNA, 1589 bp, Homo sapiens
  Payload ID: 2233
  Gene Symbol: CREM
  Gene Name: cAMP responsive element modulator
  Uniprot ID: Q03060
  ENST ID: ENST00000354759
  CDS Start-End: 87-833
cgaggtccgctacgtaaatccctttgcggcgggataaataaagaaaacaggaaaggaggaaagcattgattacaaatatcttaacaatgagcaaatgtgcaaggaaaaaatatattaagacaaatccaagacaaatgaccatggaaacagttgaatcccagcatgatggaagtataacagcttctttgacagagagcaagtctgctcatgtgcagactcagactggccaaaattcaatccctgctttagctcaggtagcagcaattgcagagacagatgaatctgcagaatcagaaggtgtaattgattctcataaacgtagagaaatcctttcacgaagaccctcttataggaaaatactgaatgaactgtcctctgatgtgcctggtgttcccaagattgaagaagagagatcagaggaagaaggaacaccacctagtattgctaccatggcagtaccaactagcatatatcagactagcacggggcaatacaatgaggaaactgaacttgccccaagtcacatggctgctgccactggtgacatgccaacttaccagatccgagctcctactgctgctttgccacagggagtggtgatggctgcatcgcccggaagtttgcacagtccccagcagctggcagaagaagcaacacgcaaacgagagctgaggctaatgaaaaacagggaagctgcccgggagtgtcgcaggaagaagaaagaatatgtcaaatgtcttgaaaatcgtgtggctgtgcttgaaaaccaaaacaagactctcattgaggaactcaaggccctcaaagatctttattgccataaagtagagtaactgtctttgacttggaccttgtttactctaatcaaggcaggagatgcagcagtcctacttattgccatgtggacttgtgggaaggacacgtgtgacccttaagaatccagtttggattagtgtttgaaattgaattgggaatgttgttccaggatgtggaatgcagccgtgatcacacttaccgagcttactttgatctgtttgtcaatagcatgcaaaaaatgctttgtttgccctttgcttctgctttttttcagggaagctgccaaagaatgtcgacgtcgaaagaaagaatatgtaaaatgtctggagagccgagttgcagtgctggaagtccagaacaagaagcttatagaggaacttgaaaccttgaaagacatttgttctcccaaaacagattactagaaatatttaactatgaactgaaggcagcatgtatagttgcttttgaaggaatacaatatatagctggcaagaatggtggcttcttttctttgtatcattcatcttcttctttaatcacttaacattcctaaaatgcttcactgtacgtagttaagtcgtagctataacttcaaattttttaaaagagacaaactgtaaaaaatgtgtgtattcttaaaatgcaatatttgtaaggcttgttccaatgccacatacttgcagctcccattctatgtgtcatcaatagtgtcctatgcaataaaattatttgcaggtctttaaatcattttaggaaaggatgatcaaaaataa

SEQ ID NO: 113804 - DNA, 1895 bp, Homo sapiens
  Payload ID: 2233
  Gene Symbol: CREM
  Gene Name: cAMP responsive element modulator
  Uniprot ID: Q03060
  ENST ID: ENST00000356917
  CDS Start-End: 44-370
tgtggtagaggaaacaagacagttctgtctgcagaagcccattatggctgtaactggagatgacacagctgccactggtgacatgccaacttaccagatccgagctcctactgctgctttgccacagggagtggtgatggctgcatcgcccggaagtttgcacagtccccagcagctggcagaagaagcaacacgcaaacgagagctgaggctaatgaaaaacagggaagctgcccgggagtgtcgcaggaagaagaaagaatatgtcaaatgtcttgaaaatcgtgtggctgtgcttgaaaaccaaaacaagactctcattgaggaactcaaggccctcaaagatctttattgccataaagtagagtaactgtctttgacttggaccttgtttactctaatcaaggcaggagatgcagcagtcctacttattgccatgtggacttgtgggaaggacacgtgtgacccttaagaatccagtttggattagtgtttgaaattgaattgggaatgttgttccaggatgtggaatgcagccgtgatcacacttaccgagcttactttgatctgtttgtcaatagcatgcaaaaaatgctttgtttgccctttgcttctgctttttttcagggaagctgccaaagaatgtcgacgtcgaaagaaagaatatgtaaaatgtctggagagccgagttgcagtgctggaagtccagaacaagaagcttatagaggaacttgaaaccttgaaagacatttgttctcccaaaacagattactagaaatatttaactatgaactgaaggcagcatgtatagttgcttttgaaggaatacaatatatagctggcaagaatggtggcttcttttctttgtatcattcatcttcttctttaatcacttaacattcctaaaatgcttcactgtacgtagttaagtcgtagctataacttcaaattttttaaaagagacaaactgtaaaaaatgtgtgtattcttaaaatgcaatatttgtaaggcttgttccaatgccacatacttgcagctcccattctatgtgtcatcaatagtgtcctatgcaataaaattatttgcaggtctttaaatcattttaggaaaggatgatcaaaaataatgcatccagcagtacaataaaagtaaaccacaaaaaaatacctcaggaaagaatagaaagaaagtctatctaatgacatgcctatatgagaagaatagcctagatatgaatatatggcatttgcagatttttatattagttgctttgttaaaaaaaaaaagattgtattgctgtccttgaatgccatagtcaaagagagtttttaatagaaccatgttggttgcactttgtagtgtttggtgctcatttaaatatctgaacatttactacagtttttaactctactgtgtaatataaaagatcttgcagaagttcttagtgttggtttaatattacctaatgaaagtgatgacatattttttatatctggaatgagcctgttgggatcgcattgcataccttcggggtacaagtcagtttctacactgggtgctgatccttgcacgcgccctttctaccatctcacggtggggatggccgcagggctgtgcacccagaagaagatggctgttagcgtttcggccttcataatggcctgagactttctttctgtaggtggtctggagctgtccggctggtggccccctattttgccatttagcgaacaaccacaggaattttaaaaacaaaaacatcccaagattttttcatttcaaaatgcttcaaagtccacattagatcagatactccgctgtcggcacattcagctgaggttcattacaatcgagactgcaatgtgatctatgtttcatcttgtttttataataaa

SEQ ID NO: 113805 - DNA, 2170 bp, Homo sapiens
  Payload ID: 2233
  Gene Symbol: CREM
  Gene Name: cAMP responsive element modulator
  Uniprot ID: Q03060
  ENST ID: ENST00000361599
  CDS Start-End: 211-1023
taaaccccatcgtgagggaacctagctacgggtcagagctagtccactaggtgctaatcaaatgctgtgttacaacactgtgaggttttcccagttataagtgtcactattagggttttttttaattgcaaagccaaataaggctgtcaattgcatcatcttaccttatttcttcagattaagtactgtttatagtgggatttttggtggatgtggtggcatcagcataatctatgtttcaggcgtcctatagaagaggattattcttcaggggatgtggaagaaaaggtagcagcaattgcagagacagatgaatctgcagaatcagaaggtgtaattgattctcataaacgtagagaaatcctttcacgaagaccctcttataggaaaatactgaatgaactgtcctctgatgtgcctggtgttcccaagattgaagaagagagatcagaggaagaaggaacaccacctagtattgctaccatggcagtaccaactagcatatatcagactagcacggggcaatacattgctatagcccaaggtggaacaatccagatttctaacccaggatctgatggtgttcagggactgcaggcattaacaatgacaaattcaggagctcctccaccaggtgctacaattgtacagtacgcagcacaatcagctgatggcacacagcagttctttgtcccaggcagccaggttgttgttcaagctgccactggtgacatgccaacttaccagatccgagctcctactgctgctttgccacagggagtggtgatggctgcatcgcccggaagtttgcacagtccccagcagctggcagaagaagcaacacgcaaacgagagctgaggctaatgaaaaacagggaagctgccaaagaatgtcgacgtcgaaagaaagaatatgtaaaatgtctggagagccgagttgcagtgctggaagtccagaacaagaagcttatagaggaacttgaaaccttgaaagacatttgttctcccaaaacagattactagaaatatttaactatgaactgaaggcagcatgtatagttgcttttgaaggaatacaatatatagctggcaagaatggtggcttcttttctttgtatcattcatcttcttctttaatcacttaacattcctaaaatgcttcactgtacgtagttaagtcgtagctataacttcaaattttttaaaagagacaaactgtaaaaaatgtgtgtattcttaaaatgcaatatttgtaaggcttgttccaatgccacatacttgcagctcccattctatgtgtcatcaatagtgtcctatgcaataaaattatttgcaggtctttaaatcattttaggaaaggatgatcaaaaataatgcatccagcagtacaataaaagtaaaccacaaaaaaatacctcaggaaagaatagaaagaaagtctatctaatgacatgcctatatgagaagaatagcctagatatgaatatatggcatttgcagatttttatattagttgctttgttaaaaaaaaaaagattgtattgctgtccttgaatgccatagtcaaagagagtttttaatagaaccatgttggttgcactttgtagtgtttggtgctcatttaaatatctgaacatttactacagtttttaactctactgtgtaatataaaagatcttgcagaagttcttagtgttggtttaatattacctaatgaaagtgatgacatattttttatatctggaatgagcctgttgggatcgcattgcataccttcggggtacaagtcagtttctacactgggtgctgatccttgcacgcgccctttctaccatctcacggtggggatggccgcagggctgtgcacccagaagaagatggctgttagcgtttcggccttcataatggcctgagactttctttctgtaggtggtctggagctgtccggctggtggccccctattttgccatttagcgaacaaccacaggaattttaaaaacaaaaacatcccaagattttttcatttcaaaatgcttcaaagtccacattagatcagatactccgctgtcggcacattcagctgaggttcattacaatcgagactgcaatgtgatctatgtttcatcttgtttttataataaaaagcttcagggaacaagcccaaagccc

SEQ ID NO: 113806 - DNA, 2020 bp, Homo sapiens
  Payload ID: 2233
  Gene Symbol: CREM
  Gene Name: cAMP responsive element modulator
  ENST ID: ENST00000374721
  CDS Start-End: 487-1296
ccgcaccttcccgccgcccctccccggttccatttcattgttggattgtggcgcttcactcctgctggcggccggcagggggcggagttcgagcctggatttttttcctcggggcctcccccgggaggccgtcccggcgtgggggaggggaggacggggcgggaggacgcggttcggtcggctgcagcgctacttttggtccggggtcggcagggaggccgcggctaccgcatcacagctgacgtgaggactacgtggggccgctgccggctccgggttgctgggcggcggcgccgctgctgagcggcggtcgggctcgccgtctccacctcctcgcgtccgtaatcagtgacgaggtccgctacgtaaatccctttgcggcgggataaataaagaaaacaggaaaggaggaaagcattgattacaaatatcttaacaatgagcaaatgtgcaaggaaaaaatatattaagacaaatccaagacaaatgaccatggaaacagttgaatcccagcatgatggaagtataacagcttctttgacagagagcaagtctgctcatgtgcagactcagactggccaaaattcaatccctgctttagctcaggtttctgtggctggatcaggcaccagaagaggctccccagctgtaactctagtgcagttaccttcgggccaaactatacatgtccagggagtaattcagacaccacagccatgggttattcagtcatcagaaatacacaccgttcaggtagcagcaattgcagagacagatgaatctgcagaatcagaaggtgtaattgattctcataaacgtagagaaatcctttcacgaagaccctcttataggaaaatactgaatgaactgtcctctgatgtgcctggtgttcccaagattgaagaagagagatcagaggaagaaggaacaccacctagtattgctaccatggcagtaccaactagcatatatcagactagcacggggcaatacactgccactggtgacatgccaacttaccagatccgagctcctactgctgctttgccacagggagtggtgatggctgcatcgcccggaagtttgcacagtccccagcagctggcagaagaagcaacacgcaaacgagagctgaggctaatgaaaaacagggaagctgcccgggagtgtcgcaggaagaagaaagaatatgtcaaatgtcttgaaaatcgtgtggctgtgcttgaaaaccaaaacaagactctcattgaggaactcaaggccctcaaagatctttattgccataaagtagagtaactgtctttgacttggaccttgtttactctaatcaaggcaggagatgcagcagtcctacttattgccatgtggacttgtgggaaggacacgtgtgacccttaagaatccagtttggattagtgtttgaaattgaattgggaatgttgttccaggatgtggaatgcagccgtgatcacacttaccgagcttactttgatctgtttgtcaatagcatgcaaaaaatgctttgtttgccctttgcttctgctttttttcagggaagctgccaaagaatgtcgacgtcgaaagaaagaatatgtaaaatgtctggagagccgagttgcagtgctggaagtccagaacaagaagcttatagaggaacttgaaaccttgaaagacatttgttctcccaaaacagattactagaaatatttaactatgaactgaaggcagcatgtatagttgcttttgaaggaatacaatatatagctggcaagaatggtggcttcttttctttgtatcattcatcttcttctttaatcacttaacattcctaaaatgcttcactgtacgtagttaagtcgtagctataacttcaaattttttaaaagagacaaactgtaaaaaatgtgtgtattcttaaaatgcaatatttgtaaggcttgttccaatgccacatacttgcagctcccattctatgtgtcatcaatagtgtcctatgcaataaaattatttgcaggtcttt

SEQ ID NO: 113807 - DNA, 1207 bp, Homo sapiens
  Payload ID: 2233
  Gene Symbol: CREM
  Gene Name: cAMP responsive element modulator
  Uniprot ID: Q03060
  ENST ID: ENST00000374726
  CDS Start-End: 276-689
gcctcccccgggaggccgtcccggcgtgggggaggggaggacggggcgggaggacgcggttcggtcggctgcagcgctacttttggtccggggtcggcagggaggccgcggctaccgcatcacagctgacgtgaggactacgtggggccgctgccggctccgggttgctgggcggcggcgccgctgctgagcggcggtcgggctcgccgtctccacctcctcgcgtccgtaatcagtgacgaggtccgctacgtaaatccctttgcggcggacaaatgaccatggaaacagttgaatcccagcatgatggaagtataacagcttctttgacagagagcaagtctgctcatgtgcagactcagactggccaaaattcaatccctgctttagctcaggtagcagcaattgcagagacagatgaatctgcagaatcagaaggtgtaattgattctcataaacgtagagaaatcctttcacgaagaccctcttataggaaaatactgaatgaactgtcctctgatgtgcctggtgttcccaagattgaagaagagagatcagaggaagaaggaacaccacctagtattgctaccatggcagtaccaactagcatatatcagactagcacggggcaatacagtatgtatgctgcaattcgatatgatacagtgctagctttaagtcttctctagttatattgaagcaactcaggttttggcattaaattgttccattttaaaatgcatcattaatacctaaactgtatcatagaatgaaagtatatgttaaaaagtgagatctttgtattgacagctgtcatataattttgaaaagtaaaaattttgactgccgaatatagaagaaaattttggggtaaaaaggagaatttttcctatttacatgtttatattaatctctagtaaaacattgtttttgttgtctttatgatgcatgcgaacataaatgtctgtatttcattcttgttggcttttgttacccacaattacatactattcttactaatctgagagttttctaaagtatgttttcaatgtttcactactctctactctgttaatttgtgctacagtttttcctaaaagagaatggaaaaatgatttaattttttaaactgtagcaattggatagataattttatttgaaattttacacactgaaagctctaaataaacagatacattcacattca

SEQ ID NO: 113808 - DNA, 1933 bp, Homo sapiens
  Payload ID: 2233
  Gene Symbol: CREM
  Gene Name: cAMP responsive element modulator
  Uniprot ID: Q03060
  ENST ID: ENST00000374728
  CDS Start-End: 116-781
cgggacccgcctgcctcctcgcgaacttgggacgagttggaaaatcctccctgagagagccgtgcggctcaggggagcggtttaactcggaaaaggaaaaggaatccagaaacaaatgaccatggaaacagttgaatcccagcatgatggaagtataacagcttctttgacagagagcaagtctgctcatgtgcagactcagactggccaaaattcaatccctgctttagctcaggtagcagcaattgcagagacagatgaatctgcagaatcagaaggtgtaattgattctcataaacgtagagaaatcctttcacgaagaccctcttataggaaaatactgaatgaactgtcctctgatgtgcctggtgttcccaagattgaagaagagagatcagaggaagaaggaacaccacctagtattgctaccatggcagtaccaactagcatatatcagactagcacggggcaatacactgccactggtgacatgccaacttaccagatccgagctcctactgctgctttgccacagggagtggtgatggctgcatcgcccggaagtttgcacagtccccagcagctggcagaagaagcaacacgcaaacgagagctgaggctaatgaaaaacagggaagctgccaaagaatgtcgacgtcgaaagaaagaatatgtaaaatgtctggagagccgagttgcagtgctggaagtccagaacaagaagcttatagaggaacttgaaaccttgaaagacatttgttctcccaaaacagattactagaaatatttaactatgaactgaaggcagcatgtatagttgcttttgaaggaatacaatatatagctggcaagaatggtggcttcttttctttgtatcattcatcttcttctttaatcacttaacattcctaaaatgcttcactgtacgtagttaagtcgtagctataacttcaaattttttaaaagagacaaactgtaaaaaatgtgtgtattcttaaaatgcaatatttgtaaggcttgttccaatgccacatacttgcagctcccattctatgtgtcatcaatagtgtcctatgcaataaaattatttgcaggtctttaaatcattttaggaaaggatgatcaaaaataatgcatccagcagtacaataaaagtaaaccacaaaaaaatacctcaggaaagaatagaaagaaagtctatctaatgacatgcctatatgagaagaatagcctagatatgaatatatggcatttgcagatttttatattagttgctttgttaaaaaaaaaaagattgtattgctgtccttgaatgccatagtcaaagagagtttttaatagaaccatgttggttgcactttgtagtgtttggtgctcatttaaatatctgaacatttactacagtttttaactctactgtgtaatataaaagatcttgcagaagttcttagtgttggtttaatattacctaatgaaagtgatgacatattttttatatctggaatgagcctgttgggatcgcattgcataccttcggggtacaagtcagtttctacactgggtgctgatccttgcacgcgccctttctaccatctcacggtggggatggccgcagggctgtgcacccagaagaagatggctgttagcgtttcggccttcataatggcctgagactttctttctgtaggtggtctggagctgtccggctggtggccccctattttgccatttagcgaacaaccacaggaattttaaaaacaaaaacatcccaagattttttcatttcaaaatgcttcaaagtccacattagatcagatactccgctgtcggcacattcagctgaggttcattacaatcgagactgcaatgtgatctatgtttcatcttgtttttataataaaaagcttcagggaacaagcccaaagccctcacc

SEQ ID NO: 113809 - DNA, 711 bp, Homo sapiens
  Payload ID: 2233
  Gene Symbol: CREM
  Gene Name: cAMP responsive element modulator
  Uniprot ID: Q03060
  ENST ID: ENST00000374734
  CDS Start-End: 1-711
atgagcaaatgtgcaaggaaaaaatatattaagacaaatccaagacaaatgaccatggaaacagttgaatcccagcatgatggaagtataacagcttctttgacagagagcaagtctgctcatgtgcagactcagactggccaaaattcaatccctgctttagctcaggtagcagcaattgcagagacagatgaatctgcagaatcagaaggtgtaattgattctcataaacgtagagaaatcctttcacgaagaccctcttataggaaaatactgaatgaactgtcctctgatgtgcctggtgttcccaagattgaagaagagagatcagaggaagaaggaacaccacctagtattgctaccatggcagtaccaactagcatatatcagactagcacggggcaatacactgccactggtgacatgccaacttaccagatccgagctcctactgctgctttgccacagggagtggtgatggctgcatcgcccggaagtttgcacagtccccagcagctggcagaagaagcaacacgcaaacgagagctgaggctaatgaaaaacagggaagctgcccgggagtgtcgcaggaagaagaaagaatatgtcaaatgtcttgaaaatcgtgtggctgtgcttgaaaaccaaaacaagactctcattgaggaactcaaggccctcaaagatctttattgccataaagtagagtaa

SEQ ID NO: 113810 - DNA, 849 bp, Homo sapiens
  Payload ID: 2233
  Gene Symbol: CREM
  Gene Name: cAMP responsive element modulator
  Uniprot ID: Q03060
  ENST ID: ENST00000395887
  CDS Start-End: 1-849
atgtggtggcatcagcataatctatgtttcaggcgtcctatagaagaggattattcttcaggggatgtggaagaaaaggtagcagcaattgcagagacagatgaatctgcagaatcagaaggtgtaattgattctcataaacgtagagaaatcctttcacgaagaccctcttataggaaaatactgaatgaactgtcctctgatgtgcctggtgttcccaagattgaagaagagagatcagaggaagaaggaacaccacctagtattgctaccatggcagtaccaactagcatatatcagactagcacggggcaatacattgctatagcccaaggtggaacaatccagatttctaacccaggatctgatggtgttcagggactgcaggcattaacaatgacaaattcaggagctcctccaccaggtgctacaattgtacagtacgcagcacaatcagctgatggcacacagcagttctttgtcccaggcagccaggttgttgttcaagatgaggaaactgaacttgccccaagtcacatggctgctgccactggtgacatgccaacttaccagatccgagctcctactgctgctttgccacagggagtggtgatggctgcatcgcccggaagtttgcacagtccccagcagctggcagaagaagcaacacgcaaacgagagctgaggctaatgaaaaacagggaagctgccaaagaatgtcgacgtcgaaagaaagaatatgtaaaatgtctggagagccgagttgcagtgctggaagtccagaacaagaagcttatagaggaacttgaaaccttgaaagacatttgttctcccaaaacagattactag

SEQ ID NO: 113811 - DNA, 1476 bp, Homo sapiens
  Payload ID: 2233
  Gene Symbol: CREM
  Gene Name: cAMP responsive element modulator
  ENST ID: ENST00000429130
  CDS Start-End: 206-1243
tgggcggcggcgccgctgctgagcggcggtcgggctcgccgtctccacctcctcgcgtccgtaatcagtgacgaggtccgctacgtaaatccctttgcggcgggataaataaagaaaacaggaaaggaggaaagcattgattacaaatatcttaacaatgagcaaatgtgcaaggaaaaaatatattaagacaaatccaagacaaatgaccatggaaacagttgaatcccagcatgatggaagtataacagcttctttgacagagagcaagtctgctcatgtgcagactcagactggccaaaattcaatccctgctttagctcaggtttctgtggctggatcaggcaccagaagaggctccccagctgtaactctagtgcagttaccttcgggccaaactatacatgtccagggagtaattcagacaccacagccatgggttattcagtcatcagaaatacacaccgttcaggtagcagcaattgcagagacagatgaatctgcagaatcagaaggtgtaattgattctcataaacgtagagaaatcctttcacgaagaccctcttataggaaaatactgaatgaactgtcctctgatgtgcctggtgttcccaagattgaagaagagagatcagaggaagaaggaacaccacctagtattgctaccatggcagtaccaactagcatatatcagactagcacggggcaatacattgctatagcccaaggtggaacaatccagatttctaacccaggatctgatggtgttcagggactgcaggcattaacaatgacaaattcaggagctcctccaccaggtgctacaattgtacagtacgcagcacaatcagctgatggcacacagcagttctttgtcccaggcagccaggttgttgttcaagatgaggaaactgaacttgccccaagtcacatggctgctgccactggtgacatgccaacttaccagatccgagctcctactgctgctttgccacagggagtggtgatggctgcatcgcccggaagtttgcacagtccccagcagctggcagaagaagcaacacgcaaacgagagctgaggctaatgaaaaacagggaagctgccaaagaatgtcgacgtcgaaagaaagaatatgtaaaatgtctggagagccgagttgcagtgctggaagtccagaacaagaagcttatagaggaacttgaaaccttgaaagacatttgttctcccaaaacagattactagaaatatttaactatgaactgaaggcagcatgtatagttgcttttgaaggaatacaatatatagctggcaagaatggtggcttcttttctttgtatcattcatcttcttctttaatcacttaacattcctaaaatgcttcactgtacgtagttaagtcgtagctataacttcaaattttttaaaagagacaaactgtaaaaaatgtgtgtattcttaaaatgcaatatttgtaa

SEQ ID NO: 113812 - DNA, 635 bp, Homo sapiens
  Payload ID: 2233
  Gene Symbol: CREM
  Gene Name: cAMP responsive element modulator
  ENST ID: ENST00000427847
  CDS Start-End: 166-635
cgggacccgcctgcctcctcgcgaacttgggacgagttggaaaatcctccctgagagagccgtgcggctcaggggagcggtttaactcggaaaaggaaaaggaatccagaagataaataaagaaaacaggaaaggaggaaagcattgattacaaatatcttaacaatgagcaaatgtgcaaggaaaaaatatattaagacaaatccaagacaaatgaccatggaaacagttgaatcccagcatgatggaagtataacagcttctttgacagagagcaagtctgctcatgtgcagactcagactggccaaaattcaatccctgctttagctcaggtagcagcaattgcagagacagatgaatctgcagaatcagaaggtgtaattgattctcataaacgtagagaaatcctttcacgaagaccctcttataggaaaatactgaatgaactgtcctctgatgtgcctggtgttcccaagattgaagaagagagatcagaggaagaaggaacaccacctagtattgctaccatggcagtaccaactagcatatatcagactagcacggggcaatacattgctatagcccaaggtggaacaatccagatttctaacccaggatctgatggtgttcaggg

SEQ ID NO: 113813 - DNA, 2306 bp, Homo sapiens
  Payload ID: 2233
  Gene Symbol: CREM
  Gene Name: cAMP responsive element modulator
  Uniprot ID: Q03060
  ENST ID: ENST00000439705
  CDS Start-End: 1-747
atgagcaaatgtgcaaggaaaaaatatattaagacaaatccaagacaaatgaccatggaaacagttgaatcccagcatgatggaagtataacagcttctttgacagagagcaagtctgctcatgtgcagactcagactggccaaaattcaatccctgctttagctcaggtagcagcaattgcagagacagatgaatctgcagaatcagaaggtgtaattgattctcataaacgtagagaaatcctttcacgaagaccctcttataggaaaatactgaatgaactgtcctctgatgtgcctggtgttcccaagattgaagaagagagatcagaggaagaaggaacaccacctagtattgctaccatggcagtaccaactagcatatatcagactagcacggggcaatacaatgaggaaactgaacttgccccaagtcacatggctgctgccactggtgacatgccaacttaccagatccgagctcctactgctgctttgccacagggagtggtgatggctgcatcgcccggaagtttgcacagtccccagcagctggcagaagaagcaacacgcaaacgagagctgaggctaatgaaaaacagggaagctgcccgggagtgtcgcaggaagaagaaagaatatgtcaaatgtcttgaaaatcgtgtggctgtgcttgaaaaccaaaacaagactctcattgaggaactcaaggccctcaaagatctttattgccataaagtagagtaactgtctttgacttggaccttgtttactctaatcaaggcaggagatgcagcagtcctacttattgccatgtggacttgtgggaaggacacgtgtgacccttaagaatccagtttggattagtgtttgaaattgaattgggaatgttgttccaggatgtggaatgcagccgtgatcacacttaccgagcttactttgatctgtttgtcaatagcatgcaaaaaatgctttgtttgccctttgcttctgctttttttcagggaagctgccaaagaatgtcgacgtcgaaagaaagaatatgtaaaatgtctggagagccgagttgcagtgctggaagtccagaacaagaagcttatagaggaacttgaaaccttgaaagacatttgttctcccaaaacagattactagaaatatttaactatgaactgaaggcagcatgtatagttgcttttgaaggaatacaatatatagctggcaagaatggtggcttcttttctttgtatcattcatcttcttctttaatcacttaacattcctaaaatgcttcactgtacgtagttaagtcgtagctataacttcaaattttttaaaagagacaaactgtaaaaaatgtgtgtattcttaaaatgcaatatttgtaaggcttgttccaatgccacatacttgcagctcccattctatgtgtcatcaatagtgtcctatgcaataaaattatttgcaggtctttaaatcattttaggaaaggatgatcaaaaataatgcatccagcagtacaataaaagtaaaccacaaaaaaatacctcaggaaagaatagaaagaaagtctatctaatgacatgcctatatgagaagaatagcctagatatgaatatatggcatttgcagatttttatattagttgctttgttaaaaaaaaaaagattgtattgctgtccttgaatgccatagtcaaagagagtttttaatagaaccatgttggttgcactttgtagtgtttggtgctcatttaaatatctgaacatttactacagtttttaactctactgtgtaatataaaagatcttgcagaagttcttagtgttggtttaatattacctaatgaaagtgatgacatattttttatatctggaatgagcctgttgggatcgcattgcataccttcggggtacaagtcagtttctacactgggtgctgatccttgcacgcgccctttctaccatctcacggtggggatggccgcagggctgtgcacccagaagaagatggctgttagcgtttcggccttcataatggcctgagactttctttctgtaggtggtctggagctgtccggctggtggccccctattttgccatttagcgaacaaccacaggaattttaaaaacaaaaacatcccaagattttttcatttcaaaatgcttcaaagtccacattagatcagatactccgctgtcggcacattcagctgaggttcattacaatcgagactgcaatgtgatctatgtttcatcttgtttttataataaaaagcttcagggaacaagcccaaagccctcaccac

SEQ ID NO: 113814 - DNA, 1074 bp, Homo sapiens
  Payload ID: 2233
  Gene Symbol: CREM
  Gene Name: cAMP responsive element modulator
  ENST ID: ENST00000490460
  CDS Start-End: 240-428
gaggacggggcgggaggacgcggttcggtcggctgcagcgctacttttggtccggggtcggcagggaggccgcggctaccgcatcacagctgacgtgaggactacgtggggccgctgccggctccgggttgctgggcggcggcgccgctgctgagcggcggtcgggctcgccgtctccacctcctcgcgtccgtaatcagtgacgaggtccgctacgtaaatccctttgcggcggacaaatgaccatggaaacagttgaatcccagcatgatggaagtataacagcttctttgacagagagcaagtctgctcatgtgcagactcagactggccaaaattcaatccctgctttagctcagctgccactggtgacatgccaacttaccagatccgagctcctactgctgctttgccacagggagtggtgatggctgcatcgcccggaagtttgcacagtccccagcagctggcagaagaagcaacacgcaaacgagagctgaggctaatgaaaaacagggaagctgcccgggagtgtcgcaggaagaagaaagaatatgtcaaatgtcttgaaaatcgtgtggctgtgcttgaaaaccaaaacaagactctcattgaggaactcaaggccctcaaagatctttattgccataaagtagagtaactgtctttgacttggaccttgtttactctaatcaaggcaggagatgcagcagtcctacttattgccatgtggacttgtgggaaggacacgtgtgacccttaagaatccagtttggattagtgtttgaaattgaattgggaatgttgttccaggatgtggaatgcagccgtgatcacacttaccgagcttactttgatctgtttgtcaatagcatgcaaaaaatgctttgtttgccctttgcttctgctttttttcagggaagctgccaaagaatgtcgacgtcgaaagaaagaatatgtaaaatgtctggagagccgagttgcagtgctggaagtccagaacaagaagcttatagaggaacttgaaaccttgaaagacatttgttctcccaaaacagattactagaaatattt

SEQ ID NO: 113815 - DNA, 555 bp, Homo sapiens
  Payload ID: 2233
  Gene Symbol: CREM
  Gene Name: cAMP responsive element modulator
  ENST ID: ENST00000495301
  CDS Start-End: 321-555
attcttagccaccgaagtatgggcaccaaaagcgataaggagcatgtgttccttaataaatgtcacatcagaaaatgactgttccaggacagtaaccacctcccgatgaaaatcttgtattataggtagcagcaattgcagagacagatgaatctgcagaatcagaaggtgtaattgattctcataaacgtagagaaatcctttcacgaagaccctcttataggaaaatactgaatgaactgtcctctgatgtgcctggtgttcccaagattgaagaagagagatcagaggaagaaggaacaccacctagtattgctaccatggcagtaccaactagcatatatcagactagcacggggcaatacattgctatagcccaaggtggaacaatccagatttctaacccaggatctgatggtgttcagggactgcaggcattaacaatgacaaattcaggagctcctccaccaggtgctacaattgtacagtacgcagcacaatcagctgatggcacacagcagttctttgtcccaggcagccaggttgttgttcaag

SEQ ID NO: 113816 - DNA, 660 bp, Homo sapiens
  Payload ID: 2233
  Gene Symbol: CREM
  Gene Name: cAMP responsive element modulator
  ENST ID: ENST00000484283
  CDS Start-End: 1-660
atgtggtggcatcagcataatctatgtttcaggcgtcctatagaagaggattattcttcaggggatgtggaagaaaaggtagcagcaattgcagagacagatgaatctgcagaatcagaaggtgtaattgattctcataaacgtagagaaatcctttcacgaagaccctcttataggaaaatactgaatgaactgtcctctgatgtgcctggtgttcccaagattgaagaagagagatcagaggaagaaggaacaccacctagtattgctaccatggcagtaccaactagcatatatcagactagcacggggcaatacaatgaggaaactgaacttgccccaagtcacatggctgctgccactggtgacatgccaacttaccagatccgagctcctactgctgctttgccacagggagtggtgatggctgcatcgcccggaagtttgcacagtccccagcagctggcagaagaagcaacacgcaaacgagagctgaggctaatgaaaaacagggaagctgccaaagaatgtcgacgtcgaaagaaagaatatgtaaaatgtctggagagccgagttgcagtgctggaagtccagaacaagaagcttatagaggaacttgaaaccttgaaagacatttgttctcccaaaacagattactag

SEQ ID NO: 113817 - DNA, 469 bp, Homo sapiens
  Payload ID: 2233
  Gene Symbol: CREM
  Gene Name: cAMP responsive element modulator
  Uniprot ID: Q03060
  ENST ID: ENST00000490511
  CDS Start-End: 55-396
cttttgaagtggttgtctgcttgaagagggaaacacgtcatgaaactgtaatgcatgaacagaactcaggagttgtctggccagcttagtgctgccactggtgacatgccaacttaccagatccgagctcctactgctgctttgccacagggagtggtgatggctgcatcgcccggaagtttgcacagtccccagcagctggcagaagaagcaacacgcaaacgagagctgaggctaatgaaaaacagggaagctgccaaagaatgtcgacgtcgaaagaaagaatatgtaaaatgtctggagagccgagttgcagtgctggaagtccagaacaagaagcttatagaggaacttgaaaccttgaaagacatttgttctcccaaaacagattactagaaatatttaactatgaactgaaggcagcatgtatagttgcttttgaaggaatacaatatatagctggcaagaa

SEQ ID NO: 113818 - DNA, 563 bp, Homo sapiens
  Payload ID: 2233
  Gene Symbol: CREM
  Gene Name: cAMP responsive element modulator
  ENST ID: ENST00000494479
  CDS Start-End: 217-563
gtgcttggaacattcttagccaccgaagtatgggcaccaaaagcgataaggagcatgtgttccttaataaatgtcacatcagaaaatgactgttccaggacagtaaccacctcccgatggaaaatactgaatgaactgtcctctgatgtgcctggtgttcccaagattgaagaagagagatcagaggaagaaggaacaccacctagtattgctaccatggcagtaccaactagcatatatcagactagcacggggcaatacattgctatagcccaaggtggaacaatccagatttctaacccaggatctgatggtgttcagggactgcaggcattaacaatgacaaattcaggagctcctccaccaggtgctacaattgtacagtacgcagcacaatcagctgatggcacacagcagttctttgtcccaggcagccaggttgttgttcaagctgccactggtgacatgccaacttaccagatccgagctcctactgctgctttgccacagggagtggtgatggctgcatcgcccggaagtttgcacagtccccagcagctggc

SEQ ID NO: 113819 - DNA, 1049 bp, Homo sapiens
  Payload ID: 2233
  Gene Symbol: CREM
  Gene Name: cAMP responsive element modulator
  Uniprot ID: Q03060
  ENST ID: ENST00000488328
  CDS Start-End: 58-387
actttatgttgaactgtggtagaggaaacaagacagttctgtctgcagaagcccattatggctgtaactggagatgacacagctgccactggtgacatgccaacttaccagatccgagctcctactgctgctttgccacagggagtggtgatggctgcatcgcccggaagtttgcacagtccccagcagctggcagaagaagcaacacgcaaacgagagctgaggctaatgaaaaacagggaagctgccaaagaatgtcgacgtcgaaagaaagaatatgtaaaatgtctggagagccgagttgcagtgctggaagtccagaacaagaagcttatagaggaacttgaaaccttgaaagacatttgttctcccaaaacagattactagaaatatttaactatgaactgaaggcagcatgtatagttgcttttgaaggaatacaatatatagctggcaagaatggtggcttcttttctttgtatcattcatcttcttctttaatcacttaacattcctaaaatgcttcactgtacgtagttaagtcgtagctataacttcaaattttttaaaagagacaaactgtaaaaaatgtgtgtattcttaaaatgcaatatttgtaaggcttgttccaatgccacatacttgcagctcccattctatgtgtcatcaatagtgtcctatgcaataaaattatttgcaggtctttaaatcattttaggaaaggatgatcaaaaataatgcatccagcagtacaataaaagtaaaccacaaaaaaatacctcaggaaagaatagaaagaaagtctatctaatgacatgcctatatgagaagaatagcctagatatgaatatatggcatttgcagatttttatattagttgctttgttaaaaaaaaaaagattgtattgctgtccttgaatgccatagtcaaagagagtttttaatagaaccatgttggttgcactttgtagtgtttggtgctcatttaaatatctgaacatttactacagtttttaactctactgtgtaatataaaagatcttgcagaa

SEQ ID NO: 113820 - DNA, 626 bp, Homo sapiens
  Payload ID: 2233
  Gene Symbol: CREM
  Gene Name: cAMP responsive element modulator
  Uniprot ID: Q03060
  ENST ID: ENST00000474931
  CDS Start-End: 162-500
gtaaaatgctgctgacagatttagagttaactagctcaccactgcctctgcctccaagctgccttttagactgaatagcttttcttgttagccctactttaacatttcttttgaagtggttgtctgcttgaagagggaaacacgtcatgaaactgtaatgcatgaacagaactcaggagttgtctggccagcttagtgctgccactggtgacatgccaacttaccagatccgagctcctactgctgctttgccacagggagtggtgatggctgcatcgcccggaagtttgcacagtccccagcagctggcagaagaagcaacacgcaaacgagagctgaggctaatgaaaaacagggaagctgcccgggagtgtcgcaggaagaagaaagaatatgtcaaatgtcttgaaaatcgtgtggctgtgcttgaaaaccaaaacaagactctcattgaggaactcaaggccctcaaagatctttattgccataaagtagagtaactgtctttgacttggaccttgtttactctaatcaaggcaggagatgcagcagtcctacttattgccatgtggacttgtgggaaggacacgtgtgacccttaagaatccagtttggattagtgtttg

SEQ ID NO: 113821 - DNA, 429 bp, Homo sapiens
  Payload ID: 2233
  Gene Symbol: CREM
  Gene Name: cAMP responsive element modulator
  Uniprot ID: Q03060
  ENST ID: ENST00000487763
  CDS Start-End: 64-429
tggaacactttatgttgaactgtggtagaggaaacaagacagttctgtctgcagaagcccattatggctgtaactggagatgacacagatgaggaaactgaacttgccccaagtcacatggctgctgccactggtgacatgccaacttaccagatccgagctcctactgctgctttgccacagggagtggtgatggctgcatcgcccggaagtttgcacagtccccagcagctggcagaagaagcaacacgcaaacgagagctgaggctaatgaaaaacagggaagctgccaaagaatgtcgacgtcgaaagaaagaatatgtaaaatgtctggagagccgagttgcagtgctggaagtccagaacaagaagcttatagaggaacttgaaaccttgaaagacatttgttctcccaaaacagattactag

SEQ ID NO: 113822 - DNA, 964 bp, Homo sapiens
  Payload ID: 2233
  Gene Symbol: CREM
  Gene Name: cAMP responsive element modulator
  Uniprot ID: Q03060
  ENST ID: ENST00000463314
  CDS Start-End: 191-607
ggaacattcttagccaccgaagtatgggcaccaaaagcgataaggagcatgtgttccttaataaatgtcacatcagaaaatgactgttccaggacagtaaccacctcccgatgttgctatagcccaaggtggaacaatccagatttctaacccaggatctgatggtgttcagggactgcaggcattaacaatgacaaattcaggagctcctccaccaggtgctacaattgtacagtacgcagcacaatcagctgatggcacacagcagttctttgtcccaggcagccaggttgttgttcaagctgccactggtgacatgccaacttaccagatccgagctcctactgctgctttgccacagggagtggtgatggctgcatcgcccggaagtttgcacagtccccagcagctggcagaagaagcaacacgcaaacgagagctgaggctaatgaaaaacagggaagctgccaaagaatgtcgacgtcgaaagaaagaatatgtaaaatgtctggagagccgagttgcagtgctggaagtccagaacaagaagcttatagaggaacttgaaaccttgaaagacatttgttctcccaaaacagattactagaaatatttaactatgaactgaaggcagcatgtatagttgcttttgaaggaatacaatatatagctggcaagaatggtggcttcttttctttgtatcattcatcttcttctttaatcacttaacattcctaaaatgcttcactgtacgtagttaagtcgtagctataacttcaaattttttaaaagagacaaactgtaaaaaatgtgtgtattcttaaaatgcaatatttgtaaggcttgttccaatgccacatacttgcagctcccattctatgtgtcatcaatagtgtcctatgcaataaaattatttgcaggtctttaaatcattttaggaaaggatgatcaaaaataatgcatc

SEQ ID NO: 113823 - DNA, 453 bp, Homo sapiens
  Payload ID: 2233
  Gene Symbol: CREM
  Gene Name: cAMP responsive element modulator
  ENST ID: ENST00000464475
  CDS Start-End: 1-160
tgatggaagtataacagcttctttgacagagagcaagtctgctcatgtgcagactcagactggccaaaattcaatccctgctttagctcagctgccactggtgacatgccaacttaccagatccgagctcctactgctgctttgccacagggagtggtgatggctgcatcgcccggaagtttgcacagtccccagcagctggcagaagaagcaacacgcaaacgagagctgaggctaatgaaaaacagggaagctgccaaagaatgtcgacgtcgaaagaaagaatatgtaaaatgtctggagagccgagttgcagtgctggaagtccagaacaagaagcttatagaggaacttgaaaccttgaaagacatttgttctcccaaaacagattactagaaatatttaactatgaactgaaggcagcatgtatagttgcttttgaaggaatacaat

SEQ ID NO: 113824 - DNA, 655 bp, Homo sapiens
  Payload ID: 2233
  Gene Symbol: CREM
  Gene Name: cAMP responsive element modulator
  ENST ID: ENST00000487132
  CDS Start-End: 96-655
gcgaacttgggacgagttggaaaatcctccctgagagagccgtgcggctcaggggagcggtttaactcggaaaaggaaaaggaatccagaaacaaatgaccatggaaacagttgaatcccagcatgatggaagtataacagcttctttgacagagagcaagtctgctcatgtgcagactcagactggccaaaattcaatccctgctttagctcaggtagcagcaattgcagagacagatgaatctgcagaatcagaaggtgtaattgattctcataaacgtagagaaatcctttcacgaagaccctcttataggaaaatactgaatgaactgtcctctgatgtgcctggtgttcccaagattgaagaagagagatcagaggaagaaggaacaccacctagtattgctaccatggcagtaccaactagcatatatcagactagcacggggcaatacactgccactggtgacatgccaacttaccagatccgagctcctactgctgctttgccacagggagtggtgatggctgcatcgcccggaagtttgcacagtccccagcagctggcagaagaagcaacacgcaaacgagagctgaggctaatgaaaaacagggaagctgccaaagaatgtcgacgtcgaaagaaagaatatgt

SEQ ID NO: 113825 - DNA, 1030 bp, Homo sapiens
  Payload ID: 2233
  Gene Symbol: CREM
  Gene Name: cAMP responsive element modulator
  ENST ID: ENST00000474362
  CDS Start-End: 418-708
ctaggccccgccccctgacccgcaccttcccgccgcccctccccggttccatttcattgttggattgtggcgcttcactcctgctggcggccggcagggggcggagttcgagcctggatttttttcctcggggcctcccccgggaggccgtcccggcgtgggggaggggaggacggggcgggaggacgcggttcggtcggctgcagcgctacttttggtccggggtcggcagggaggccgcggctaccgcatcacagctgacgtgaggactacgtggggccgctgccggctccgggttgctgggcggcggcgccgctgctgagcggcggtcgggctcgccgtctccacctcctcgcgtccgtaatcagtgacgaggtccgctacgtaaatccctttgcggcggctgccactggtgacatgccaacttaccagatccgagctcctactgctgctttgccacagggagtggtgatggctgcatcgcccggaagtttgcacagtccccagcagctggcagaagaagcaacacgcaaacgagagctgaggctaatgaaaaacagggaagctgccaaagaatgtcgacgtcgaaagaaagaatatgtaaaatgtctggagagccgagttgcagtgctggaagtccagaacaagaagcttatagaggaacttgaaaccttgaaagacatttgttctcccaaaacagattactagaaatatttaactatgaactgaaggcagcatgtatagttgcttttgaaggaatacaatatatagctggcaagaatggtggcttcttttctttgtatcattcatcttcttctttaatcacttaacattcctaaaatgcttcactgtacgtagttaagtcgtagctataacttcaaattttttaaaagagacaaactgtaaaaaatgtgtgtattcttaaaatgcaatatttgtaaggcttgttccaatgccacatacttgcagctcccattctatgtgtcatcaatagtgtcctatgcaataaaattatttgcaggtctttaaa

SEQ ID NO: 113826 - DNA, 651 bp, Homo sapiens
  Payload ID: 2233
  Gene Symbol: CREM
  Gene Name: cAMP responsive element modulator
  Uniprot ID: Q03060
  ENST ID: ENST00000488741
  CDS Start-End: 308-616
gagtcatgttgtgatttagtcagttcctttccgctttgtaaaatgctgctgacagatttagagttaactagctcaccactgcctctgcctccaagctgccttttagactgaatagcttttcttgttagccctactttaacatttcttttgaagtggttgtctgcttgaagagggaaacacgtcatgaaactgtaatgcatgaacagaactcaggagttgtctggccagcttagtggtaagatcgagcctcctactgaggccgtccctgcatgcgcctgatgaggaaactgaacttgccccaagtcacatggctgctgccactggtgacatgccaacttaccagatccgagctcctactgctgctttgccacagggagtggtgatggctgcatcgcccggaagtttgcacagtccccagcagctggcagaagaagcaacacgcaaacgagagctgaggctaatgaaaaacagggaagctgcccgggagtgtcgcaggaagaagaaagaatatgtcaaatgtcttgaaaatcgtgtggctgtgcttgaaaaccaaaacaagactctcattgaggaactcaaggccctcaaagatctttattgccataaagtagagtaactgtctttgacttggaccttgtttactctaatcaa

SEQ ID NO: 113827 - DNA, 582 bp, Homo sapiens
  Payload ID: 2233
  Gene Symbol: CREM
  Gene Name: cAMP responsive element modulator
  ENST ID: ENST00000463960
  CDS Start-End: 1-582
gtagcagcaattgcagagacagatgaatctgcagaatcagaaggtgtaattgattctcataaacgtagagaaatcctttcacgaagaccctcttataggaaaatactgaatgaactgtcctctgatgtgcctggtgttcccaagattgaagaagagagatcagaggaagaaggaacaccacctagtattgctaccatggcagtaccaactagcatatatcagactagcacggggcaatacaatgaggaaactgaacttgccccaagtcacatggctgctgccactggtgacatgccaacttaccagatccgagctcctactgctgctttgccacagggagtggtgatggctgcatcgcccggaagtttgcacagtccccagcagctggcagaagaagcaacacgcaaacgagagctgaggctaatgaaaaacagggaagctgccaaagaatgtcgacgtcgaaagaaagaatatgtaaaatgtctggagagccgagttgcagtgctggaagtccagaacaagaagcttatagaggaacttgaaaccttgaaagacatttgttctcccaaaacagattactag

SEQ ID NO: 113828 - DNA, 582 bp, Homo sapiens
  Payload ID: 2233
  Gene Symbol: CREM
  Gene Name: cAMP responsive element modulator
  Uniprot ID: Q03060
  ENST ID: ENST00000468236
  CDS Start-End: 155-532
gctgctgacagatttagagttaactagctcaccactgcctctgcctccaagctgccttttagactgaatagcttttcttgttagccctactttaacatttcttttgaagtggttgtctgcttgaagagggaaacacgtcatgaaactgtaatgcatgaacagaactcaggagttgtctggccagcttagtgatgaggaaactgaacttgccccaagtcacatggctgctgccactggtgacatgccaacttaccagatccgagctcctactgctgctttgccacagggagtggtgatggctgcatcgcccggaagtttgcacagtccccagcagctggcagaagaagcaacacgcaaacgagagctgaggctaatgaaaaacagggaagctgccaaagaatgtcgacgtcgaaagaaagaatatgtaaaatgtctggagagccgagttgcagtgctggaagtccagaacaagaagcttatagaggaacttgaaaccttgaaagacatttgttctcccaaaacagattactagaaatatttaactatgaactgaaggcagcatgtatagttgcttttgaagga

SEQ ID NO: 113829 - DNA, 731 bp, Homo sapiens
  Payload ID: 2233
  Gene Symbol: CREM
  Gene Name: cAMP responsive element modulator
  Uniprot ID: Q03060
  ENST ID: ENST00000489321
  CDS Start-End: 149-562
cgccccacgcccgcttcgtgcgctcagctgccccgggacccgcctgcctcctcgcgaacttgggacgagttggaaaatcctccctgagagagccgtgcggctcaggggagcggtttaactcggaaaaggaaaaggaatccagaaacaaatgaccatggaaacagttgaatcccagcatgatggaagtataacagcttctttgacagagagcaagtctgctcatgtgcagactcagactggccaaaattcaatccctgctttagctcaggtagcagcaattgcagagacagatgaatctgcagaatcagaaggtgtaattgattctcataaacgtagagaaatcctttcacgaagaccctcttataggaaaatactgaatgaactgtcctctgatgtgcctggtgttcccaagattgaagaagagagatcagaggaagaaggaacaccacctagtattgctaccatggcagtaccaactagcatatatcagactagcacggggcaatacagtatgtatgctgcaattcgatatgatacagtgctagctttaagtcttctctagttatattgaagcaactcaggttttggcattaaattgttccattttaaaatgcatcattaatacctaaactgtatcatagaatgaaagtatatgttaaaaagtgagatctttgtattgacagctgtcatataattttgaaaagtaaaaattttgactgccgaatatagaa

SEQ ID NO: 113830 - DNA, 1416 bp, Homo sapiens
  Payload ID: 2233
  Gene Symbol: CREM
  Gene Name: cAMP responsive element modulator
  ENST ID: ENST00000460270
  CDS Start-End: 92-379
cggtcgggctcgccgtctccacctcctcgcgtccgtaatcagtgacgaggtccgctacgtaaatccctttgcggcggctgccactggtgacatgccaacttaccagatccgagctcctactgctgctttgccacagggagtggtgatggctgcatcgcccggaagtttgcacagtccccagcagctggcagaagaagcaacacgcaaacgagagctgaggctaatgaaaaacagggaagctgcccgggagtgtcgcaggaagaagaaagaatatgtcaaatgtcttgaaaatcgtgtggctgtgcttgaaaaccaaaacaagactctcattgaggaactcaaggccctcaaagatctttattgccataaagtagagtaactgtctttgacttggaccttgtttactctaatcaaggcaggagatgcagcagtcctacttattgccatgtggacttgtgggaaggacacgtgtgacccttaagaatccagtttggattagtgtttgaaattgaattgggaatgttgttccaggatgtggaatgcagccgtgatcacacttaccgagcttactttgatctgtttgtcaatagcatgcaaaaaatgctttgtttgccctttgcttctgctttttttcagggaagctgccaaagaatgtcgacgtcgaaagaaagaatatgtaaaatgtctggagagccgagttgcagtgctggaagtccagaacaagaagcttatagaggaacttgaaaccttgaaagacatttgttctcccaaaacagattactagaaatatttaactatgaactgaaggcagcatgtatagttgcttttgaaggaatacaatatatagctggcaagaatggtggcttcttttctttgtatcattcatcttcttctttaatcacttaacattcctaaaatgcttcactgtacgtagttaagtcgtagctataacttcaaattttttaaaagagacaaactgtaaaaaatgtgtgtattcttaaaatgcaatatttgtaaggcttgttccaatgccacatacttgcagctcccattctatgtgtcatcaatagtgtcctatgcaataaaattatttgcaggtctttaaatcattttaggaaaggatgatcaaaaataatgcatccagcagtacaataaaagtaaaccacaaaaaaatacctcaggaaagaatagaaagaaagtctatctaatgacatgcctatatgagaagaatagcctagatatgaatatatggcatttgcagatttttatattagttgctttgttaaaaaaaaaaagattgtattgctgtccttgaatgccatagtcaaagagagtttttaatagaaccatgttggttgcactttgtagtgtttggtgctcatttaaatatctgaacatttactacagtttttaact

SEQ ID NO: 113831 - DNA, 895 bp, Homo sapiens
  Payload ID: 2233
  Gene Symbol: CREM
  Gene Name: cAMP responsive element modulator
  ENST ID: ENST00000495960
  CDS Start-End: 136-276
cgtggggccgctgccggctccgggttgctgggcggcggcgccgctgctgagcggcggtcgggctcgccgtctccacctcctcgcgtccgtaatcagtgacgaggtccgctacgtaaatccctttgcggcggacaaatgaccatggaaacagttgaatcccagcatgatggaagtataacagcttctttgacagagagcaagtctgctcatgtgcagactcagactggccaaaattcaatccctgctttagctcagaaaatcttgtattataggtagcagcaattgcagagacagatgaatctgcagaatcagaaggtgtaattgattctcataaacgtagagaaatcctttcacgaagaccctcttataggaaaatactgaatgaactgtcctctgatgtgcctggtgttcccaagattgaagaagagagatcagaggaagaaggaacaccacctagtattgctaccatggcagtaccaactagcatatatcagactagcacggggcaatacattgctatagcccaaggtggaacaatccagatttctaacccaggatctgatggtgttcagggactgcaggcattaacaatgacaaattcaggagctcctccaccaggtgctacaattgtacagtacgcagcacaatcagctgatggcacacagcagttctttgtcccaggcagccaggttgttgttcaagctgccactggtgacatgccaacttaccagatccgagctcctactgctgctttgccacagggagtggtgatggctgcatcgcccggaagtttgcacagtccccagcagctggcagaagaagcaacacgcaaacgagagctgaggctaatgaaaaacagggaagctgccaaagaatgtcgacgtcgaaagaaaga

SEQ ID NO: 113832 - DNA, 939 bp, Homo sapiens
  Payload ID: 2233
  Gene Symbol: CREM
  Gene Name: cAMP responsive element modulator
  Uniprot ID: Q03060
  ENST ID: ENST00000479070
  CDS Start-End: 1-939
atgagcaaatgtgcaaggaaaaaatatattaagacaaatccaagacaaatgaccatggaaacagttgaatcccagcatgatggaagtataacagcttctttgacagagagcaagtctgctcatgtgcagactcagactggccaaaattcaatccctgctttagctcaggtagcagcaattgcagagacagatgaatctgcagaatcagaaggtgtaattgattctcataaacgtagagaaatcctttcacgaagaccctcttataggaaaatactgaatgaactgtcctctgatgtgcctggtgttcccaagattgaagaagagagatcagaggaagaaggaacaccacctagtattgctaccatggcagtaccaactagcatatatcagactagcacggggcaatacattgctatagcccaaggtggaacaatccagatttctaacccaggatctgatggtgttcagggactgcaggcattaacaatgacaaattcaggagctcctccaccaggtgctacaattgtacagtacgcagcacaatcagctgatggcacacagcagttctttgtcccaggcagccaggttgttgttcaagatgaggaaactgaacttgccccaagtcacatggctgctgccactggtgacatgccaacttaccagatccgagctcctactgctgctttgccacagggagtggtgatggctgcatcgcccggaagtttgcacagtccccagcagctggcagaagaagcaacacgcaaacgagagctgaggctaatgaaaaacagggaagctgccaaagaatgtcgacgtcgaaagaaagaatatgtaaaatgtctggagagccgagttgcagtgctggaagtccagaacaagaagcttatagaggaacttgaaaccttgaaagacatttgttctcccaaaacagattactag

SEQ ID NO: 113833 - DNA, 1182 bp, Homo sapiens
  Payload ID: 2233
  Gene Symbol: CREM
  Gene Name: cAMP responsive element modulator
  Uniprot ID: Q03060
  ENST ID: ENST00000473940
  CDS Start-End: 64-426
tggaacactttatgttgaactgtggtagaggaaacaagacagttctgtctgcagaagcccattatggctgtaactggagatgacacagatgaggaaactgaacttgccccaagtcacatggctgctgccactggtgacatgccaacttaccagatccgagctcctactgctgctttgccacagggagtggtgatggctgcatcgcccggaagtttgcacagtccccagcagctggcagaagaagcaacacgcaaacgagagctgaggctaatgaaaaacagggaagctgcccgggagtgtcgcaggaagaagaaagaatatgtcaaatgtcttgaaaatcgtgtggctgtgcttgaaaaccaaaacaagactctcattgaggaactcaaggccctcaaagatctttattgccataaagtagagtaactgtctttgacttggaccttgtttactctaatcaaggcaggagatgcagcagtcctacttattgccatgtggacttgtgggaaggacacgtgtgacccttaagaatccagtttggattagtgtttgaaattgaattgggaatgttgttccaggatgtggaatgcagccgtgatcacacttaccgagcttactttgatctgtttgtcaatagcatgcaaaaaatgctttgtttgccctttgcttctgctttttttcagggaagctgccaaagaatgtcgacgtcgaaagaaagaatatgtaaaatgtctggagagccgagttgcagtgctggaagtccagaacaagaagcttatagaggaacttgaaaccttgaaagacatttgttctcccaaaacagattactagaaatatttaactatgaactgaaggcagcatgtatagttgcttttgaaggaatacaatatatagctggcaagaatggtggcttcttttctttgtatcattcatcttcttctttaatcacttaacattcctaaaatgcttcactgtacgtagttaagtcgtagctataacttcaaattttttaaaagagacaaactgtaaaaaatgtgtgtattcttaaaatgcaatatttgtaaggcttgttccaatgccacatacttgcagctcccattctatgtgtcatcaatagtgtcctatgcaataaaattatttgcaggtctttaaatcattttaggaaaggatgatcaaaaataa

SEQ ID NO: 113834 - DNA, 721 bp, Homo sapiens
  Payload ID: 2233
  Gene Symbol: CREM
  Gene Name: cAMP responsive element modulator
  ENST ID: ENST00000469949
  CDS Start-End: 97-276
gccgctgctgagcggcggtcgggctcgccgtctccacctcctcgcgtccgtaatcagtgacgaggtccgctacgtaaatccctttgcggcggacaaatgaccatggaaacagttgaatcccagcatgatggaagtataacagcttctttgacagagagcaagtctgctcatgtgcagactcagactggccaaaattcaatccctgctttagctcagtgcacaatgtgtaaggagtccctcggaataaagcagccctggcatgccatcggggattgaagtaggaacgatttaacaagggatacttggaaatgttgtcatgtgcgagttgtaaattttcttttttaatctggtggaaaattggaatggcatttctctgttttgcccagctatgccaaaaatcttcttggtcccacataggcctaggaaggatgtagatggcaatcacaaaacaaacaaaaaatgagcaaacaaatagaagacctcaagcaacattttctcttgttaataggttagcaacctcatatttgtatattaaagagatctgcattatgttaggttgatttcatataatttcagctaagtagatctagtttaaggtcagtgttttattgaatcttgtattttagcttcagtatattaatttccttagctgagggactcctactgaaggagaaaagtgttcctgttaaaattttgaaataaaagtttctgttttactgta

SEQ ID NO: 113835 - DNA, 5301 bp, Homo sapiens
  Payload ID: 2234
  Gene Symbol: ARPP19
  Gene Name: cAMP-regulated phosphoprotein, 19kDa
  Uniprot ID: P56211
  ENST ID: ENST00000249822
  CDS Start-End: 273-611
ggaaaaaaggaagtgtttggacgacagcgagcgggagaagcggggtcaagtaggtaggggtgcggtgcgggaggggcaggcgggctccggcgtgcgagggccttggccagcggagcgtttcgcggctccgtgtcgtcataaggcggcggccattttcgcgggcggaggcggcccggcgggccctgggagagctgggacgggcggcggccgggtggcctcggccacccgctaattgcatcttttcccggcgtctcgtctgcagagggagcactatgtctgcggaagtccccgaggcagcctccgcggaggagcagaaggaaatggaagataaagtgactagtccagagaaagcagaagaagcaaaattaaaagcaagatatcctcatctgggacaaaagcctggaggttcagatttcttaaggaaacggttgcagaaagggcaaaaatattttgattctggggattacaacatggctaaagcaaaaatgaagaacaagcaacttcctactgcagctccggataagacggaggtcactggtgaccacattcccactccgcaagaccttcctcaacggaagccgtcccttgttgctagcaagctggctggctgattaagaggctgaactgcatgaatctgctaaatctcattatttctccttaatatgttacttatctactttttatttcctttcattcactagtcatttgagactgacagctttgcaggtagcagtagtgtgtgctgctattgtggaatatacgtgtgtagagtttttgattagtttaacagtgcactggtgaagaggacatgttagagcaacataagtaaactacttgaaaatagttgtatatattacctaacttctagtgtagtactggttctaacaagtaacaagcaagttttaaaattttaatgttttggctttcattacttcatcttaattatagctttgtatgttactcttatttaatataatctctattgtattgatttcttctgtatttaccttttggattttgtaaaacagaagtttaagaccacaagttagaagaaaggtcacatatttcaaacacaactagatggggctctgaaagatttgtatctctgtgcttgaacttgaatggccttaaacctgtttcagctttaacagtagaattttacttgggcaatatttgcccattctggtgtaacttatgtgactctagtgcttaacagctgccgttgaagctaatattcagttctgtagagttagaataccttttgttgttgaagatgtgaatgaagtatgcatgtgcattaactgttgaattcacttttgtgccatttttgtaaatacagtagttttgcacaacctctcacaaatgtctgtattaatttcacatacttaaaaagtagataatgtgccaaccagaagcacaagagttcctacacaaaactctgtaaatcattatagcttttgtataataagagtagtttacaatctcgggcttatagaataccaaactgaaatcttagttcaatctgccatagacttaagcttttcatttgttactaatatccatgacattcagtggccttgtgcaaatacgatatgttgcttaggcatatcttttgtcctatgcagaacctttcattttgatttttatgaaagttgcaattcatgtaatttatataaactttttaaatgtagaaactttttacttccacactcagttttggagaccctagaataaaaggcttcaatactctgcattccatgccctctgccacctgcttttttttcccctttgttctttgactcaaatggtattgagctgtttgttgtatatggaagcataggtgtctatatccttactcttttatataacacaataatggcgttttccttctaatttctcagttgttaacttctttctcttttttttttaggatagggccttgctctgtcacctgagctctagtgcagtagtgcaatcacagctcactgcaaccttactcctaggctcaagttaactattcttgatcctttattattactaatattctacaattgtttaaataaaaggaactttataatgaaacggttcggaatactggctcaagaacctatgtcaagatgagctgaattttggtaaattattttaggaattatgacaagctaattgaattaggcttgtgacaattagagtaatttacatgacaggtaaaactcctattaaaaatgtttagatgtttgcttctgtagatgtcactttagtaaaataccaatttagttttacttgtggcttatctagttagaacttagcagactttactgggacaagtttactgctcttgtaggagctcctctcacaagtagttgtaatgctgtagcatgatactcaggatcagtagcttgagatgctactatttttctcttcatctttgacttgcagagagcctcccgtttttggatccaggcatcttttctgaatcctggttccatcagtatacctgctctcctatgaccccaaatcatagtcaatggtgcctcaaacatagcaccttaagttaaaggctgcctagtgctctgaggaaagcttgctgattatcttcctgatctactcaccccaaaaggcagaaaagcaacacagtcactgctgtggtcatttgtaatgtaaagatcagttatatatatatatttgtaatgagagcaagtatatactcattatagaatcaatttaagaagtttaaaataacccagagtagaatttctatatctagtcttggtttttttcatgaatatttgcaagtaattaccattaaattcacacatgaaagattaatctgaaagatcagagaccatgttattcctgaccacgatagaactgctcctgtggtttgggacaagtaataaaacaactgcttgagttttgtttgtaaaatacataattaatatttgacctacctcaaaatgtattgaggatctgtgaaatgctaagtgcccaaaataaaatattgctgattgtctttttattaaaagtaaatttcctcattaagccaacctgccttctgtaagtcacagtgcttaaatctcaggatttttcattaggagagacctgtcgttaaggatttgtaggtataattgcttagcctccattattggtgcttgggatagagaggttttagatttttgttttttttttgttctgcctcaaagctcagtttattgaagacatttgtaagctattggatcatcacttgaatcaagattttgactagtgagcttaattgtccatttcttacaatttcaaagttacagtctcagaaatggttaattttaataactgtcctatcataaattaatgttggaataaattgaagttgttgataaatacttcatgaaaactaaagtctgaaataaattacttgttttatgtccaatagctactacatttgatagaacagttttgaggaacatttcattcttgaacgcagcatctgacatggttctcagcaagttggaatagtaaggattattggcttgtttcgatgagtggaagcggcatgtttgtagcatacaagttattcaataatcttgtgctgatgacctaaaaatatgtcttaactattcatcaaggaaagcctggtgaagcctttacttgttactacttcaacagttggaattagttgctctttttacttgatgaaacaaaactatacctctgaatatttatggatactttttactaaatcaggcttgtgttcttaatccaaattagtaaagttttatggaagctgaaatgtaatacagtagtctccccttatctgtaagagatacattccaagacccctagtggatgcctgaaacctcagatagtactgaaccctttatcaactatgttttttcagtctgacaaccaaggcggctactaagtgactaaggggcaggtagtatacagtgtggataagcaggacaaaggggtgattcacatcccaggcaggacagagcaggagatcatgagatttcatcactcaggatggcttgtgatttattttattttattcttttttttttttgagatggagtctcactcttgcccaggctggagtgcagtggtgcgatcttggctcactgcaacctctgcctcctgggttcaagcagttctcctgcctcagcctcccaagtagctgggattacaggcgtccgccaccatgcccagccaatttttgtacttttagtagagatggggtttcaccatgttggccaggctggtctcgaactcctgacctcaggtgatccactcgcctcggcctcccaaagtgctgggattataggcatgtgccaccatgcccggccggcttatgatttaaaacatgaattgtttatttctggaattttccacataatatttttggaccaaggttgcctcaggtaacaaactacagaaagtgaaattgcagataaaggggattactgctcctctgctctaaaattggtgtttgggtgatcagaagcaggtagccaatgggaagagcacttctgagtgataactaaagcagtttggtggccttttcacattctccaatgttcaaacatattttccactttccattttctctttcacctcattttgcctctctatcccccatccctgcttatttcttaagcccattgatggcactcattaaattgtatttagggctaatgagtcattgttccttaatatcgttttcaatatgccacaatttaggacacatttaaaattttctaaaacaatatcctaatcaatattgactaatttgagccacattcccaactctaactcagcacacactgccagtcttccccaatatctgtctcctctcaattccccaccacaccttataaaattgtaatcaaagatatctcactctgtcattgttaatctaagaataaaaacactgactttaatacggttttactaagtttcaaccttctaattaggtaggcctctaggtattctgcagatcactgctggtcttgatagccattaatatatgtttgtattatgttatttttcaactaaatcgcagttggaaaaaaacatatttaatattatgcccttggatctgttactgcatcactagcacttgtgatgcaatagaacacttcgcctgtactgaaagggccaagagtaaatgccttgttttgtttttttgttttgttttgttttgctttttgttaaaacatgtctatagagttggcagttaatgctgaatttgtcaaataccccttccaaaattatacttgtatttaaaaaataaatggatctacctaa

SEQ ID NO: 113836 - DNA, 3245 bp, Homo sapiens
  Payload ID: 2234
  Gene Symbol: ARPP19
  Gene Name: cAMP-regulated phosphoprotein, 19kDa
  Uniprot ID: P56211
  ENST ID: ENST00000561650
  CDS Start-End: 548-838
gtgagccctgggccctgcccaaggccgggtctggcgggcggcctgctcccgccaggcggagggccgcgcccgagatgcggggccgaggcgcatgaggccgaggctcctgcgccccacctttggcttcccgccgtcgctggctggtgcgccgacgaattgggagttccaacgtgccccgcgtttactccgaatcgtgccttttgtaacacctccgtgggtcgcggtgttcctcagtcacttatatttacgcgagagcccaggacgcaggctttgggcgtagagcctaagtttttctgtaagcctcaatttggttaggaagttttattttttcctttgaagaactctccaactacttgtattgtgagcgtgcggttcactccaaaagcagtgcctcgtgtgcgggccgcgatgtgggccaggattggcatttcagggccaacccttgtaaccatggtcagtgagtaaagtccggccttcagtgtcttcacctgtaaaggccgaatactggtgcttgcctcccacggcggggtgaggcctagaggaggaaatggaagataaagtgactagtccagagaaagcagaagaagcaaaattaaaagcaagatatcctcatctgggacaaaagcctggaggttcagatttcttaaggaaacggttgcagaaagggcaaaaatattttgattctggggattacaacatggctaaagcaaaaatgaagaacaagcaacttcctactgcagctccggataagacggaggtcactggtgaccacattcccactccgcaagaccttcctcaacggaagccgtcccttgttgctagcaagctggctggctgattaagaggctgaactgcatgaatctgctaaatctcattatttctccttaatatgttacttatctactttttatttcctttcattcactagtcatttgagactgacagctttgcaggtagcagtagtgtgtgctgctattgtggaatatacgtgtgtagagtttttgattagtttaacagtgcactggtgaagaggacatgttagagcaacataagtaaactacttgaaaatagttgtatatattacctaacttctagtgtagtactggttctaacaagtaacaagcaagttttaaaattttaatgttttggctttcattacttcatcttaattatagctttgtatgttactcttatttaatataatctctattgtattgatttcttctgtatttaccttttggattttgtaaaacagaagtttaagaccacaagttagaagaaaggtcacatatttcaaacacaactagatggggctctgaaagatttgtatctctgtgcttgaacttgaatggccttaaacctgtttcagctttaacagtagaattttacttgggcaatatttgcccattctggtgtaacttatgtgactctagtgcttaacagctgccgttgaagctaatattcagttctgtagagttagaataccttttgttgttgaagatgtgaatgaagtatgcatgtgcattaactgttgaattcacttttgtgccatttttgtaaatacagtagttttgcacaacctctcacaaatgtctgtattaatttcacatacttaaaaagtagataatgtgccaaccagaagcacaagagttcctacacaaaactctgtaaatcattatagcttttgtataataagagtagtttacaatctcgggcttatagaataccaaactgaaatcttagttcaatctgccatagacttaagcttttcatttgttactaatatccatgacattcagtggccttgtgcaaatacgatatgttgcttaggcatatcttttgtcctatgcagaacctttcattttgatttttatgaaagttgcaattcatgtaatttatataaactttttaaatgtagaaactttttacttccacactcagttttggagaccctagaataaaaggcttcaatactctgcattccatgccctctgccacctgcttttttttcccctttgttctttgactcaaatggtattgagctgtttgttgtatatggaagcataggtgtctatatccttactcttttatataacacaataatggcgttttccttctaatttctcagttgttaacttctttctcttttttttttaggatagggccttgctctgtcacctgagctctagtgcagtagtgcaatcacagctcactgcaaccttactcctaggctcaagttaactattcttgatcctttattattactaatattctacaattgtttaaataaaaggaactttataatgaaacggttcggaatactggctcaagaacctatgtcaagatgagctgaattttggtaaattattttaggaattatgacaagctaattgaattaggcttgtgacaattagagtaatttacatgacaggtaaaactcctattaaaaatgtttagatgtttgcttctgtagatgtcactttagtaaaataccaatttagttttacttgtggcttatctagttagaacttagcagactttactgggacaagtttactgctcttgtaggagctcctctcacaagtagttgtaatgctgtagcatgatactcaggatcagtagcttgagatgctactatttttctcttcatctttgacttgcagagagcctcccgtttttggatccaggcatcttttctgaatcctggttccatcagtatacctgctctcctatgaccccaaatcatagtcaatggtgcctcaaacatagcaccttaagttaaaggctgcctagtgctctgaggaaagcttgctgattatcttcctgatctactcaccccaaaaggcagaaaagcaacacagtcactgctgtggtcatttgtaatgtaaagatcagttatatatatatatttgtaatgagagcaagtatatactcattatagaatcaatttaagaagtttaaaataacccagagtagaatttctatatctagtcttggtttttttcatgaatatttgcaagtaattaccattaaattcacacatgaaagattaatctgaaagatcagagaccatgttattcctgaccacgatagaactgctcctgtggtttgggacaagtaataaaacaactgcttgagttttgtttgtaaaatacataattaatatttgacctacctcaaaatgtattgaggatctgtgaaatgctaagtgcccaaaataaaatattgctgattgtctttttatt

SEQ ID NO: 113837 - DNA, 661 bp, Homo sapiens
  Payload ID: 2234
  Gene Symbol: ARPP19
  Gene Name: cAMP-regulated phosphoprotein, 19kDa
  Uniprot ID: P56211
  ENST ID: ENST00000569281
  CDS Start-End: 61-399
gaaggaaaaaaggaagtgtttggacgacagcgagcgggagaagcggggtcaaggagcactatgtctgcggaagtccccgaggcagcctccgcggaggagcagaaggaaatggaagataaagtgactagtccagagaaagcagaagaagcaaaattaaaagcaagatatcctcatctgggacaaaagcctggaggttcagatttcttaaggaaacggttgcagaaagggcaaaaatattttgattctggggattacaacatggctaaagcaaaaatgaagaacaagcaacttcctactgcagctccggataagacggaggtcactggtgaccacattcccactccgcaagaccttcctcaacggaagccgtcccttgttgctagcaagctggctggctgattaagaggctgaactgcatgaatctgctaaatctcattatttctccttaatatgttacttatctactttttatttcctttcattcactagtcatttgagactgacagctttgcaggtagcagtagtgtgtgctgctattgtggaatatacgtgtgtagagtttttgattagtttaacagtgcactggtgaagaggacatgttagagcaacataagtaaactacttgaaaatagttgtatatattacctaacttctagtgtag

SEQ ID NO: 113838 - DNA, 799 bp, Homo sapiens
  Payload ID: 2234
  Gene Symbol: ARPP19
  Gene Name: cAMP-regulated phosphoprotein, 19kDa
  ENST ID: ENST00000561971
  CDS Start-End: 279-674
tagagggcaatcttatttccaagtttctgagggacactttgttggaaccaacaaacattgcgagtaactattcagatatcaagtagaatgaggattcagtaagaagccgcaggacttggcaaataaaaaggtcattgggggagctcaatgctagcagtttcggaagcactcggcagccacaaacggatgtgaggtgaggcaggagcggcgacctttgaaggaaaaaaggaagtgtttggacgacagcgagcgggagaagcggggtcaaagggagcactatgtctgcggaagtccccgaggcagcctccgcggaggagcagaagagtgaacacaacatgctcccttggtctctgcaaccatcgattcctaacagcctagaggaaatggaagataaagtgactagtccagagaaagcagaagaagcaaaattaaaagcaagatatcctcatctgggacaaaagcctggaggttcagatttcttaaggaaacggttgcagaaagggcaaaaatattttgattctggggattacaacatggctaaagcaaaaatgaagaacaagcaacttcctactgcagctccggataagacggaggtcactggtgaccacattcccactccgcaagaccttcctcaacggaagccgtcccttgttgctagcaagctggctggctgattaagaggctgaactgcatgaatctgctaaatctcattatttctccttaatatgttacttatctactttttatttcctttcattcactagtcatttgagactgacagctttgcaggtagcagtag

SEQ ID NO: 113839 - DNA, 718 bp, Homo sapiens
  Payload ID: 2234
  Gene Symbol: ARPP19
  Gene Name: cAMP-regulated phosphoprotein, 19kDa
  ENST ID: ENST00000564163
  CDS Start-End: 124-519
ccattttcgcgggcggaggcggcccggcgggccctgggagagctgggacgggcggcggccgggtggcctcggccacccgctaattgcatcttttcccggcgtctcgtctgcagagggagcactatgtctgcggaagtccccgaggcagcctccgcggaggagcagaagagtgaacacaacatgctcccttggtctctgcaaccatcgattcctaacagcctagaggaaatggaagataaagtgactagtccagagaaagcagaagaagcaaaattaaaagcaagatatcctcatctgggacaaaagcctggaggttcagatttcttaaggaaacggttgcagaaagggcaaaaatattttgattctggggattacaacatggctaaagcaaaaatgaagaacaagcaacttcctactgcagctccggataagacggaggtcactggtgaccacattcccactccgcaagaccttcctcaacggaagccgtcccttgttgctagcaagctggctggctgattaagaggctgaactgcatgaatctgctaaatctcattatttctccttaatatgttacttatctactttttatttcctttcattcactagtcatttgagactgacagctttgcaggtagcagtagtgtgtgctgctattgtggaatatacgtgtgtagagtttttgattagtttaacagtgcactggtgaagaggacat

SEQ ID NO: 113840 - DNA, 745 bp, Homo sapiens
  Payload ID: 2234
  Gene Symbol: ARPP19
  Gene Name: cAMP-regulated phosphoprotein, 19kDa
  Uniprot ID: P56211
  ENST ID: ENST00000567669
  CDS Start-End: 67-405
gaaggaaaaaaggaagtgtttggacgacagcgagcgggagaagcggggtcaagtagagggagcactatgtctgcggaagtccccgaggcagcctccgcggaggagcagaaggaaatggaagataaagtgactagtccagagaaagcagaagaagcaaaattaaaagcaagatatcctcatctgggacaaaagcctggaggttcagatttcttaaggaaacggttgcagaaagggcaaaaatattttgattctggggattacaacatggctaaagcaaaaatgaagaacaagcaacttcctactgcagctccggataagacggaggtcactggtgaccacattcccactccgcaagaccttcctcaacggaagccgtcccttgttgctagcaagctggctggctgattaagaggctgaactgcatgaatctgctaaatctcattatttctccttaatatgttacttatctactttttatttcctttcattcactagtcatttgagactgacagctttgcaggtagcagtagtgtgtgctgctattgtggaatatacgtgtgtagagtttttgattagtttaacagtgcactggtgaagaggacatgttagagcaacataagtaaactacttgaaaatagttgtatatattacctaacttctagtgtagtactggttctaacaagtaacaagcaagttttaaaattttaatgttttggctttcattacttcatcttaattatagctt

SEQ ID NO: 113841 - DNA, 550 bp, Homo sapiens
  Payload ID: 2234
  Gene Symbol: ARPP19
  Gene Name: cAMP-regulated phosphoprotein, 19kDa
  ENST ID: ENST00000569723
  CDS Start-End: 50-265
aagtgtttggacgacagcgagcgggagaagcggggtcaaagggagcactatgtctgcggaagtccccgaggcagcctccgcggaggagcagaagcaaaaatattttgattctggggattacaacatggctaaagcaaaaatgaagaacaagcaacttcctactgcagctccggataagacggaggtcactggtgaccacattcccactccgcaagaccttcctcaacggaagccgtcccttgttgctagcaagctggctggctgattaagaggctgaactgcatgaatctgctaaatctcattatttctccttaatatgttacttatctactttttatttcctttcattcactagtcatttgagactgacagctttgcaggtagcagtagtgtgtgctgctattgtggaatatacgtgtgtagagtttttgattagtttaacagtgcactggtgaagaggacatgttagagcaacataagtaaactacttgaaaatagttgtatatattacctaacttctagtgtagtactggttctaacaagtaacaag

SEQ ID NO: 113842 - DNA, 5362 bp, Homo sapiens
  Payload ID: 2234
  Gene Symbol: ARPP19
  Gene Name: cAMP-regulated phosphoprotein, 19kDa
  Uniprot ID: P56211
  ENST ID: ENST00000566423
  CDS Start-End: 135-473
agaaactacaattcccaggaagcactcggcagccacaaacggatgtgaggtgaggcaggagcggcgacctttgaaggaaaaaaggaagtgtttggacgacagcgagcgggagaagcggggtcaaagggagcactatgtctgcggaagtccccgaggcagcctccgcggaggagcagaaggaaatggaagataaagtgactagtccagagaaagcagaagaagcaaaattaaaagcaagatatcctcatctgggacaaaagcctggaggttcagatttcttaaggaaacggttgcagaaagggcaaaaatattttgattctggggattacaacatggctaaagcaaaaatgaagaacaagcaacttcctactgcagctccggataagacggaggtcactggtgaccacattcccactccgcaagaccttcctcaacggaagccgtcccttgttgctagcaagctggctggctgattaagaggctgaactgcatgaatctgctaaatctcattatttctccttaatatgttacttatctactttttatttcctttcattcactagtcatttgagactgacagctttgcaggtagcagtagtgtgtgctgctattgtggaatatacgtgtgtagagtttttgattagtttaacagtgcactggtgaagaggacatgttagagcaacataagtaaactacttgaaaatagttgtatatattacctaacttctagtgtagtactggttctaacaagtaacaagcaagttttaaaattttaatgttttggctttcattacttcatcttaattatagctttgtatgttactcttatttaatataatctctattgtattgatttcttctgtatttaccttttggattttgtaaaacagaagtttaagaccacaagttagaagaaaggtcacatatttcaaacacaactagatggggctctgaaagatttgtatctctgtgcttgaacttgaatggccttaaacctgtttcagctttaacagtagaattttacttgggcaatatttgcccattctggtgtaacttatgtgactctagtgcttaacagctgccgttgaagctaatattcagttctgtagagttagaataccttttgttgttgaagatgtgaatgaagtatgcatgtgcattaactgttgaattcacttttgtgccatttttgtaaatacagtagttttgcacaacctctcacaaatgtctgtattaatttcacatacttaaaaagtagataatgtgccaaccagaagcacaagagttcctacacaaaactctgtaaatcattatagcttttgtataataagagtagtttacaatctcgggcttatagaataccaaactgaaatcttagttcaatctgccatagacttaagcttttcatttgttactaatatccatgacattcagtggccttgtgcaaatacgatatgttgcttaggcatatcttttgtcctatgcagaacctttcattttgatttttatgaaagttgcaattcatgtaatttatataaactttttaaatgtagaaactttttacttccacactcagttttggagaccctagaataaaaggcttcaatactctgcattccatgccctctgccacctgcttttttttcccctttgttctttgactcaaatggtattgagctgtttgttgtatatggaagcataggtgtctatatccttactcttttatataacacaataatggcgttttccttctaatttctcagttgttaacttctttctcttttttttttaggatagggccttgctctgtcacctgagctctagtgcagtagtgcaatcacagctcactgcaaccttactcctaggctcaagttaactattcttgatcctttattattactaatattctacaattgtttaaataaaaggaactttataatgaaacggttcggaatactggctcaagaacctatgtcaagatgagctgaattttggtaaattattttaggaattatgacaagctaattgaattaggcttgtgacaattagagtaatttacatgacaggtaaaactcctattaaaaatgtttagatgtttgcttctgtagatgtcactttagtaaaataccaatttagttttacttgtggcttatctagttagaacttagcagactttactgggacaagtttactgctcttgtaggagctcctctcacaagtagttgtaatgctgtagcatgatactcaggatcagtagcttgagatgctactatttttctcttcatctttgacttgcagagagcctcccgtttttggatccaggcatcttttctgaatcctggttccatcagtatacctgctctcctatgaccccaaatcatagtcaatggtgcctcaaacatagcaccttaagttaaaggctgcctagtgctctgaggaaagcttgctgattatcttcctgatctactcaccccaaaaggcagaaaagcaacacagtcactgctgtggtcatttgtaatgtaaagatcagttatatatatatatttgtaatgagagcaagtatatactcattatagaatcaatttaagaagtttaaaataacccagagtagaatttctatatctagtcttggtttttttcatgaatatttgcaagtaattaccattaaattcacacatgaaagattaatctgaaagatcagagaccatgttattcctgaccacgatagaactgctcctgtggtttgggacaagtaataaaacaactgcttgagttttgtttgtaaaatacataattaatatttgacctacctcaaaatgtattgaggatctgtgaaatgctaagtgcccaaaataaaatattgctgattgtctttttattaaaagtaaatttcctcattaagccaacctgccttctgtaagtcacagtgcttaaatctcaggatttttcattaggagagacctgtcgttaaggatttgtaggtataattgcttagcctccattattggtgcttgggatagagaggttttagatttttgttttttttttgttctgcctcaaagctcagtttattgaagacatttgtaagctattggatcatcacttgaatcaagattttgactagtgagcttaattgtccatttcttacaatttcaaagttacagtctcagaaatggttaattttaataactgtcctatcataaattaatgttggaataaattgaagttgttgataaatacttcatgaaaactaaagtctgaaataaattacttgttttatgtccaatagctactacatttgatagaacagttttgaggaacatttcattcttgaacgcagcatctgacatggttctcagcaagttggaatagtaaggattattggcttgtttcgatgagtggaagcggcatgtttgtagcatacaagttattcaataatcttgtgctgatgacctaaaaatatgtcttaactattcatcaaggaaagcctggtgaagcctttacttgttactacttcaacagttggaattagttgctctttttacttgatgaaacaaaactatacctctgaatatttatggatactttttactaaatcaggcttgtgttcttaatccaaattagtaaagttttatggaagctgaaatgtaatacagtagtctccccttatctgtaagagatacattccaagacccctagtggatgcctgaaacctcagatagtactgaaccctttatcaactatgttttttcagtctgacaaccaaggcggctactaagtgactaaggggcaggtagtatacagtgtggataagcaggacaaaggggtgattcacatcccaggcaggacagagcaggagatcatgagatttcatcactcaggatggcttgtgatttattttattttattcttttttttttttgagatggagtctcactcttgcccaggctggagtgcagtggtgcgatcttggctcactgcaacctctgcctcctgggttcaagcagttctcctgcctcagcctcccaagtagctgggattacaggcgtccgccaccatgcccagccaatttttgtacttttagtagagatggggtttcaccatgttggccaggctggtctcgaactcctgacctcaggtgatccactcgcctcggcctcccaaagtgctgggattataggcatgtgccaccatgcccggccggcttatgatttaaaacatgaattgtttatttctggaattttccacataatatttttggaccaaggttgcctcaggtaacaaactacagaaagtgaaattgcagataaaggggattactgctcctctgctctaaaattggtgtttgggtgatcagaagcaggtagccaatgggaagagcacttctgagtgataactaaagcagtttggtggccttttcacattctccaatgttcaaacatattttccactttccattttctctttcacctcattttgcctctctatcccccatccctgcttatttcttaagcccattgatggcactcattaaattgtatttagggctaatgagtcattgttccttaatatcgttttcaatatgccacaatttaggacacatttaaaattttctaaaacaatatcctaatcaatattgactaatttgagccacattcccaactctaactcagcacacactgccagtcttccccaatatctgtctcctctcaattccccaccacaccttataaaattgtaatcaaagatatctcactctgtcattgttaatctaagaataaaaacactgactttaatacggttttactaagtttcaaccttctaattaggtaggcctctaggtattctgcagatcactgctggtcttgatagccattaatatatgtttgtattatgttatttttcaactaaatcgcagttggaaaaaaacatatttaatattatgcccttggatctgttactgcatcactagcacttgtgatgcaatagaacacttcgcctgtactgaaagggccaagagtaaatgccttgttttgtttttttgttttgttttgttttgctttttgttaaaacatgtctatagagttggcagttaatgctgaatttgtcaaataccccttccaaaattatacttgtatttaaaaaataaatggatctacctaatttctattgatttaatttgcagttttgtcttattaaagtggtatgtttttcagtgtattttttctgaagttgatctctttacatttcagctattactgtatgcaggaagaaactgacttgtaatctttgattttttttttttttttgcatttgtaaaggctttgtacttaaggtaggattaaatgtttgcagattgtga

SEQ ID NO: 113843 - DNA, 955 bp, Homo sapiens
  Payload ID: 2234
  Gene Symbol: ARPP19
  Gene Name: cAMP-regulated phosphoprotein, 19kDa
  Uniprot ID: P56211
  ENST ID: ENST00000563277
  CDS Start-End: 98-388
agccacaaacggatgtgaggtgaggcaggagcggcgacctttgaaggaaaaaaggaagtgtttggacgacagcgagcgggagaagcggggtcaagaaatggaagataaagtgactagtccagagaaagcagaagaagcaaaattaaaagcaagatatcctcatctgggacaaaagcctggaggttcagatttcttaaggaaacggttgcagaaagggcaaaaatattttgattctggggattacaacatggctaaagcaaaaatgaagaacaagcaacttcctactgcagctccggataagacggaggtcactggtgaccacattcccactccgcaagaccttcctcaacggaagccgtcccttgttgctagcaagctggctggctgattaagaggctgaactgcatgaatctgctaaatctcattatttctccttaatatgttacttatctactttttatttcctttcattcactagtcatttgagactgacagctttgcaggtagcagtagtgtgtgctgctattgtggaatatacgtgtgtagagtttttgattagtttaacagtgcactggtgaagaggacatgttagagcaacataagtaaactacttgaaaatagttgtatatattacctaacttctagtgtagtactggttctaacaagtaacaagcaagttttaaaattttaatgttttggctttcattacttcatcttaattatagctttgtatgttactcttatttaatataatctctattgtattgatttcttctgtatttaccttttggattttgtaaaacagaagtttaagaccacaagttagaagaaaggtcacatatttcaaacacaactagatggggctctgaaagatttgtatctctgtgcttgaacttgaatggccttaaacctgtttcagctttaacagtagaattttacttgggcaatatttgcc

SEQ ID NO: 113844 - DNA, 275 bp, Homo sapiens
  Payload ID: 2234
  Gene Symbol: ARPP19
  Gene Name: cAMP-regulated phosphoprotein, 19kDa
  ENST ID: ENST00000567830
  CDS Start-End: 60-275
gaaggaaaaaaggaagtgtttggacgacagcgagcgggagaagcggggtcaagtaggaaatggaagataaagtgactagtccagagaaagcagaagaagcaaaattaaaagcaagatatcctcatctgggacaaaagcctggaggttcagatttcttaaggaaacggttgcagaaagggcaaaaatattttgattctggggattacaacatggctaaagcaaaaatgaagaacaagcaacttcctactgcagctccggataagacggaggtcact

SEQ ID NO: 113845 - DNA, 568 bp, Homo sapiens
  Payload ID: 2234
  Gene Symbol: ARPP19
  Gene Name: cAMP-regulated phosphoprotein, 19kDa
  Uniprot ID: P56211
  ENST ID: ENST00000563566
  CDS Start-End: 113-403
gaaggaaaaaaggaagtgtttggacgacagcgagcgggagaagcggggtcaaagtgaacacaacatgctcccttggtctctgcaaccatcgattcctaacagcctagaggaaatggaagataaagtgactagtccagagaaagcagaagaagcaaaattaaaagcaagatatcctcatctgggacaaaagcctggaggttcagatttcttaaggaaacggttgcagaaagggcaaaaatattttgattctggggattacaacatggctaaagcaaaaatgaagaacaagcaacttcctactgcagctccggataagacggaggtcactggtgaccacattcccactccgcaagaccttcctcaacggaagccgtcccttgttgctagcaagctggctggctgattaagaggctgaactgcatgaatctgctaaatctcattatttctccttaatatgttacttatctactttttatttcctttcattcactagtcatttgagactgacagctttgcaggtagcagtagtgtgtgctgctattgtggaatatacgtgtgtagagttttt

SEQ ID NO: 113846 - DNA, 1489 bp, Homo sapiens
  Payload ID: 2234
  Gene Symbol: ARPP19
  Gene Name: cAMP-regulated phosphoprotein, 19kDa
  Uniprot ID: P56211
  ENST ID: ENST00000568196
  CDS Start-End: 526-816
aatattaaaaatttattataaaaaaacaaatatcaggatcatctgtattcaagaaaaatgtactgataagtaggctgctgttaatttctagtaaagaatctaacttcaaatcatacataattttagataaatagaaaaaattctgtatattttaacagtattaggatgattctctaaatataggcaaagaactgaagagttccatagaaggtgactaactataaatgtattatacatgactggaaaagtaatggcaagcaagacttcagagctgagctatcttgatatttttatccagtgtgtggggtgttacacatgcatcacagctataatagagctatcacatggatcttttgaaaaacaagatagagatgttttaaaggcttctgggtttgatttcttagtcagatgctgtggtacttggcatttaacaactagaattcagaatccagatttttaaaggtgaattattttaaataactgagttgtaatagagaagtaatttatttgaaattattttaggaaatggaagataaagtgactagtccagagaaagcagaagaagcaaaattaaaagcaagatatcctcatctgggacaaaagcctggaggttcagatttcttaaggaaacggttgcagaaagggcaaaaatattttgattctggggattacaacatggctaaagcaaaaatgaagaacaagcaacttcctactgcagctccggataagacggaggtcactggtgaccacattcccactccgcaagaccttcctcaacggaagccgtcccttgttgctagcaagctggctggctgattaagaggctgaactgcatgaatctgctaaatctcattatttctccttaatatgttacttatctactttttatttcctttcattcactagtcatttgagactgacagctttgcaggtagcagtagtgtgtgctgctattgtggaatatacgtgtgtagagtttttgattagtttaacagtgcactggtgaagaggacatgttagagcaacataagtaaactacttgaaaatagttgtatatattacctaacttctagtgtagtactggttctaacaagtaacaagcaagttttaaaattttaatgttttggctttcattacttcatcttaattatagctttgtatgttactcttatttaatataatctctattgtattgatttcttctgtatttaccttttggattttgtaaaacagaagtttaagaccacaagttagaagaaaggtcacatatttcaaacacaactagatggggctctgaaagatttgtatctctgtgcttgaacttgaatggccttaaacctgtttcagctttaacagtagaattttacttgggcaatatttgcccattctggtgtaacttatgtgactctagtgcttaacagctgccgttgaagctaatattcagttctgtagagttagaataccttttgttgttgaagatgtgaatgaa

SEQ ID NO: 113847 - DNA, 3433 bp, Homo sapiens
  Payload ID: 2235
  Gene Symbol: ARPP21
  Gene Name: cAMP-regulated phosphoprotein, 21kDa
  Uniprot ID: Q9UBL0
  ENST ID: ENST00000187397
  CDS Start-End: 457-2895
gtgctattagatttgcaaattgctgatctcccagtgactttccctcttagatcccagttgagtatggttaccttgagaactgtggtattagccatgttagagcatgctccactggggagttctgtgcagtctatttttaatgctatttaatgaaggagcgagcgcctcactcagcaataaaagaagcatgagggaagacagagcagtgcatggttatggatactggacaaggatatttggaaaggttgacgatgtgtcacactgtgtaagggaatcgcatggagatgggcattccgaactgttaatggggacatgggactccagttgtctctgatcacttgtgtggattttcctggcgtagaacgacagaagccgctagtaagtcgccaagacctacagcaggaattctgcaccaaagggcataaaatcttgttattttaatttgcatctgggagaatgtctgagcaaggagacctgaatcaggcaatagcagaggaaggagggactgagcaggagacggccactccagagaacggcattgttaaatcagaaagtctggatgaagaggagaaactggaactgcagaggcggctggaggctcagaatcaagaaagaagaaaatccaagtcaggagcaggaaaaggtaaactgactcgcagccttgctgtctgtgaggaatcttctgccagaccaggaggtgaaagtcttcaggatcaggaatcaattcatttacagctttccagtttttccagcctgcaagaggaggataaatctaggaaagatgactctgaaagagaaaaagaaaaggataaaaacaaagataaaacctctgaaaaacccaagatcagaatgttatcaaaagattgcagccaagaatacacggattctacaggcatagacttacacgagtttctgattaacacattaaagaataattccagggacaggatgatacttttgaaaatggagcaggaaattattgatttcattgctgacaacaataatcattataaaaagttccctcagatgtcatcgtatcagaggatgcttgtccatcgagtggcagcttattttggattggatcacaatgtggatcaaacaggaaaatctgttatcatcaacaagaccagcagcaccagaataccagagcaaaggttttgtgaacatttaaaagatgaaaaaggtgaagaatcccagaagcggtttatcttgaagcgagataactctagtattgataaagaagacaatcagcaaaacagaatgcatccatttagagatgacagacgaagtaaatcaattgaagagagagaagaggaatatcagagagtgagggagagaatatttgcacacgattcagtttgctcccaggaaagcctttttgtggaaaacagtaggctcttggaagacagtaacatatgcaatgagacctataagaaaagacagctctttcggggcaacagagatggctcagggagaacatctgggagtcgacagagcagctcagaaaatgaactcaagtggtctgaccaccaaagggcctggagcagcacagactccgacagttccaaccgcaatctaaagcccgccatgaccaagacggcgagttttgggggcatcacggtgctgaccaggggtgacagcacttccagtactaggagtaccgggaagctgtccaaagcaggttccgagtcttccagcagtgcaggctcctcaggatcgctgtcccgcacccatccacctctccagagcacacccctagtctcaggtgtggcagctggctctccaggctgtgtgccttatccagagaatggaatagggggccaggttgctcccagcagcaccagctacatcctccttccacttgaagctgcaacaggcatcccgcctggaagcatccttcttaatccacacacaggccagccctttgtgaatcccgatggaactcctgcaatatacaacccacccaccagtcagcagcccctgcgaagcgccatggtggggcagtcccaacagcagccaccacagcagcagccctccccgcagccccaacagcaggtccagccaccgcagccacagatggcaggccctctggtcactcagagagatgatgtggcaacacagtttggccagatgaccctgagccggcagtcctcgggggagactcctgaacccccatcaggtcctgtctacccatcctcccttatgccacagccggcccagcagcccagctatgtaatcgcctctacaggccagcagcttcctacaggaggattctcaggctctggccctcccatctcccagcaggtcctccagccccctccctcaccacagggatttgtgcaacagcctccgcctgcacagatgcctgtatattattacccatctggtcagtaccctacctcaaccacgcaacagtaccggcccatggccccggttcagtacaacgctcagaggagtcaacagatgccacaggcagcacagcaagcaggttaccagccagtcttgtctggtcaacagggattccaaggcctaataggagtgcagcagccacctcagagtcagaacgtgataaataaccaacaaggaactccggtgcaaagcgtgatggtttcctacccaacaatgtcttcttatcaggtgccaatgacccagggttctcaaggactgccccagcagtcataccaacagccaatcatgctacctaaccaggcaggtcaagggtcactcccagccactggaatgcctgtttactgtaatgtcacaccgcccacccctcagaacaaccttaggctgattggcccacactgcccctccagcactgtcccagtgatgtcagctagctgcagaacaaactgtgcaagtatgagcaatgctggttggcaggtcaaattctgagagctctggctgtggtacatttcttcagatatttctcatggcctttgatggaagaggaacaaggtgggaaaactggctgaggacttaagtattcactcaacactcaaatgattgctgctggtattctgtaaaaaataaacaaagactaatatacacgttagctggttaatggtgcatatttctgtcatgtctgctaggtatgcctttatagcttagctagtgacatgaattcatcaaggtaagattttctcctaccactgaataccactgtgtagattataatatccctaatttggattagttttgtactttgtgttgagtttgtgatgctaaaagtatttaaaaattatatactaaatcacattgtaccaaagctgtaatggaaaagcaaagaagaattgatgaattgaaggaataatttatatacattatagagttttcttttttaatggatatatactgtattgtagtgtttaatcaaaataaaactatttgaccttatggaggaaggtcatgtttttaccaccagtttggttca

SEQ ID NO: 113848 - DNA, 1304 bp, Homo sapiens
  Payload ID: 2235
  Gene Symbol: ARPP21
  Gene Name: cAMP-regulated phosphoprotein, 21kDa
  Uniprot ID: Q9UBL0
  ENST ID: ENST00000396481
  CDS Start-End: 273-542
aacagattttaactctgaaaagccatttccagtgtctatagactattgtgagcctggagaagtagcatttagttgggatagcttcactagagctgcctgccaaagacttccttccacaggatcttgtcgcaccagcaactgacaggagcttgggagctcgggagcttgggagagggcttatgtttttaataatgtagctgtcagttcgaagcctggaaatgttgaccctcaaagggcataaaatcttgttattttaatttgcatctgggagaatgtctgagcaaggagacctgaatcaggcaatagcagaggaaggagggactgagcaggagacggccactccagagaacggcattgttaaatcagaaagtctggatgaagaggagaaactggaactgcagaggcggctggaggctcagaatcaagaaagaagaaaatccaagtcaggagcaggaaaaggtaaactgactcgcagccttgctgtctgtgaggaatcttctgccagaccaggaggtgaaagtcttcaggatcagactctctgaaaactgcaaatggaaaggaattcaaaagaatttagattaaaagttaaataaaaagtaggcacagtagtgctgaattttcctcaaaggctctcttttgataaggctgaaccaaatataatcccaagtatcctctctccttccttgttggagatgtcttacctctcagctccccaaaatgcacttgcctataagaaacacaattgctggttcatatgaaacttaggaaatagtgaataaggtgcatttaactttggagaaatacttttatggctttggtggagatttctcaatactgcaaaagttgtccagaaatgaatctgagctgatggtgactttaagttaatattattaatatatcactgcatatttttacccttatttttgctccttacagcaagattagtaggttataaaaatttaaatttaaacaaaattatttcatgacaaaatgggaaacttcacatcatacttatttttgtttgcctttcaggcatcatattagcttttataaaaaatggtcttgctgctgaaattgtacttattttatcagaggctgggtgcagtcaagacaaaagtaaaatggtttacctgagcccaggggagggaaaattgattaagatatcattatttttgtttggtttggttttgcttttttcctcttactttaattgaaatactctgaattcccctcatggaaacagagagcattgagagcactttctttaaaaggaccaaaaataaattcctaatagattttgtcct

SEQ ID NO: 113849 - DNA, 2416 bp, Homo sapiens
  Payload ID: 2235
  Gene Symbol: ARPP21
  Gene Name: cAMP-regulated phosphoprotein, 21kDa
  Uniprot ID: Q9UBL0
  ENST ID: ENST00000396482
  CDS Start-End: 291-560
agagaagaagcaggcagcttgagacaggtggagctggatcaagctgtgaacgtgatttgctggaagctggtcattagtgttgacgatgtgtcacactgtgtaagggaatcgcatggagatgggcattccgaactgttaatggggacatgggactccagttgtctctgatcacttgtgtggattttcctggcgtagaacgacagaagccgctagtaagtcgccaagacctacagcaggaattctgcaccaaagggcataaaatcttgttattttaatttgcatctgggagaatgtctgagcaaggagacctgaatcaggcaatagcagaggaaggagggactgagcaggagacggccactccagagaacggcattgttaaatcagaaagtctggatgaagaggagaaactggaactgcagaggcggctggaggctcagaatcaagaaagaagaaaatccaagtcaggagcaggaaaaggtaaactgactcgcagccttgctgtctgtgaggaatcttctgccagaccaggaggtgaaagtcttcaggatcagactctctgaaaactgcaaatggaaaggaattcaaaagaatttagattaaaagttaaataaaaagtaggcacagtagtgctgaattttcctcaaaggctctcttttgataaggctgaaccaaatataatcccaagtatcctctctccttccttgttggagatgtcttacctctcagctccccaaaatgcacttgcctataagaaacacaattgctggttcatatgaaacttaggaaatagtgaataaggtgcatttaactttggagaaatacttttatggctttggtggagatttctcaatactgcaaaagttgtccagaaatgaatctgagctgatggtgactttaagttaatattattaatatatcactgcatatttttacccttatttttgctccttacagcaagattagtaggttataaaaatttaaatttaaacaaaattatttcatgacaaaatgggaaacttcacatcatacttatttttgtttgcctttcaggcatcatattagcttttataaaaaatggtcttgctgctgaaattgtacttattttatcagaggctgggtgcagtcaagacaaaagtaaaatggtttacctgagcccaggggagggaaaattgattaagatatcattatttttgtttggtttggttttgcttttttcctcttactttaattgaaatactctgaattcccctcatggaaacagagagcattgagagcactttctttaaaaggaccaaaaataaattcctaatagattttgtcctaagagagtgtttttttttctagcatcattttctttacatgccactcatgtcataaggcatggacaggctatctttcagtggccattactatgtttcgtacacatgctttattttacttgggctctgagaaatgtgtggctttccttcagcattttatttgtgcttctctttttaatggagattgaaaagggagaataatgtgaatatcacggcttatattattaaatgttgattgatggcttgtaatgtactgcacacaatatatgttaactctgcagaatgacagaccctgggagaagtaatgccccagttgtcccccactcctaatgccaggcagagaaggacagcctttatagacttaatctgctttttgtcccatttgacaaggtaccaggaggaaattttttaagggatcaactgtatcacagtgcccactctggacctaagtctagtgtatccatacaattggtgcagagaaataaggtgtaaatggtgctttgttcctgctggttccaagctcagaaaccaagactagctttgtaggagagaatgagagcctgcaagcctctctttggattggctgaggagtggtgggagcagggggttgatagaaaacatccagacacacatataagcaagtggccgtgctacctttttagagaataaagaaacagacttttgagtttatatgcaatgccttcattaggtaccaccggcacttacaaaatgtgcggactgaatcccagagaacactggcagatgtatacagtatatggattgtatcgcttccccaatgtttgtaaattcacagtatttggaaaactgccttcattttccagtgtgggaaaaactcttgctacctgtattacttgatctcagacccatacctgatggttcagtctgtccttaagttaaaagaattttgcttttctaatgttatactatttacctgtcagtgtattactgcaacttgaatcactcttttactgttgttggatataaacttatcctgtaccaatgtatttattaacacttgtattttattattgagcatatcaataaaaatattaaaaaataacagattgttttttacc

SEQ ID NO: 113850 - DNA, 1015 bp, Homo sapiens
  Payload ID: 2235
  Gene Symbol: ARPP21
  Gene Name: cAMP-regulated phosphoprotein, 21kDa
  Uniprot ID: Q9UBL0
  ENST ID: ENST00000432682
  CDS Start-End: 380-649
gaagaagcaggcagcttgagacaggtggagctggatcaagctgtgaacgtgatttgctggaagctggtcattagtgttgacgatgtgtcacactgtgtaagggaatcgcatggagatgggcattccgaactgttaatggggacatgggactccagttgtctctgatcacttgtgtggattttcctggcgtagaacgacagaagccgctagtaagtcgccaagacctacagcaggaattctgcaccaaagcttaaaaaagtgaggaggaagtaaatgctaaattattcatgagcctcatttgacagcacatcagaaggggaagtgtcaggggttttataaagggcataaaatcttgttattttaatttgcatctgggagaatgtctgagcaaggagacctgaatcaggcaatagcagaggaaggagggactgagcaggagacggccactccagagaacggcattgttaaatcagaaagtctggatgaagaggagaaactggaactgcagaggcggctggaggctcagaatcaagaaagaagaaaatccaagtcaggagcaggaaaaggtaaactgactcgcagccttgctgtctgtgaggaatcttctgccagaccaggaggtgaaagtcttcaggatcagactctctgaaaactgcaaatggaaaggaattcaaaagaatttagattaaaagttaaataaaaagtaggcacagtagtgctgaattttcctcaaaggctctcttttgataaggctgaaccaaatataatcccaagtatcctctctccttccttgttggagatgtcttacctctcagctccccaaaatgcacttgcctataagaaacacaattgctggttcatatgaaacttaggaaatagtgaataaggtgcatttaactttggagaaatacttttatggctttggtggagatttctcaatactgcaaaagttgtccagaaatgaatctgagctgatggtgactttaagttaatattattaatatatcactgcata

SEQ ID NO: 113851 - DNA, 2506 bp, Homo sapiens
  Payload ID: 2235
  Gene Symbol: ARPP21
  Gene Name: cAMP-regulated phosphoprotein, 21kDa
  Uniprot ID: Q9UBL0
  ENST ID: ENST00000412048
  CDS Start-End: 379-648
attagagaagaagcaggcagcttgagacaggtggagctggatcaagctgtgaacgtgatttgctggaagctggtcattagtgttagaaaccccgtcttatttatttcatccttcaccctaccatgattattgcaattattattatttatttttcatcttttttcaggttgacgatgtgtcacactgtgtaagggaatcgcatggagatgggcattccgaactgttaatggggacatgggactccagttgtctctgatcacttgtgtggattttcctggcgtagaacgacagaagccgctagtaagtcgccaagacctacagcaggaattctgcaccaaagggcataaaatcttgttattttaatttgcatctgggagaatgtctgagcaaggagacctgaatcaggcaatagcagaggaaggagggactgagcaggagacggccactccagagaacggcattgttaaatcagaaagtctggatgaagaggagaaactggaactgcagaggcggctggaggctcagaatcaagaaagaagaaaatccaagtcaggagcaggaaaaggtaaactgactcgcagccttgctgtctgtgaggaatcttctgccagaccaggaggtgaaagtcttcaggatcagactctctgaaaactgcaaatggaaaggaattcaaaagaatttagattaaaagttaaataaaaagtaggcacagtagtgctgaattttcctcaaaggctctcttttgataaggctgaaccaaatataatcccaagtatcctctctccttccttgttggagatgtcttacctctcagctccccaaaatgcacttgcctataagaaacacaattgctggttcatatgaaacttaggaaatagtgaataaggtgcatttaactttggagaaatacttttatggctttggtggagatttctcaatactgcaaaagttgtccagaaatgaatctgagctgatggtgactttaagttaatattattaatatatcactgcatatttttacccttatttttgctccttacagcaagattagtaggttataaaaatttaaatttaaacaaaattatttcatgacaaaatgggaaacttcacatcatacttatttttgtttgcctttcaggcatcatattagcttttataaaaaatggtcttgctgctgaaattgtacttattttatcagaggctgggtgcagtcaagacaaaagtaaaatggtttacctgagcccaggggagggaaaattgattaagatatcattatttttgtttggtttggttttgcttttttcctcttactttaattgaaatactctgaattcccctcatggaaacagagagcattgagagcactttctttaaaaggaccaaaaataaattcctaatagattttgtcctaagagagtgtttttttttctagcatcattttctttacatgccactcatgtcataaggcatggacaggctatctttcagtggccattactatgtttcgtacacatgctttattttacttgggctctgagaaatgtgtggctttccttcagcattttatttgtgcttctctttttaatggagattgaaaagggagaataatgtgaatatcacggcttatattattaaatgttgattgatggcttgtaatgtactgcacacaatatatgttaactctgcagaatgacagaccctgggagaagtaatgccccagttgtcccccactcctaatgccaggcagagaaggacagcctttatagacttaatctgctttttgtcccatttgacaaggtaccaggaggaaattttttaagggatcaactgtatcacagtgcccactctggacctaagtctagtgtatccatacaattggtgcagagaaataaggtgtaaatggtgctttgttcctgctggttccaagctcagaaaccaagactagctttgtaggagagaatgagagcctgcaagcctctctttggattggctgaggagtggtgggagcagggggttgatagaaaacatccagacacacatataagcaagtggccgtgctacctttttagagaataaagaaacagacttttgagtttatatgcaatgccttcattaggtaccaccggcacttacaaaatgtgcggactgaatcccagagaacactggcagatgtatacagtatatggattgtatcgcttccccaatgtttgtaaattcacagtatttggaaaactgccttcattttccagtgtgggaaaaactcttgctacctgtattacttgatctcagacccatacctgatggttcagtctgtccttaagttaaaagaattttgcttttctaatgttatactatttacctgtcagtgtattactgcaacttgaatcactcttttactgttgttggatataaacttatcctgtaccaatgtatttattaacacttgtattttattattgagcatatcaataaaaatattaaaaaataacagattgttttttaccaa

SEQ ID NO: 113852 - DNA, 550 bp, Homo sapiens
  Payload ID: 2235
  Gene Symbol: ARPP21
  Gene Name: cAMP-regulated phosphoprotein, 21kDa
  ENST ID: ENST00000413378
  CDS Start-End: 255-550
gattattgcaattattattatttatttttcatcttttttcaggttgacgatgtgtcacactgtgtaagggaatcgcatggagatgggcattccgaactgttaatggggacatgggactccagttgtctctgatcacttgtgtggattttcctggcgtagaacgacagaagccgctagtaagtcgccaagacctacagcaggaattctgcaccaaagggcataaaatcttgttattttaatttgcatctgggagaatgtctgagcaaggagacctgaatcaggcaatagcagaggaaggagggactgagcaggagacggccactccagagaacggcattgttaaatcagaaagtctggatgaagaggagaaactggaactgcagaggcggctggaggctcagaatcaagaaagaagaaaatccaagtcaggagcaggaaaaggtaaactgactcgcagccttgctgtctgtgaggaatcttctgccagaccaggaggtgaaagtcttcaggatcaggaatcaattcatttacagctttccagtttttccag

SEQ ID NO: 113853 - DNA, 787 bp, Homo sapiens
  Payload ID: 2235
  Gene Symbol: ARPP21
  Gene Name: cAMP-regulated phosphoprotein, 21kDa
  ENST ID: ENST00000427590
  CDS Start-End: 1-373
ttgcagggacaggatgatacttttgaaaatggagcaggaaattattgatttcattgctgacaacaataatcattataaaaagttccctcagatgtcatcgtatcagaggatgcttgtccatcgagtggcagcttattttggattggatcacaatgtggatcaaacaggaaaatctgttatcatcaacaagaccagcagcaccagaattcagtttgctcccaggaaagcctttttgtggaaaacaggggcaacagagatggctcagggagaacatctgggagtcgacagagcagctcagaaaatgaactcaagtggtctgaccaccaaagggcctggagcagcacagactccgacagttccaaccgcaatctaaagcccgccatgaccaagacggcgagttttgggggcatcacggtgctgaccaggggtgacagcacttccagtactaggagtaccgggaagctgtccaaagcaggtagttccgagtcttccagcagtgcaggctcctcaggatcgctgtcccgcacccatccacctctccagagcacacccctagtctcaggtgtggcagctggctctccaggctgtgtgccttatccagagaatggaatagggggccaggttgctcccagcagcaccagctacatcctccttccacttgaagctgcaacaggcatcccgcctggaagcatccttcttaatccacacacaggccagccctttgtgaatcccgatggaactcctgcaatatacaacccacccaccagtcagcagcccctgcgaagcg

SEQ ID NO: 113854 - DNA, 620 bp, Homo sapiens
  Payload ID: 2235
  Gene Symbol: ARPP21
  Gene Name: cAMP-regulated phosphoprotein, 21kDa
  ENST ID: ENST00000452563
  CDS Start-End: 332-620
gcagtctatttttaatgctatttaatgaaggagcgagcgcctcactcagcaataaaagaagcatgagggaagacagagcagtgcatggttatggatactggacaaggatatttggaaaggttgacgatgtgtcacactgtgtaagggaatcgcatggagatgggcattccgaactgttaatggggacatgggactccagttgtctctgatcacttgtgtggattttcctggcgtagaacgacagaagccgctagtaagtcgccaagacctacagcaggaattctgcaccaaagggcataaaatcttgttattttaatttgcatctgggagaatgtctgagcaaggagacctgaatcaggcaatagcagaggaaggagggactgagcaggagacggccactccagagaacggcattgttaaatcagaaagtctggatgaagaggagaaactggaactgcagaggcggctggaggctcagaatcaagaaagaagaaaatccaagtcaggagcaggaaaaggtaaactgactcgcagccttgctgtctgtgaggaatcttctgccagaccaggaggtgaaagtcttcaggatcaggtatatccccttgccattatcattaatt

SEQ ID NO: 113855 - DNA, 561 bp, Homo sapiens
  Payload ID: 2235
  Gene Symbol: ARPP21
  Gene Name: cAMP-regulated phosphoprotein, 21kDa
  Uniprot ID: Q9UBL0
  ENST ID: ENST00000436702
  CDS Start-End: 180-449
agaagtcgagggtcatttgttcaaaagttggagaaatatcctcttttgttgcttcttctactctgtagtggagaatggggaactggtagttgtgtgggagttatgtgtctctaagatttgtcgacccattttgatggcaagggcataaaatcttgttattttaatttgcatctgggagaatgtctgagcaaggagacctgaatcaggcaatagcagaggaaggagggactgagcaggagacggccactccagagaacggcattgttaaatcagaaagtctggatgaagaggagaaactggaactgcagaggcggctggaggctcagaatcaagaaagaagaaaatccaagtcaggagcaggaaaaggtaaactgactcgcagccttgctgtctgtgaggaatcttctgccagaccaggaggtgaaagtcttcaggatcagactctctgaaaactgcaaatggaaaggaattcaaaagaatttagattaaaagttaaataaaaagtaggcacagtagtgctgaattttcctcaaaggctctcttttgataaggctgaaccaa

SEQ ID NO: 113856 - DNA, 544 bp, Homo sapiens
  Payload ID: 2235
  Gene Symbol: ARPP21
  Gene Name: cAMP-regulated phosphoprotein, 21kDa
  ENST ID: ENST00000421492
  CDS Start-End: 449-544
aacaacaaaagccaagccaaaagccaaaacaaacaaatccagccaaatcaatcattgagaaacaataatattaataaaatccaaaactaaatcaaaccaatcaaggcaccaagacgcaggggggatatccacagttcgatcaaggttgacgatgtgtcacactgtgtaagggaatcgcatggagatgggcattccgaactgttaatggggacatgggactccagttgtctctgatcacttgtgtggattttcctggcgtagaacgacagaagccgctagtaagtcgccaagacctacagcaggaattctgcaccaaagcttaaaaaagtgaggaggaagtaaatgctaaattattcatgagcctcatttgacagcacatcagaaggggaagtgtcaggggttttataaagggcataaaatcttgttattttaatttgcatctgggagaatgtctgagcaaggagacctgaatcaggcaatagcagaggaaggagggactgagcaggagacggccactccagagaacggcattgttaaatcagaa

SEQ ID NO: 113857 - DNA, 700 bp, Homo sapiens
  Payload ID: 2235
  Gene Symbol: ARPP21
  Gene Name: cAMP-regulated phosphoprotein, 21kDa
  ENST ID: ENST00000446068
  CDS Start-End: 1-436
ccaagaatacacggattctacaggcatagacttacacgagtttctgattaacacattaaagaataattccagggacaggatgatacttttgaaaatggagcaggaaattattgatttcattgctgacaacaataatcattataaaaagttccctcagatgtcatcgtatcagaggatgcttgtccatcgagtggcagcttattttggattggatcacaatgtggatcaaacaggaaaatctgttatcatcaacaagaccagcagcaccagaataccagagcaaaggttttgtgaacatttaaaagatgaaaaaggtgaagaatcccagaagcggtttatcttgaagcgagataactctagtattgataaagaagacaatcagctttgtccttcagttgtgcacaaattgagctggattatcaatacggaccgatgatcaaccggtgtagctgtaaagaacaaaccttgttatgcaaaacagaatgcatccatttagagatgacagacgaagtaaatcaattgaagagagagaagaggaatatcagagagtgagggagagaatatttgcacacgattcagtttgctcccaggaaagcctttttgtggaaaacagtaggctcttggaagacagtaacatatgcaatgagacctataagaaaagacagctctttcggggcaacagagatggctcagggagaac

SEQ ID NO: 113858 - DNA, 568 bp, Homo sapiens
  Payload ID: 2235
  Gene Symbol: ARPP21
  Gene Name: cAMP-regulated phosphoprotein, 21kDa
  Uniprot ID: Q9UBL0
  ENST ID: ENST00000427542
  CDS Start-End: 239-508
gatgcatttagtgttttcatagataggttgacgatgtgtcacactgtgtaagggaatcgcatggagatgggcattccgaactgttaatggggacatgggactccagttgtctctgatcacttgtgtggattttcctggcgtagaacgacagaagccgctagtaagtcgccaagacctacagcaggaattctgcaccaaagggcataaaatcttgttattttaatttgcatctgggagaatgtctgagcaaggagacctgaatcaggcaatagcagaggaaggagggactgagcaggagacggccactccagagaacggcattgttaaatcagaaagtctggatgaagaggagaaactggaactgcagaggcggctggaggctcagaatcaagaaagaagaaaatccaagtcaggagcaggaaaaggtaaactgactcgcagccttgctgtctgtgaggaatcttctgccagaccaggaggtgaaagtcttcaggatcagactctctgaaaactgcaaatggaaaggaattcaaaagaatttagattaaaagttaaataaaaagtaggc

SEQ ID NO: 113859 - DNA, 3182 bp, Homo sapiens
  Payload ID: 2235
  Gene Symbol: ARPP21
  Gene Name: cAMP-regulated phosphoprotein, 21kDa
  Uniprot ID: Q9UBL0
  ENST ID: ENST00000444190
  CDS Start-End: 302-2683
aatgtttatgcatagaaatatagctgaggtggatgtggttgctgtcagctattcaggtttgctacctgatcacctcctgaagatgtagggttgacgatgtgtcacactgtgtaagggaatcgcatggagatgggcattccgaactgttaatggggacatgggactccagttgtctctgatcacttgtgtggattttcctggcgtagaacgacagaagccgctagtaagtcgccaagacctacagcaggaattctgcaccaaagggcataaaatcttgttattttaatttgcatctgggagaatgtctgagcaaggagacctgaatcaggcaatagcagaggaaggagggactgagcaggagacggccactccagagaacggcattgttaaatcagaaagtctggatgaagaggagaaactggaactgcagaggcggctggaggctcagaatcaagaaagaagaaaatccaagtcaggagcaggaaaaggtaaactgactcgcagccttgctgtctgtgaggaatcttctgccagaccaggaggtgaaagtcttcaggatcaggaatcaattcatttacagctttccagtttttccagcctgcaagaggaggataaatctaggaaagatgactctgaaagagaaaaagaaaaggataaaaacaaagataaaacctctgaaaaacccaagatcagaatgttatcaaaagattgcagccaagaatacacggattctacaggcatagacttacacgagtttctgattaacacattaaagaataattccagggacaggatgatacttttgaaaatggagcaggaaattattgatttcattgctgacaacaataatcattataaaaagttccctcagatgtcatcgtatcagaggatgcttgtccatcgagtggcagcttattttggattggatcacaatgtggatcaaacaggaaaatctgttatcatcaacaagaccagcagcaccagaataccagagcaaaggttttgtgaacatttaaaagatgaaaaaggtgaagaatcccagaagcggtttatcttgaagcgagataactctagtattgataaagaagacaatcagtcagtttgctcccaggaaagcctttttgtggaaaacaggggcaacagagatggctcagggagaacatctgggagtcgacagagcagctcagaaaatgaactcaagtggtctgaccaccaaagggcctggagcagcacagactccgacagttccaaccgcaatctaaagcccgccatgaccaagacggcgagttttgggggcatcacggtgctgaccaggggtgacagcacttccagtactaggagtaccgggaagctgtccaaagcaggttccgagtcttccagcagtgcaggctcctcaggatcgctgtcccgcacccatccacctctccagagcacacccctagtctcaggtgtggcagctggctctccaggctgtgtgccttatccagagaatggaatagggggccaggttgctcccagcagcaccagctacatcctccttccacttgaagctgcaacaggcatcccgcctggaagcatccttcttaatccacacacaggccagccctttgtgaatcccgatggaactcctgcaatatacaacccacccaccagtcagcagcccctgcgaagcgccatggtggggcagtcccaacagcagccaccacagcagcagccctccccgcagccccaacagcaggtccagccaccgcagccacagatggcaggccctctggtcactcagtctgtccaggggctgcaggcttcctcccagtcagtgcaatatccagcagtctcttttcctccccagcacctcctacctgtgtctccaacgcagcactttcccatgagagatgatgtggcaacacagtttggccagatgaccctgagccggcagtcctcgggggagactcctgaacccccatcaggtcctgtctacccatcctcccttatgccacagccggcccagcagcccagctatgtaatcgcctctacaggccagcagcttcctacaggaggattctcaggctctggccctcccatctcccagcaggtcctccagccccctccctcaccacagggatttgtgcaacagcctccgcctgcacagatgcctgtatattattacccatctggtcagtaccctacctcaaccacgcaacagtaccggcccatggccccggttcagtacaacgctcagaggagtcaacagatgccacaggcagcacagcaagcaggttaccagccagtcttgtctggtcaacagggattccaaggcctaataggagtgcagcagccacctcagagtcagaacgtgataaataaccaacaaggaactccggtgcaaagcgtgatggtttcctacccaacaatgtcttcttatcaggtgccaatgacccagggttctcaaggactgccccagcagtcataccaacagccaatcatgctacctaaccaggcaggtcaagggtcactcccagccactggaatgcctgtttactgtaatgtcacaccgcccacccctcagaacaaccttaggctgattggcccacactgcccctccagcactgtcccagtgatgtcagctagctgcagaacaaactgtgcaagtatgagcaatgctggttggcaggtcaaattctgagagctctggctgtggtacatttcttcagatatttctcatggcctttgatggaagaggaacaaggtgggaaaactggctgaggacttaagtattcactcaacactcaaatgattgctgctggtattctgtaaaaaataaacaaagactaatatacacgttagctggttaatggtgcatatttctgtcatgtctgctaggtatgcctttatagcttagctagtgacatgaattcatcaaggtaagattttctcctaccactgaataccactgtgtagattataatatccctaatttggattagttttgtactttgtgttgagtttgtgatgctaaaagtatttaaaaattatatactaaatcacattgtaccaaagctgtaatggaaaagcaaagaagaattgatgaattgaaggaataatttatatacattatagagttttcttttttaatggatatatactgtattgtagtgtttaatcaaaataaaactatttgacct

SEQ ID NO: 113860 - DNA, 2880 bp, Homo sapiens
  Payload ID: 2235
  Gene Symbol: ARPP21
  Gene Name: cAMP-regulated phosphoprotein, 21kDa
  Uniprot ID: Q9UBL0
  ENST ID: ENST00000441454
  CDS Start-End: 753-1022
agcatttagttgggatagcttcactagagctgcctgccaaagacttccttccacaggatcttgtcgcaccagcaactgacaggagcttgggagctcgggagcttgggagagggcttatgtttttaataatgtagctgtcagttcgaagcctggaaatgttgaccctcaaaggtttattgccaaaattagataccatatttatgctgaattattaccttttcaatagttttttttgaccttgcagactactgtattctttatacctagggaagcatgtctatgtttggaacctgcaaataatttttcagtcatcttagagatgctgcagaacatcaatgccacatcttgagtcagaagtcgagggtcatttgttcaaaagttggagaaatatcctcttttgttgcttcttctactctgtagtggagaatggggaactggtagttgtgtgggagttatgtgtctctaagatttgtcgacccattttgatggcaaggtgtattcacaagtgtgtgtaaagggggtgtggatgggacaactgcatctgcctcttgtgcatgccttgggtacttgatttcatcttgttttttcccccttttgtataaaattctcaaaattgctcatttggatttgaatatgaaaggagaaatgaaatctctaaagaatgatagtaaataccttgcactgactttattttctgatatcttaaccttctagggcataaaatcttgttattttaatttgcatctgggagaatgtctgagcaaggagacctgaatcaggcaatagcagaggaaggagggactgagcaggagacggccactccagagaacggcattgttaaatcagaaagtctggatgaagaggagaaactggaactgcagaggcggctggaggctcagaatcaagaaagaagaaaatccaagtcaggagcaggaaaaggtaaactgactcgcagccttgctgtctgtgaggaatcttctgccagaccaggaggtgaaagtcttcaggatcagactctctgaaaactgcaaatggaaaggaattcaaaagaatttagattaaaagttaaataaaaagtaggcacagtagtgctgaattttcctcaaaggctctcttttgataaggctgaaccaaatataatcccaagtatcctctctccttccttgttggagatgtcttacctctcagctccccaaaatgcacttgcctataagaaacacaattgctggttcatatgaaacttaggaaatagtgaataaggtgcatttaactttggagaaatacttttatggctttggtggagatttctcaatactgcaaaagttgtccagaaatgaatctgagctgatggtgactttaagttaatattattaatatatcactgcatatttttacccttatttttgctccttacagcaagattagtaggttataaaaatttaaatttaaacaaaattatttcatgacaaaatgggaaacttcacatcatacttatttttgtttgcctttcaggcatcatattagcttttataaaaaatggtcttgctgctgaaattgtacttattttatcagaggctgggtgcagtcaagacaaaagtaaaatggtttacctgagcccaggggagggaaaattgattaagatatcattatttttgtttggtttggttttgcttttttcctcttactttaattgaaatactctgaattcccctcatggaaacagagagcattgagagcactttctttaaaaggaccaaaaataaattcctaatagattttgtcctaagagagtgtttttttttctagcatcattttctttacatgccactcatgtcataaggcatggacaggctatctttcagtggccattactatgtttcgtacacatgctttattttacttgggctctgagaaatgtgtggctttccttcagcattttatttgtgcttctctttttaatggagattgaaaagggagaataatgtgaatatcacggcttatattattaaatgttgattgatggcttgtaatgtactgcacacaatatatgttaactctgcagaatgacagaccctgggagaagtaatgccccagttgtcccccactcctaatgccaggcagagaaggacagcctttatagacttaatctgctttttgtcccatttgacaaggtaccaggaggaaattttttaagggatcaactgtatcacagtgcccactctggacctaagtctagtgtatccatacaattggtgcagagaaataaggtgtaaatggtgctttgttcctgctggttccaagctcagaaaccaagactagctttgtaggagagaatgagagcctgcaagcctctctttggattggctgaggagtggtgggagcagggggttgatagaaaacatccagacacacatataagcaagtggccgtgctacctttttagagaataaagaaacagacttttgagtttatatgcaatgccttcattaggtaccaccggcacttacaaaatgtgcggactgaatcccagagaacactggcagatgtatacagtatatggattgtatcgcttccccaatgtttgtaaattcacagtatttggaaaactgccttcattttccagtgtgggaaaaactcttgctacctgtattacttgatctcagacccatacctgatggttcagtctgtccttaagttaaaagaattttgcttttctaatgttatactatttacctgtcagtgtattactgcaacttgaatcactcttttactgttgttggatataaacttatcctgtaccaatgtatttattaacacttgtattttattattgagcatatcaataaaaatattaaaaaataacagattgttttttaccaa

SEQ ID NO: 113861 - DNA, 781 bp, Homo sapiens
  Payload ID: 2235
  Gene Symbol: ARPP21
  Gene Name: cAMP-regulated phosphoprotein, 21kDa
  ENST ID: ENST00000425289
  CDS Start-End: 1-781
attttgcagggacaggatgatacttttgaaaatggagcaggaaattattgatttcattgctgacaacaataatcattataaaaagttccctcagatgtcatcgtatcagaggatgcttgtccatcgagtggcagcttattttggattggatcacaatgtggatcaaacaggaaaatctgttatcatcaacaagaccagcagcaccagaattcagtttgctcccaggaaagcctttttgtggaaaacagtaggctcttggaagacagtaacatatgcaatgagacctataagaaaagacagctctttcggttggggcaacagagatggctcagggagaacatctgggagtcgacagagcagctcagaaaatgaactcaagtggtctgaccaccaaagggcctggagcagcacagactccgacagttccaaccgcaatctaaagcccgccatgaccaagacggcgagttttgggggcatcacggtgctgaccaggggtgacagcacttccagtactaggagtaccgggaagctgtccaaagcaggttccgagtcttccagcagtgcaggctcctcaggatcgctgtcccgcacccatccacctctccagagcacacccctagtctcaggtgtggcagctggctctccaggctgtgtgccttatccagagaatggaatagggggccaggttgctcccagcagcaccagctacatcctccttccacttgaagctgcaacaggcatcccgcctggaagcatccttcttaatccacacacaggtgag

SEQ ID NO: 113862 - DNA, 590 bp, Homo sapiens
  Payload ID: 2235
  Gene Symbol: ARPP21
  Gene Name: cAMP-regulated phosphoprotein, 21kDa
  ENST ID: ENST00000438577
  CDS Start-End: 308-590
agcaataaaagaagcatgagggaagacagagcagtgcatggttatggatactggacaaggatatttggaaaggtaaaggctgaccattggatatggttgacgatgtgtcacactgtgtaagggaatcgcatggagatgggcattccgaactgttaatggggacatgggactccagttgtctctgatcacttgtgtggattttcctggcgtagaacgacagaagccgctagtaagtcgccaagacctacagcaggaattctgcaccaaagggcataaaatcttgttattttaatttgcatctgggagaatgtctgagcaaggagacctgaatcaggcaatagcagaggaaggagggactgagcaggagacggccactccagagaacggcattgttaaatcagaaagtctggatgaagaggagaaactggaactgcagaggcggctggaggctcagaatcaagaaagaagaaaatccaagtcaggagcaggaaaaggtaaactgactcgcagccttgctgtctgtgaggaatcttctgccagaccaggaggtgaaagtcttcaggatcaggaatcaattcatttacagcttt

SEQ ID NO: 113863 - DNA, 657 bp, Homo sapiens
  Payload ID: 2235
  Gene Symbol: ARPP21
  Gene Name: cAMP-regulated phosphoprotein, 21kDa
  ENST ID: ENST00000449196
  CDS Start-End: 496-657
tttgttaaaaatcagaaaacctttgacacacttttagataaatacacctactcctttgatcctttgtgtatgtattaccacagggcttaaatatcttaagattttagttaatgtcattttcatgaaagacagtcatttggaagccaagagctctatctatgttttgttcaaatagccgagtaatctactatcttggcagtaattacttctgctgcatttctaatgtgaattgcatgtgagagcttatgaatacactcttttcaagtgtatgtgggttttcaaggttgacgatgtgtcacactgtgtaagggaatcgcatggagatgggcattccgaactgttaatggggacatgggactccagttgtctctgatcacttgtgtggattttcctggcgtagaacgacagaagccgctagtaagtcgccaagacctacagcaggaattctgcaccaaagggcataaaatcttgttattttaatttgcatctgggagaatgtctgagcaaggagacctgaatcaggcaatagcagaggaaggagggactgagcaggagacggccactccagagaacggcattgttaaatcagaaagtctggatgaagaggagaaactggaactgcagaggcggctggaggctcagaatcaagaaagaaga

SEQ ID NO: 113864 - DNA, 1103 bp, Homo sapiens
  Payload ID: 2235
  Gene Symbol: ARPP21
  Gene Name: cAMP-regulated phosphoprotein, 21kDa
  Uniprot ID: Q9UBL0
  ENST ID: ENST00000438071
  CDS Start-End: 105-374
attcacaagtgtgtgtaaagggggtgtggatgggacaactgcatctgcctcttgtgcatgccttggggcataaaatcttgttattttaatttgcatctgggagaatgtctgagcaaggagacctgaatcaggcaatagcagaggaaggagggactgagcaggagacggccactccagagaacggcattgttaaatcagaaagtctggatgaagaggagaaactggaactgcagaggcggctggaggctcagaatcaagaaagaagaaaatccaagtcaggagcaggaaaaggtaaactgactcgcagccttgctgtctgtgaggaatcttctgccagaccaggaggtgaaagtcttcaggatcagactctctgaaaactgcaaatggaaaggaattcaaaagaatttagattaaaagttaaataaaaagtaggcacagtagtgctgaattttcctcaaaggctctcttttgataaggctgaaccaaatataatcccaagtatcctctctccttccttgttggagatgtcttacctctcagctccccaaaatgcacttgcctataagaaacacaattgctggttcatatgaaacttaggaaatagtgaataaggtgcatttaactttggagaaatacttttatggctttggtggagatttctcaatactgcaaaagttgtccagaaatgaatctgagctgatggtgactttaagttaatattattaatatatcactgcatatttttacccttatttttgctccttacagcaagattagtaggttataaaaatttaaatttaaacaaaattatttcatgacaaaatgggaaacttcacatcatacttatttttgtttgcctttcaggcatcatattagcttttataaaaaatggtcttgctgctgaaattgtacttattttatcagaggctgggtgcagtcaagacaaaagtaaaatggtttacctgagcccaggggagggaaaattgattaagatatcattatttttgtttggtttggttttgcttttttcctcttactttaattgaaatactctgaattcccctcatggaaacagagagcattgagagcactttctttaaaag

SEQ ID NO: 113865 - DNA, 611 bp, Homo sapiens
  Payload ID: 2235
  Gene Symbol: ARPP21
  Gene Name: cAMP-regulated phosphoprotein, 21kDa
  ENST ID: ENST00000450234
  CDS Start-End: 300-611
agagttggcctggagagtgagcggtggagggagtggaacaaggcttcgtcaagagtccccaggagtccaggggcgcccccgagacgggttgacgatgtgtcacactgtgtaagggaatcgcatggagatgggcattccgaactgttaatggggacatgggactccagttgtctctgatcacttgtgtggattttcctggcgtagaacgacagaagccgctagtaagtcgccaagacctacagcaggaattctgcaccaaagggcataaaatcttgttattttaatttgcatctgggagaatgtctgagcaaggagacctgaatcaggcaatagcagaggaaggagggactgagcaggagacggccactccagagaacggcattgttaaatcagaaagtctggatgaagaggagaaactggaactgcagaggcggctggaggctcagaatcaagaaagaagaaaatccaagtcaggagcaggaaaaggtaaactgactcgcagccttgctgtctgtgaggaatcttctgccagaccaggaggtgaaagtcttcaggatcaggaatcaattcatttacagctttccagtttttccagcctgcaagaggaggat

SEQ ID NO: 113866 - DNA, 2014 bp, Homo sapiens
  Payload ID: 2235
  Gene Symbol: ARPP21
  Gene Name: cAMP-regulated phosphoprotein, 21kDa
  ENST ID: ENST00000457165
  CDS Start-End: 1-726
gggagtcgacagagcagctcagaaaatgaactcaagtggtctgaccaccaaagggcctggagcagcacagactccgacagttccaaccgcaatctaaagcccgccatgaccaagacggcgagttttgggggcatcacggtgctgaccaggggtgacagcacttccagtactaggagtaccgggaagctgtccaaagcaggttccgagtcttccagcagtgcaggctcctcaggatcgctgtcccgcacccatccacctctccagagcacacccctagtctcaggtgtggcagctggctctccaggctgtgtgccttatccagagaatggaatagggggccaggttgctcccagcagcaccagctacatcctccttccacttgaagctgcaacaggcatcccgcctggaagcatccttcttaatccacacacagccctttgtgaatcccgatggaactcctgcaatatacaacccacccaccagtcagcagcccctgcgaagcgccatggtggggcagtcccaacagcagccaccacagcagcagccctccccgcagccccaacagcaggtccagccaccgcagccacagatggcaggccctctggtcactcagtctgtccaggggctgcaggcttcctcccagtcagtgcaatatccagcagtctcttttcctccccagcacctcctacctgtgtctccaacgcagcactttcccatgagagatgatgtggcaacacagtttggccagatgaccctgagccggcagtcctcgggggagactcctgaacccccatcaggtcctgtctacccatcctcccttatgccacagccggcccagcagcccagctatgtaatcgcctctacaggccagcagcttcctacaggaggattctcaggctctggccctcccatctcccagcaggtcctccagccccctccctcaccacagggatttgtgcaacagcctccgcctgcacagatgcctgtatattattacccatctggtcagtaccctacctcaaccacgcaacagtaccggcccatggccccggttcagtacaacgctcagaggagtcaacagatgccacaggcagcacagcaagcaggttaccagccagtcttgtctggtcaacagggattccaaggcctaataggagtgcagcagccacctcagagtcagaacgtgataaataaccaacaaggaactccggtgcaaagcgtgatggtttcctacccaacaatgtcttcttatcaggtgccaatgacccagggttctcaaggactgccccagcagtcataccaacagccaatcatgctacctaaccaggcaggtcaagggtcactcccagccactggaatgcctgtttactgtaatgtcacaccgcccacccctcagaacaaccttaggctgattggcccacactgcccctccagcactgtcccagtgatgtcagctagctgcagaacaaactgtgcaagtatgagcaatgctggttggcaggtcaaattctgagagctctggctgtggtacatttcttcagatatttctcatggcctttgatggaagaggaacaaggtgggaaaactggctgaggacttaagtattcactcaacactcaaatgattgctgctggtattctgtaaaaaataaacaaagactaatatacacgttagctggttaatggtgcatatttctgtcatgtctgctaggtatgcctttatagcttagctagtgacatgaattcatcaaggtaagattttctcctaccactgaataccactgtgtagattataatatccctaatttggattagttttgtactttgtgttgagtttgtgatgctaaaagtatttaaaaattatatactaaatcacattgtaccaaagctgtaatggaaaagcaaagaagaattgatgaattgaaggaataatttatatacattatagagttttcttttttaatggatatatactgtattgtagtgtttaatcaaaataaaactatttgacctta

SEQ ID NO: 113867 - DNA, 3086 bp, Homo sapiens
  Payload ID: 2235
  Gene Symbol: ARPP21
  Gene Name: cAMP-regulated phosphoprotein, 21kDa
  Uniprot ID: Q9UBL0
  ENST ID: ENST00000417925
  CDS Start-End: 215-2656
aggttgacgatgtgtcacactgtgtaagggaatcgcatggagatgggcattccgaactgttaatggggacatgggactccagttgtctctgatcacttgtgtggattttcctggcgtagaacgacagaagccgctagtaagtcgccaagacctacagcaggaattctgcaccaaagggcataaaatcttgttattttaatttgcatctgggagaatgtctgagcaaggagacctgaatcaggcaatagcagaggaaggagggactgagcaggagacggccactccagagaacggcattgttaaatcagaaagtctggatgaagaggagaaactggaactgcagaggcggctggaggctcagaatcaagaaagaagaaaatccaagtcaggagcaggaaaaggtaaactgactcgcagccttgctgtctgtgaggaatcttctgccagaccaggaggtgaaagtcttcaggatcaggaatcaattcatttacagctttccagtttttccagcctgcaagaggaggataaatctaggaaagatgactctgaaagagaaaaagaaaaggataaaaacaaagataaaacctctgaaaaacccaagatcagaatgttatcaaaagattgcagccaagaatacacggattctacaggcatagacttacacgagtttctgattaacacattaaagaataattccagggacaggatgatacttttgaaaatggagcaggaaattattgatttcattgctgacaacaataatcattataaaaagttccctcagatgtcatcgtatcagaggatgcttgtccatcgagtggcagcttattttggattggatcacaatgtggatcaaacaggaaaatctgttatcatcaacaagaccagcagcaccagaataccagagcaaaggttttgtgaacatttaaaagatgaaaaaggtgaagaatcccagaagcggtttatcttgaagcgagataactctagtattgataaagaagacaatcagtcagtttgctcccaggaaagcctttttgtggaaaacagtaggctcttggaagacagtaacatatgcaatgagacctataagaaaagacagctctttcggggcaacagagatggctcagggagaacatctgggagtcgacagagcagctcagaaaatgaactcaagtggtctgaccaccaaagggcctggagcagcacagactccgacagttccaaccgcaatctaaagcccgccatgaccaagacggcgagttttgggggcatcacggtgctgaccaggggtgacagcacttccagtactaggagtaccgggaagctgtccaaagcaggttccgagtcttccagcagtgcaggctcctcaggatcgctgtcccgcacccatccacctctccagagcacacccctagtctcaggtgtggcagctggctctccaggctgtgtgccttatccagagaatggaatagggggccaggttgctcccagcagcaccagctacatcctccttccacttgaagctgcaacaggcatcccgcctggaagcatccttcttaatccacacacaggccagccctttgtgaatcccgatggaactcctgcaatatacaacccacccaccagtcagcagcccctgcgaagcgccatggtggggcagtcccaacagcagccaccacagcagcagccctccccgcagccccaacagcaggtccagccaccgcagccacagatggcaggccctctggtcactcagtctgtccaggggctgcaggcttcctcccagtcagtgcaatatccagcagtctcttttcctccccagcacctcctacctgtgtctccaacgcagcactttcccatgagagatgatgtggcaacacagtttggccagatgaccctgagccggcagtcctcgggggagactcctgaacccccatcaggtcctgtctacccatcctcccttatgccacagccggcccagcagcccagctatgtaatcgcctctacaggccagcagcttcctacaggaggattctcaggctctggccctcccatctcccagcaggtcctccagccccctccctcaccacagggatttgtgcaacagcctccgcctgcacagatgcctgtatattattacccatctggtcagtaccctacctcaaccacgcaacagtaccggcccatggccccggttcagtacaacgctcagaggagtcaacagatgccacaggcagcacagcaagcaggttaccagccagtcttgtctggtcaacagggattccaaggcctaataggagtgcagcagccacctcagagtcagaacgtgataaataaccaacaaggaactccggtgcaaagcgtgatggtttcctacccaacaatgtcttcttatcaggtgccaatgacccagggttctcaaggactgccccagcagtcataccaacagccaatcatgctacctaaccaggcaggtcaagggtcactcccagccactggaatgcctgtttactgtaatgtcacaccgcccacccctcagaacaaccttaggctgattggcccacactgcccctccagcactgtcccagtgatgtcagctagctgcagaacaaactgtgcaagtatgagcaatgctggttggcaggtcaaattctgagagctctggctgtggtacatttcttcagatatttctcatggcctttgatggaagaggaacaaggtgggaaaactggctgaggacttaagtattcactcaacactcaaatgattgctgctggtattctgtaaaaaataaacaaagactaatatacacgttagctggttaatggtgcatatttctgtcatgtctgctaggtatgcctttatagcttagctagtgacatgaattcatcaaggtaagattttctcctaccactgaataccactgtgtagattataatatccctaatttggattagttttgtactttgtgttgagtttgtgatgctaaaagtatttaaaaattatatactaaatcacattgtaccaaagctgtaatggaaaagcaaagaagaattgatgaattgaaggaataatttatatacatt

SEQ ID NO: 113868 - DNA, 574 bp, Homo sapiens
  Payload ID: 2235
  Gene Symbol: ARPP21
  Gene Name: cAMP-regulated phosphoprotein, 21kDa
  ENST ID: ENST00000432450
  CDS Start-End: 271-574
gagacaggtggagctggatcaagctgtgaacgtgatttgctggaagctggtcattagtgttgacgatgtgtcacactgtgtaagggaatcgcatggagatgggcattccgaactgttaatggggacatgggactccagttgtctctgatcacttgtgtggattttcctggcgtagaacgacagaagccgctagtaagtcgccaagacctacagcaggaattctgcaccaaagggcataaaatcttgttattttaatttgcatctgggagaatgtctgagcaaggagacctgaatcaggcaatagcagaggaaggagggactgagcaggagacggccactccagagaacggcattgttaaatcagaaagtctggatgaagaggagaaactggaactgcagaggcggctggaggctcagaatcaagaaagaagaaaatccaagtcaggagcaggaaaaggtaaactgactcgcagccttgctgtctgtgaggaatcttctgccagaccaggaggtgaaagtcttcaggatcaggtatatccccttgccattatcattaattgcatgaatgggatcc

SEQ ID NO: 113869 - DNA, 3150 bp, Homo sapiens
  Payload ID: 2235
  Gene Symbol: ARPP21
  Gene Name: cAMP-regulated phosphoprotein, 21kDa
  Uniprot ID: Q9UBL0
  ENST ID: ENST00000428373
  CDS Start-End: 1023-1292
gggtgggactggcagagctacggacaggtgggagcagtcagacagcctgagagagggagaccagaacgcaaagagagcgagagcattaagtaggcagggagaggcacacagaaagatagacagcaacactcgcgtgctccctccctccacacgccctcctcttaccgagcgaagcggccaggggcacagagtgggagaggactgtgggcacagaagaccggaagagggacgctgcattgctggtgggacggagggattcggacggacggacagaccagcgcacagactggcagcctgcgagagtggcagctttgagagcagagcgcagcaaagcgagaatcccgcgccgagctgctagtcggacccacagacggtcggactgacagacgtgcagacggacagaagagcagacaggaggcgggggcgcgttcactcccggcggccagccggccagagaaggcggcggtggcaccttctgagcgcgtccggagcagagaccagcagcagcaggggcagcggggacacaagccgcgaccgagccgccgccgcagccctggctgccacagctgtgtgggatcccagccgacactgcagaaagctccttttactagcagttaaataaatcgaccaaaaacaaaacaaacaaacaaacccaacaacaacaacaacaacaaaagccaagccaaaagccaaaacaaacaaatccagccaaatcaatcattgagaaacaataatattaataaaatccaaaactaaatcaaaccaatcaaggcaccaagacgcaggggggatatccacagttcgatcaaggttgacgatgtgtcacactgtgtaagggaatcgcatggagatgggcattccgaactgttaatggggacatgggactccagttgtctctgatcacttgtgtggattttcctggcgtagaacgacagaagccgctagtaagtcgccaagacctacagcaggaattctgcaccaaagggcataaaatcttgttattttaatttgcatctgggagaatgtctgagcaaggagacctgaatcaggcaatagcagaggaaggagggactgagcaggagacggccactccagagaacggcattgttaaatcagaaagtctggatgaagaggagaaactggaactgcagaggcggctggaggctcagaatcaagaaagaagaaaatccaagtcaggagcaggaaaaggtaaactgactcgcagccttgctgtctgtgaggaatcttctgccagaccaggaggtgaaagtcttcaggatcagactctctgaaaactgcaaatggaaaggaattcaaaagaatttagattaaaagttaaataaaaagtaggcacagtagtgctgaattttcctcaaaggctctcttttgataaggctgaaccaaatataatcccaagtatcctctctccttccttgttggagatgtcttacctctcagctccccaaaatgcacttgcctataagaaacacaattgctggttcatatgaaacttaggaaatagtgaataaggtgcatttaactttggagaaatacttttatggctttggtggagatttctcaatactgcaaaagttgtccagaaatgaatctgagctgatggtgactttaagttaatattattaatatatcactgcatatttttacccttatttttgctccttacagcaagattagtaggttataaaaatttaaatttaaacaaaattatttcatgacaaaatgggaaacttcacatcatacttatttttgtttgcctttcaggcatcatattagcttttataaaaaatggtcttgctgctgaaattgtacttattttatcagaggctgggtgcagtcaagacaaaagtaaaatggtttacctgagcccaggggagggaaaattgattaagatatcattatttttgtttggtttggttttgcttttttcctcttactttaattgaaatactctgaattcccctcatggaaacagagagcattgagagcactttctttaaaaggaccaaaaataaattcctaatagattttgtcctaagagagtgtttttttttctagcatcattttctttacatgccactcatgtcataaggcatggacaggctatctttcagtggccattactatgtttcgtacacatgctttattttacttgggctctgagaaatgtgtggctttccttcagcattttatttgtgcttctctttttaatggagattgaaaagggagaataatgtgaatatcacggcttatattattaaatgttgattgatggcttgtaatgtactgcacacaatatatgttaactctgcagaatgacagaccctgggagaagtaatgccccagttgtcccccactcctaatgccaggcagagaaggacagcctttatagacttaatctgctttttgtcccatttgacaaggtaccaggaggaaattttttaagggatcaactgtatcacagtgcccactctggacctaagtctagtgtatccatacaattggtgcagagaaataaggtgtaaatggtgctttgttcctgctggttccaagctcagaaaccaagactagctttgtaggagagaatgagagcctgcaagcctctctttggattggctgaggagtggtgggagcagggggttgatagaaaacatccagacacacatataagcaagtggccgtgctacctttttagagaataaagaaacagacttttgagtttatatgcaatgccttcattaggtaccaccggcacttacaaaatgtgcggactgaatcccagagaacactggcagatgtatacagtatatggattgtatcgcttccccaatgtttgtaaattcacagtatttggaaaactgccttcattttccagtgtgggaaaaactcttgctacctgtattacttgatctcagacccatacctgatggttcagtctgtccttaagttaaaagaattttgcttttctaatgttatactatttacctgtcagtgtattactgcaacttgaatcactcttttactgttgttggatataaacttatcctgtaccaatgtatttattaacacttgtattttattattgagcatatcaataaaaatattaaaaaataacagattgttttttaccaa

SEQ ID NO: 113870 - DNA, 543 bp, Homo sapiens
  Payload ID: 2235
  Gene Symbol: ARPP21
  Gene Name: cAMP-regulated phosphoprotein, 21kDa
  ENST ID: ENST00000419330
  CDS Start-End: 415-543
acaatatacaaggtagccagaagtgaatatgattgagaattctcattagtgtgaggagacagtttgaagtccataaggttggaaattgcaaattaatcatttgtatataagtcagtttaattcagatctgctttgtgacaaggttaggagagaatgtggggcttaaaggtgatgtcgacaatgaaagccatttcttcttatggttgacgatgtgtcacactgtgtaagggaatcgcatggagatgggcattccgaactgttaatggggacatgggactccagttgtctctgatcacttgtgtggattttcctggcgtagaacgacagaagccgctagtaagtcgccaagacctacagcaggaattctgcaccaaagggcataaaatcttgttattttaatttgcatctgggagaatgtctgagcaaggagacctgaatcaggcaatagcagaggaaggagggactgagcaggagacggccactccagagaacggcattgttaaatcagaaagtctggatgaagaggagaaactggaactgcag

SEQ ID NO: 113871 - DNA, 715 bp, Homo sapiens
  Payload ID: 2235
  Gene Symbol: ARPP21
  Gene Name: cAMP-regulated phosphoprotein, 21kDa
  ENST ID: ENST00000414496
  CDS Start-End: 282-578
aataaaagaagcatgagggaagacagagcagtgcatggttatggatactggacaaggatatttggaaaggttgacgatgtgtcacactgtgtaagggaatcgcatggagatgggcattccgaactgttaatggggacatgggactccagttgtctctgatcacttgtgtggattttcctggcgtagaacgacagaagccgctagtaagtcgccaagacctacagcaggaattctgcaccaaagggcataaaatcttgttattttaatttgcatctgggagaatgtctgagcaaggagacctgaatcaggcaatagcagaggaaggagggactgagcaggagacggccactccagagaacggcattgttaaatcagaaagtctggatgaagaggagaaactggaactgcagaggcggctggaggctcagaatcaagaaagaagaaaatccaagtcaggagcaggaaaaggtaaactgactcgcagccttgctgtctgtgaggaatcttctgccagaccaggaggtgaaagtcttcaggatcagattgcagccaagaatacacggattctacaggcatagacttacacgagtttctgattaacacattaaagaataattccagggacaggatgatacttttgaaaatggagcaggaaattattgatttcattgctgacaacaataatcattataaaaagttccctcagatgtcatcg

SEQ ID NO: 113872 - DNA, 572 bp, Homo sapiens
  Payload ID: 2235
  Gene Symbol: ARPP21
  Gene Name: cAMP-regulated phosphoprotein, 21kDa
  Uniprot ID: Q9UBL0
  ENST ID: ENST00000474696
  CDS Start-End: 286-555
cattagagaagaagcaggcagcttgagacaggtggagctggatcaagctgtgaacgtgatttgctggaagctggttgacgatgtgtcacactgtgtaagggaatcgcatggagatgggcattccgaactgttaatggggacatgggactccagttgtctctgatcacttgtgtggattttcctggcgtagaacgacagaagccgctagtaagtcgccaagacctacagcaggaattctgcaccaaagggcataaaatcttgttattttaatttgcatctgggagaatgtctgagcaaggagacctgaatcaggcaatagcagaggaaggagggactgagcaggagacggccactccagagaacggcattgttaaatcagaaagtctggatgaagaggagaaactggaactgcagaggcggctggaggctcagaatcaagaaagaagaaaatccaagtcaggagcaggaaaaggtaaactgactcgcagccttgctgtctgtgaggaatcttctgccagaccaggaggtgaaagtcttcaggatcagactctctgaaaactgcaaatggaaag

SEQ ID NO: 113873 - DNA, 2821 bp, Homo sapiens
  Payload ID: 2236
  Gene Symbol: CAGE1
  Gene Name: cancer antigen 1
  Uniprot ID: Q8TC20
  ENST ID: ENST00000296742
  CDS Start-End: 722-2647
tggatgttctgtgctctcaggaaggcgtgttgagtagccggcacggcgaggcccgtgctggccgtttcttcccggagttttcgtttctgtaccccactttgtgtttactgcggcaggaggcgccagctagcccacaggctgttcggcctagggggtcgtaccttcctaacttcaccactctctgggaagacaccgcacccacagtagggtcgctcgggcctcgcgggctgcacctgtctctgcggagttcccccggcgcgggcggacgtcacacaggggcgttccagcactccgggagcccgattgcgagtttgtgagagtccttggtggaggaggttggaaagcgttctccctcccacaaaacccggtgcagagggagggagagccaggtccgtagcgtgggtccaagaaactatggatcctggaagtgagcacacttttgtgtcttaaaaagtttggtgtctcgttttgaggtgaaaaatgaatgagataagtgctttttaaaaagaacgaaataaagaattttgaaagggaaaatgagtatgaatccacactttgtgaagatgcttatggcacactagacaatttgttaaatgataacaacattgaaaattactcaacgaatgcactaattcagccagttgacaccatcagcatatcttccttgagacaatttgaaaccgtttgcaaatttcactgggtagaagcatttgatgatgaaatgacagagaagccagaatttcaaagtcaagtgtataattatgcaaaagacaacaatataaagcaagactcatttaaggaagaaaatccaatggaaactagtgtttctgcaaatacagaccaacttggtaacgagtattttagacagcctcctcctagaagcccgcctctaatccactgcagtggagagatgctgaaatttacagaaaagtcactggctaaaagtattgccaaggaatctgccctcaaccctagccaacctccaagcttcttatgtaagactgcagttccttcaaaagaaatacagaattatggggagattcctgagatgtcagtcagttatgaaaaggaagtcacagcagagggtgtggagaggccagaaattgtctcaacttggtcttcggcaggcatttcctggaggagtgaagcatgtcgggagaactgtgagatgcctgactgggagcaaagtgctgaaagcttacaacctgttcaagaggacatggctttaaatgaagtcttgcagaaattaaaacatactaacagaaagcaggaagtgcgaatccaagaactccagtgtagtaacctgtatttagagaagagggttaaagaactacagatgaagattaccaaacagcaagtgttcattgatgtcatcaataagctaaaggagaatgttgaagaattaattgaagacaaatacaaaataatcctagagaagaatgatactaaaaagacattgcagaatttggaagaggttttagctaacacgcaaaaacatcttcaggaatccaggaatgacaaggaaatgttacagcttcaatttaagaagatcaaggctaattatgtgtgtttacaggaaaggtacatgactgaaatgcaacaaaaaaataaatctgtaagtcagtatttagagatggacaaaaccttaagcaagaaagaagaagaggtagagagactacaacaactcaaaaaagaactggaaaaggccacagcttctgctttggacttgttgaaacgggaaaaagaggcccaagaacaagagttcttgtctttacaggaggaattccagaaacttgaaaaggaaaacctggaagaaagacagaaactgaaatctagacttgagaaattgctcactcaagttagaaatttgcaatttatgtctgaaaatgaaagaacgaagaatataaaacttcagcagcaaatcaacgaagtaaaaaatgagaatgcaaaacttaaacagcaggttgcaaggagtgaagagcaaaattatgtccctaaatttgagacagctcagttaaaggatcaattagaggaagtcttgaagtcagatattaccaaggatacaaaaacgacacattctaatctgctcccggattgctcaccttgtgaagagaggctgaatcctgcagatataaaaagagcttctcagctggcctccaaaatgcacagtcttctggctctgatggtgggacttctcacatgccaggacatcatcaattctgatgctgaacatttcaaagagagtgagaaggttagtgatataatgctgcaaaaactgaagagcctccatcttaaaaagaaaactttagataaagaggtcatagactgtgattcagatgaagccaagagtatcagagatgtacctacccttctgggagccaaactggataagtaccacagtctaaatgaggagcttgatttcttggttacatcatatgaagaaatcattgaatgtgctgaccaaaggcttgcaatatcccactcccagattgcacatttggaagagagaaataaacatttagaggatttaattagaaagcccagagaaaaagccagaaaaccaagatcaaaaagcttagaaaatcatccgaagtccatgaccatgatgccagctctttttaaagaaaatagaaatgatttagattaaacaagcctgaagattaaacagtaatcatttttgtcaaccactccaggaagagtcattactacatatgctagccaaatcaatccatgcagatgatatattaaaatctgtataaagggtaaagtcttacattccaaagatgtgattacttttcttctaatttcttcctgtgaataa

SEQ ID NO: 113874 - DNA, 2771 bp, Homo sapiens
  Payload ID: 2236
  Gene Symbol: CAGE1
  Gene Name: cancer antigen 1
  Uniprot ID: Q8TC20
  ENST ID: ENST00000338150
  CDS Start-End: 229-2703
ttgcgagtttgtgagagtccttggtggaggaggttggaaagcgttctccctcccacaaaacccggtgcagagggagggagagccaggtccgtagcgtgggtccaagaaactatggatcctggaagtgagcacacttttgtgtcttaaaaagtttggtgtctcgttttgaggtgaaaaatgaatgagataagtgctttttaaaaagaagtcttctattgttcaacagttatgaacaaggactatcaaaaattttggtcatcaccttcagatcctgtacattttgaagtggatacttctcatgaaaaagtagaaagcatgtcagaatcggataccatgaatgtcagcaatctttctcaaggtgtaatgctttcacattctccaatctgtatggaaaccaccggcaccacttgtgacttgcctcagaacgaaataaagaattttgaaagggaaaatgagtatgaatccacactttgtgaagatgcttatggcacactagacaatttgttaaatgataacaacattgaaaattactcaacgaatgcactaattcagccagttgacaccatcagcatatcttccttgagacaatttgaaaccgtttgcaaatttcactgggtagaagcatttgatgatgaaatgacagagaagccagaatttcaaagtcaagtgtataattatgcaaaagacaacaatataaagcaagactcatttaaggaagaaaatccaatggaaactagtgtttctgcaaatacagaccaacttggtaacgagtattttagacagcctcctcctagaagcccgcctctaatccactgcagtggagagatgctgaaatttacagaaaagtcactggctaaaagtattgccaaggaatctgccctcaaccctagccaacctccaagcttcttatgtaagactgcagttccttcaaaagaaatacagaattatggggagattcctgagatgtcagtcagttatgaaaaggaagtcacagcagagggtgtggagaggccagaaattgtctcaacttggtcttcggcaggcatttcctggaggagtgaagcatgtcgggagaactgtgagatgcctgactgggagcaaagtgctgaaagcttacaacctgttcaagaggacatggctttaaatgaagtcttgcagaaattaaaacatactaacagaaagcaggaagtgcgaatccaagaactccagtgtagtaacctgtatttagagaagagggttaaagaactacagatgaagattaccaaacagcaagtgttcattgatgtcatcaataagctaaaggagaatgttgaagaattaattgaagacaaatacaaaataatcctagagaagaatgatactaaaaagacattgcagaatttggaagaggttttagctaacacgcaaaaacatcttcaggaatccaggaatgacaaggaaatgttacagcttcaatttaagaagatcaaggctaattatgtgtgtttacaggaaaggtacatgactgaaatgcaacaaaaaaataaatctgtaagtcagtatttagagatggacaaaaccttaagcaagaaagaagaagaggtagagagactacaacaactcaaaaaagaactggaaaaggccacagcttctgctttggacttgttgaaacgggaaaaagaggcccaagaacaagagttcttgtctttacaggaggaattccagaaacttgaaaaggaaaacctggaagaaagacagaaactgaaatctagacttgagaaattgctcactcaagttagaaatttgcaatttatgtctgaaaatgaaagaacgaagaatataaaacttcagcagcaaatcaacgaagtaaaaaatgagaatgcaaaacttaaacagcaggttgcaaggagtgaagagcaaaattatgtccctaaatttgagacagctcagttaaaggatcaattagaggaagtcttgaagtcagatattaccaaggatacaaaaacgacacattctaatctgctcccggattgctcaccttgtgaagagaggctgaatcctgcagatataaaaagagcttctcagctggcctccaaaatgcacagtcttctggctctgatggtgggacttctcacatgccaggacatcatcaattctgatgctgaacatttcaaagagagtgagaaggttagtgatataatgctgcaaaaactgaagagcctccatcttaaaaagaaaactttagataaagagctactgaaacataaagatagaatcacaacctttagagagttaattgctaaggaaaaagcatttcaagatcatgctattaaggtcatagactgtgattcagatgaagccaagagtatcagagatgtacctacccttctgggagccaaactggataagtaccacagtctaaatgaggagcttgatttcttggttacatcatatgaagaaatcattgaatgtgctgaccaaaggcttgcaatatcccactcccagattgcacatttggaagagagaaataaacatttagaggatttaattagaaagcccagagaaaaagccagaaaaccaagatcaaaaagcttagaaaatcatccgaagtccatgaccatgttggcatataacttgtacatatttataggatacaggctgggcgcggtggctgacgcctgtaatcccagcactttgggaggccgaggcgggtggatcacttgagttcaggagttcaagaccagcctgaccaacatggggaaccctcgtctctattaaaaatacagaaaatt

SEQ ID NO: 113875 - DNA, 2877 bp, Homo sapiens
  Payload ID: 2236
  Gene Symbol: CAGE1
  Gene Name: cancer antigen 1
  ENST ID: ENST00000379918
  CDS Start-End: 225-2678
gagtttgtgagagtccttggtggaggaggttggaaagcgttctccctcccacaaaacccggtgcagagggagggagagccaggtccgtagcgtgggtccaagaaactatggatcctggaagtgagcacacttttgtgtcttaaaaagtttggtgtctcgttttgaggtgaaaaatgaatgagataagtgctttttaaaaagaagtcttctattgttcaacagttatgaacaaggactatcaaaaattttggtcatcaccttcagatcctgtacattttgaagtggatacttctcatgaaaaagtagaaagcatgtcagaatcggataccatgaatgtcagcaatctttctcaaggtgtaatgctttcacattctccaatctgtatggaaaccaccggcaccacttgtgacttgcctcagaacgaaataaagaattttgaaagggaaaatgagtatgaatccacactttgtgaagatgcttatggcacactagacaatttgttaaatgataacaacattgaaaattactcaacgaatgcactaattcagccagttgacaccatcagcatatcttccttgagacaatttgaaaccgtttgcaaatttcactgggtagaagcatttgatgatgaaatgacagagaagccagaatttcaaagtcaagtgtataattatgcaaaagacaacaatataaagcaagactcatttaaggaagaaaatccaatggaaactagtgtttctgcaaatacagaccaacttggtaacgagtattttagacagcctcctcctagaagcccgcctctaatccactgcagtggagagatgctgaaatttacagaaaagtcactggctaaaagtattgccaaggaatctgccctcaaccctagccaacctccaagcttcttatgtaagactgcagttccttcaaaagaaatacagaattatggggagattcctgagatgtcagtcagttatgaaaaggaagtcacagcagagggtgtggagaggccagaaattgtctcaacttggtcttcggcaggcatttcctggaggagtgaagcatgtcgggagaactgtgagatgcctgactgggagcaaagtgctgaaagcttacaacctgttcaagaggacatggctttaaatgaagtcttgcagaaattaaaacatactaacagaaagcaggaagtgcgaatccaagaactccagtgtagtaacctgtatttagagaagagggttaaagaactacagatgaagattaccaaacagcaagtgttcattgatgtcatcaataagctaaaggagaatgttgaagaattaattgaagacaaatacaaaataatcctagagaagaatgatactaaaaagacattgcagaatttggaagaggttttagctaacacgcaaaaacatcttcaggaatccaggaatgacaaggaaatgttacagcttcaatttaagaagatcaaggctaattatgtgtgtttacaggaaaggtacatgactgaaatgcaacaaaaaaataaatctgtaagtcagtatttagagatggacaaaaccttaagcaagaaagaagaagaggtagagagactacaacaactcaaaaaagaactggaaaaggccacagcttctgctttggacttgttgaaacgggaaaaagaggcccaagaacaagagttcttgtctttacaggaggaattccagaaacttgaaaaggaaaacctggaagaaagacagaaactgaaatctagacttgagaaattgctcactcaagttagaaatttgcaatttatgtctgaaaatgaaagaacgaagaatataaaacttcagcagcaaatcaacgaagtaaaaaatgagaatgcaaaacttaaacagcaggttgcaaggagtgaagagcaaaattatgtccctaaatttgagacagctcagttaaaggatcaattagaggaagtcttgaagtcagatattaccaaggatacaaaaacgacacattctaatctgctcccggattgctcaccttgtgaagagaggctgaatcctgcagatataaaaagagcttctcagctggcctccaaaatgcacagtcttctggctctgatggtgggacttctcacatgccaggacatcatcaattctgatgctgaacatttcaaagagagtgagaagctactgaaacataaagatagaatcacaacctttagagagttaattgctaaggaaaaagcatttcaagatcatgctattaaggtcatagactgtgattcagatgaagccaagagtatcagagatgtacctacccttctgggagccaaactggataagtaccacagtctaaatgaggagcttgatttcttgatcacaaaactgggacatctcctagagtcaaaagaaaaccactgcaacagactcattgaagaaaatgacaagtatcaaagacatttaggcaacttaataaagaaggttacatcatatgaagaaatcattgaatgtgctgaccaaaggcttgcaatatcccactcccagattgcacatttggaagagagaaataaacatttagaggatttaattagaaagcccagagaaaaagccagaaaaccaagatcaaaaagcttagaaaatcatccgaagtccatgaccatgatgccagctctttttaaagaaaatagaaatgatttagattaaacaagcctgaagattaaacagtaatcatttttgtcaaccactccaggaagagtcattactacatatgctagccaaatcaatccatgcagatgatatattaaaatctgtataaagggtaaagtcttacattccaaagatgtgattacttttcttctaatttcttcctgtgaataatcaaatatattctatttaacataaa

SEQ ID NO: 113876 - DNA, 2989 bp, Homo sapiens
  Payload ID: 2236
  Gene Symbol: CAGE1
  Gene Name: cancer antigen 1
  Uniprot ID: Q8TC20
  ENST ID: ENST00000458291
  CDS Start-End: 213-2315
gtccttggtggaggaggttggaaagcgttctccctcccacaaaacccggtgcagagggagggagagccaggtccgtagcgtgggtccaagaaactatggatcctggaagtgagcacacttttgtgtcttaaaaagtttggtgtctcgttttgaggtgaaaaatgaatgagataagtgctttttaaaaagaagtcttctattgttcaacagttatgaacaaggactatcaaaaattttggtcatcaccttcagatcctgtacattttgaagtggatacttctcatgaaaaagtagaaagcatgtcagaatcggataccatgaatgtcagcaatctttctcaaggtgtaatgctttcacattctccaatctgtatggaaaccaccggcaccacttgtgacttgcctcagaacgaaataaagaattttgaaagggaaaatgagtatgaatccacactttgtgaagatgcttatggcacactagacaatttgttaaatgataacaacattgaaaattactcaacgaatgcactaattcagccagttgacaccatcagcatatcttccttgagacaatttgaaaccgtttgcaaatttcactgggtagaagcatttgatgatgaaatgacagagaagccagaatttcaaagtcaagtgtataattatgcaaaagacaacaatataaagcaagactcatttaaggaagaaaatccaatggaaactagtgtttctgcaaatacagaccaacttggtaacgagtattttagacagcctcctcctagaagcccgcctctaatccactgcagtggagagatgctgaaatttacagaaaagtcactggctaaaagtattgccaaggaatctgccctcaaccctagccaacctccaagcttcttatgtaagactgcagttccttcaaaagaaatacagaattatggggagattcctgagatgtcagtcagttatgaaaaggaagtcacagcagagggtgtggagaggccagaaattgtctcaacttggtcttcggcaggcatttcctggaggagtgaagcatgtcgggagaactgtgagatgcctgactgggagcaaagtgctgaaagcttacaacctgttcaagaggacatggctttaaatgaagtcttgcagaaattaaaacatactaacagaaagcaggaagtgcgaatccaagaactccagtgtagtaacctgtatttagagaagagggttaaagaactacagatgaagattaccaaacagcaagtgttcattgatgtcatcaataagctaaaggagaatgttgaagaattaattgaagacaaatacaaaataatcctagagaagaatgatactaaaaagacattgcagaatttggaagaggttttagctaacacgcaaaaacatcttcaggaatccaggaatgacaaggaaatgttacagcttcaatttaagaagatcaaggctaattatgtgtgtttacaggaaaggtacatgactgaaatgcaacaaaaaaataaatctgtaagtcagtatttagagatggacaaaaccttaagcaagaaagaagaagaggtagagagactacaacaactcaaaaaagaactggaaaaggccacagcttctgctttggacttgttgaaacgggaaaaagaggcccaagaacaagagttcttgtctttacaggaggaattccagaaacttgaaaaggaaaacctggaagaaagacagaaactgaaatctagacttgagaaattgctcactcaagttagaaatttgcaatttatgtctgaaaatgaaagaacgaagaatataaaacttcagcagcaaatcaacgaagtaaaaaatgagaatgcaaaacttaaacagcaggttgcaaggagtgaagagcaaaattatgtccctaaatttgagacagctcagttaaaggatcaattagaggaagtcttgaagtcagatattaccaaggatacaaaaacgacacattctaatctgctcccggattgctcaccttgtgaagagaggctgaatcctgcagatataaaaagagcttctcagctggcctccaaaatgcacagtcttctggctctgatggtgggacttctcacatgccaggacatcatcaattctgatgctgaacatttcaaagagagtgagaaggttagtgatataatgctgcaaaaactgaagagcctccatcttaaaaagaaaactttagataaagagctactgaaacataaagatagaatcacaacctttagagagttaattgctaaggaaaaagcatttcaagatcatgctattaaggtattccaaggagtatgaaatgattgaaagtgagaacaaatatatttaatctcaggtcatagactgtgattcagatgaagccaagagtatcagagatgtacctacccttctgggagccaaactggataagtaccacagtctaaatgaggagcttgatttcttgatcacaaaactgggacatctcctagagtcaaaagaaaaccactgcaacagactcattgaagaaaatgacaagtatcaaagacatttaggcaacttaataaagaaggttacatcatatgaagaaatcattgaatgtgctgaccaaaggcttgcaatatcccactcccagattgcacatttggaagagagaaataaacatttagaggatttaattagaaagcccagagaaaaagccagaaaaccaagatcaaaaagcttagaaaatcatccgaagtccatgaccatgatgccagctctttttaaagaaaatagaaatgatttagattaaacaagcctgaagattaaacagtaatcatttttgtcaaccactccaggaagagtcattactacatatgctagccaaatcaatccatgcagatgatatattaaaatctgtataaagggtaaagtcttacattccaaagatgtgattacttttcttctaatttcttcctgtgaataatcaaatatattctatttaacataaacag

SEQ ID NO: 113877 - DNA, 2832 bp, Homo sapiens
  Payload ID: 2236
  Gene Symbol: CAGE1
  Gene Name: cancer antigen 1
  ENST ID: ENST00000442019
  CDS Start-End: 202-930
gtttgtgagagtccttggtggaggaggttggaaagcgttctccctcccacaaaacccggtgcagagggagggagagccaggtccgtagcgtgggtccaagaaactatggatcctggaagtgagcacacttttgtgtcttaaaaagtttggtgtctcgttttgaggtgaaaaatgaatgagataagtgctttttaaaaagttatgaacaaggactatcaaaaattttggtcatcaccttcagatcctgtacattttgaagtggatacttctcatgaaaaagtagaaagcatgtcagaatcggataccatgaatgtcagcaatctttctcaaggtgtaatgctttcacattctccaatctgtatggaaaccaccggcaccacttgtgacttgcctcagaacgaaataaagaattttgaaagggaaaatgagtatgaatccacactttgtgaagatgcttatggcacactagacaatttgttaaatgataacaacattgaaaattactcaacgaatgcactaattcagccagttgacaccatcagcatatcttccttgagacaatttgaaaccgtttgcaaatttcactgggtagaagcatttgatgatgaaatgacagagaagccagaatttcaaagtcaagtgtataattatgcaaaagacaacaatataaagcaagactcatttaaggaagaaaatccaatggaaactagtgtttctgcaaatacagaccaacttggtaacgagtattttagacagcctcctcctagaagcccgcctctaatccactgcagtggagagatgctgaaatttacagaaaagtcactggctaaaagtattgccaaggaatctgccctcaaccctagccaacctccaagcttcttatactgcagttccttcaaaagaaatacagaattatggggagattcctgagatgtcagtcagttatgaaaaggaagtcacagcagagggtgtggagaggccagaaattgtctcaacttggtcttcggcaggcatttcctggaggagtgaagcatgtcgggagaactgtgagatgcctgactgggagcaaagtgctgaaagcttacaacctgttcaagaggacatggctttaaatgaagtcttgcagaaattaaaacatactaacagaaagcaggaagtgcgaatccaagaactccagtgtagtaacctgtatttagagaagagggttaaagaactacagatgaagattaccaaacagcaagtgttcattgatgtcatcaataagctaaaggagaatgttgaagaattaattgaagacaaatacaaaataatcctagagaagaatgatactaaaaagacattgcagaatttggaagaggttttagctaacacgcaaaaacatcttcaggaatccaggaatgacaaggaaatgttacagcttcaatttaagaagatcaaggctaattatgtgtgtttacaggaaaggtacatgactgaaatgcaacaaaaaaataaatctgtaagtcagtatttagagatggacaaaaccttaagcaagaaagaagaagaggtagagagactacaacaactcaaaaaagaactggaaaaggccacagcttctgctttggacttgttgaaacgggaaaaagaggcccaagaacaagagttcttgtctttacaggaggaattccagaaacttgaaaaggaaaacctggaagaaagacagaaactgaaatctagacttgagaaattgctcactcaagttagaaatttgcaatttatgtctgaaaatgaaagaacgaagaatataaaacttcagcagcaaatcaacgaagtaaaaaatgagaatgcaaaacttaaacagcaggttgcaaggagtgaagagcaaaattatgtccctaaatttgagacagctcagttaaaggatcaattagaggaagtcttgaagtcagatattaccaaggatacaaaaacgacacattctaatctgctcccggattgctcaccttgtgaagagaggctgaatcctgcagatataaaaagagcttctcagctggcctccaaaatgcacagtcttctggctctgatggtgggacttctcacatgccaggacatcatcaattctgatgctgaacatttcaaagagagtgagaaggttagtgatataatgctgcaaaaactgaagagcctccatcttaaaaagaaaactttagataaagagctactgaaacataaagatagaatcacaacctttagagagttaattgctaaggaaaaagcatttcaagatcatgctattaaggtcatagactgtgattcagatgaagccaagagtatcagagatgtacctacccttctgggagccaaactggataagtaccacagtctaaatgaggagcttgatttcttgatcacaaaactgggacatctcctagagtcaaaagaaaaccactgcaacagactcattgaagaaaatgacaagtatcaaagacatttaggcaacttaataaagaaggttacatcatatgaagaaatcattgaatgtgctgaccaaaggcttgcaatatcccactcccagattgcacatttggaagagagaaataaacatttagaggatttaattagaaagcccagagaaaaagccagaaaaccaagatcaaaaagcttagaaaatcatccgaagtccatgaccatgatgccagctctttttaaagaaaatagaaatgatttagattaaacaagcctgaagattaaacagtaatcatttttgtcaaccactccaggaagagtcattactacatatgctagccaaatcaatccatgcagatgatatattaaaatctgtataaaggg

SEQ ID NO: 113878 - DNA, 1781 bp, Homo sapiens
  Payload ID: 2236
  Gene Symbol: CAGE1
  Gene Name: cancer antigen 1
  ENST ID: ENST00000512691
  CDS Start-End: 108-1781
gagtttgtgagagtccttggtggaggaggttggaaagcgttctccctcccacaaaacccggtgcagagggagggagagccaggtccgtagcgtgggtccaagaaactatggatcctggaaaagtcttctattgttcaacagttatgaacaaggactatcaaaaattttggtcatcaccttcagatcctgtacattttgaagtggatacttctcatgaaaaagtagaaagcatgtcagaatcggataccatgaatgtcagcaatctttctcaaggtgtaatgctttcacattctccaatctgtatggaaaccaccggcaccacttgtgacttgcctcagaacgaaataaagaattttgaaagggaaaatgagtatgaatccacactttgtgaagatgcttatggcacactagacaatttgttaaatgataacaacattgaaaattactcaacgaatgcactaattcagccagttgacaccatcagcatatcttccttgagacaatttgaaaccgtttgcaaatttcactgggtagaagcatttgatgatgaaatgacagagaagccagaatttcaaagtcaagtgtataattatgcaaaagacaacaatataaagcaagactcatttaaggaagaaaatccaatggaaactagtgtttctgcaaatacagaccaacttggtaacgagtattttagacagcctcctcctagaagcccgcctctaatccactgcagtggagagatgctgaaatttacagaaaagtcactggctaaaagtattgccaaggaatctgccctcaaccctagccaacctccaagcttcttatgtaagactgcagttccttcaaaagaaatacagaattatggggagattcctgagatgtcagtcagttatgaaaaggaagtcacagcagagggtgtggagaggccagaaattgtctcaacttggtcttcggcaggcatttcctggaggagtgaagcatgtcgggagaactgtgagatgcctgactgggagcaaagtgctgaaagcttacaacctgttcaagaggacatggctttaaatgaagtcttgcagaaattaaaacatactaacagaaagcaggaagtgcgaatccaagaactccagtgtagtaacctgtatttagagaagagggttaaagaactacagatgaagattaccaaacagcaagtgttcattgatgtcatcaataagctaaaggagaatgttgaagaattaattgaagacaaatacaaaataatcctagagaagaatgatactaaaaagacattgcagaatttggaagaggttttagctaacacgcaaaaacatcttcaggaatccaggaatgacaaggaaatgttacagcttcaatttaagaagatcaaggctaattatgtgtgtttacaggaaaggtacatgactgaaatgcaacaaaaaaataaatctgtaagtcagtatttagagatggacaaaaccttaagcaagaaagaagaagaggtagagagactacaacaactcaaaaaagaactggaaaaggccacagcttctgctttggacttgttgaaacgggaaaaagaggcccaagaacaagagttcttgtctttacaggaggaattccagaaacttgaaaaggaaaacctggaagaaagacagaaactgaaatctagacttgagaaattgctcactcaagttagaaatttgcaatttatgtctgaaaatgaaagaacgaagaatataaaacttcagcagcaaatcaacgaagtaaaaaatgagaatgcaaaa

SEQ ID NO: 113879 - DNA, 3284 bp, Homo sapiens
  Payload ID: 2236
  Gene Symbol: CAGE1
  Gene Name: cancer antigen 1
  Uniprot ID: Q8TC20
  ENST ID: ENST00000502583
  CDS Start-End: 566-3085
cggagctctctggatggcgcgctgtatagggctgtggatgttctgtgctctcaggaaggcgtgttgagtagccggcacggcgaggcccgtgctggccgtttcttcccggagttttcgtttctgtaccccactttgtgtttactgcggcaggaggcgccagctagcccacaggctgttcggcctagggggtcgtaccttcctaacttcaccactctctgggaagacaccgcacccacagtagggtcgctcgggcctcgcgggctgcacctgtctctgcggagttcccccggcgcgggcggacgtcacacaggggcgttccagcactccgggagcccgattgcgagtttgtgagagtccttggtggaggaggttggaaagcgttctccctcccacaaaacccggtgcagagggagggagagccaggtccgtagcgtgggtccaagaaactatggatcctggaagtgagcacacttttgtgtcttaaaaagtttggtgtctcgttttgaggtgaaaaatgaatgagataagtgctttttaaaaagaagtcttctattgttcaacagttatgaacaaggactatcaaaaattttggtcatcaccttcagatcctgtacattttgaagtggatacttctcatgaaaaagtagaaagcatgtcagaatcggataccatgaatgtcagcaatctttctcaaggtgtaatgctttcacattctccaatctgtatggaaaccaccggcaccacttgtgacttgcctcagaacgaaataaagaattttgaaagggaaaatgagtatgaatccacactttgtgaagatgcttatggcacactagacaatttgttaaatgataacaacattgaaaattactcaacgaatgcactaattcagccagttgacaccatcagcatatcttccttgagacaatttgaaaccgtttgcaaatttcactgggtagaagcatttgatgatgaaatgacagagaagccagaatttcaaagtcaagtgtataattatgcaaaagacaacaatataaagcaagactcatttaaggaagaaaatccaatggaaactagtgtttctgcaaatacagaccaacttggtaacgagtattttagacagcctcctcctagaagcccgcctctaatccactgcagtggagagatgctgaaatttacagaaaagtcactggctaaaagtattgccaaggaatctgccctcaaccctagccaacctccaagcttcttatgtaagactgcagttccttcaaaagaaatacagaattatggggagattcctgagatgtcagtcagttatgaaaaggaagtcacagcagagggtgtggagaggccagaaattgtctcaacttggtcttcggcaggcatttcctggaggagtgaagcatgtcgggagaactgtgagatgcctgactgggagcaaagtgctgaaagcttacaacctgttcaagaggacatggctttaaatgaagtcttgcagaaattaaaacatactaacagaaagcaggaagtgcgaatccaagaactccagtgtagtaacctgtatttagagaagagggttaaagaactacagatgaagattaccaaacagcaagtgttcattgatgtcatcaataagctaaaggagaatgttgaagaattaattgaagacaaatacaaaataatcctagagaagaatgatactaaaaagacattgcagaatttggaagaggttttagctaacacgcaaaaacatcttcaggaatccaggaatgacaaggaaatgttacagcttcaatttaagaagatcaaggctaattatgtgtgtttacaggaaaggtacatgactgaaatgcaacaaaaaaataaatctgtaagtcagtatttagagatggacaaaaccttaagcaagaaagaagaagaggtagagagactacaacaactcaaaaaagaactggaaaaggccacagcttctgctttggacttgttgaaacgggaaaaagaggcccaagaacaagagttcttgtctttacaggaggaattccagaaacttgaaaaggaaaacctggaagaaagacagaaactgaaatctagacttgagaaattgctcactcaagttagaaatttgcaatttatgtctgaaaatgaaagaacgaagaatataaaacttcagcagcaaatcaacgaagtaaaaaatgagaatgcaaaacttaaacagcaggttgcaaggagtgaagagcaaaattatgtccctaaatttgagacagctcagttaaaggatcaattagaggaagtcttgaagtcagatattaccaaggatacaaaaacgacacattctaatctgctcccggattgctcaccttgtgaagagaggctgaatcctgcagatataaaaagagcttctcagctggcctccaaaatgcacagtcttctggctctgatggtgggacttctcacatgccaggacatcatcaattctgatgctgaacatttcaaagagagtgagaaggttagtgatataatgctgcaaaaactgaagagcctccatcttaaaaagaaaactttagataaagagctactgaaacataaagatagaatcacaacctttagagagttaattgctaaggaaaaagcatttcaagatcatgctattaaggtcatagactgtgattcagatgaagccaagagtatcagagatgtacctacccttctgggagccaaactggataagtaccacagtctaaatgaggagcttgatttcttgatcacaaaactgggacatctcctagagtcaaaagaaaaccactgcaacagactcattgaagaaaatgacaagtatcaaagacatttaggcaacttaataaagaaggttacatcatatgaagaaatcattgaatgtgctgaccaaaggcttgcaatatcccactcccagattgcacatttggaagagagaaataaacatttagaggatttaattagaaagcccagagaaaaagccagaaaaccaagatcaaaaagcttagaaaatcatccgaagtccatgaccatgatgccagctctttttaaagaaaatagaaatgatttagattaaacaagcctgaagattaaacagtaatcatttttgtcaaccactccaggaagagtcattactacatatgctagccaaatcaatccatgcagatgatatattaaaatctgtataaagggtaaagtcttacattccaaagatgtgattacttttcttctaatttcttcctgtgaataatcaaatatattctatttaacataaa

SEQ ID NO: 113880 - DNA, 2537 bp, Homo sapiens
  Payload ID: 2236
  Gene Symbol: CAGE1
  Gene Name: cancer antigen 1
  Uniprot ID: Q8TC20
  ENST ID: ENST00000512086
  CDS Start-End: 204-2537
gagtttgtgagagtccttggtggaggaggttggaaagcgttctccctcccacaaaacccggtgcagagggagggagagccaggtccgtagcgtgggtccaagaaactatggatcctggaagtgagcacacttttgtgtcttaaaaagtttggtgtctcgttttgaggtgaaaaatgaatgagataagtgctttttaaaaagttatgaacaaggactatcaaaaattttggtcatcaccttcagatcctgtacattttgaagtggatacttctcatgaaaaagtagaaagcatgtcagaatcggataccatgaatgtcagcaatctttctcaaggtgtaatgctttcacattctccaatctgtatggaaaccaccggcaccacttgtgacttgcctcagaacgaaataaagaattttgaaagggaaaatgagtatgaatccacactttgtgaagatgcttatggcacactagacaatttgttaaatgataacaacattgaaaattactcaacgaatgcactaattcagccagttgacaccatcagcatatcttccttgagacaatttgaaaccgtttgcaaatttcactgggtagaagcatttgatgatgaaatgacagagaagccagaatttcaaagtcaagtgtataattatgcaaaagacaacaatataaagcaagactcatttaaggaagaaaatccaatggaaactagtgtttctgcaaatacagaccaacttggtaacgagtattttagacagcctcctcctagaagcccgcctctaatccactgcagtggagagatgctgaaatttacagaaaagtcactggctaaaagtattgccaaggaatctgccctcaaccctagccaacctccaagcttcttatgtaagactgcagttccttcaaaagaaatacagaattatggggagattcctgagatgtcagtcagttatgaaaaggaagtcacagcagagggtgtggagaggccagaaattgtctcaacttggtcttcggcaggcatttcctggaggagtgaagcatgtcgggagaactgtgagatgcctgactgggagcaaagtgctgaaagcttacaacctgttcaagaggacatggctttaaatgaagtcttgcagaaattaaaacatactaacagaaagcaggaagtgcgaatccaagaactccagtgtagtaacctgtatttagagaagagggttaaagaactacagatgaagattaccaaacagcaagtgttcattgatgtcatcaataagctaaaggagaatgttgaagaattaattgaagacaaatacaaaataatcctagagaagaatgatactaaaaagacattgcagaatttggaagaggttttagctaacacgcaaaaacatcttcaggaatccaggaatgacaaggaaatgttacagcttcaatttaagaagatcaaggctaattatgtgtgtttacaggaaaggtacatgactgaaatgcaacaaaaaaataaatctgtaagtcagtatttagagatggacaaaaccttaagcaagaaagaagaagaggtagagagactacaacaactcaaaaaagaactggaaaaggccacagcttctgctttggacttgttgaaacgggaaaaagaggcccaagaacaagagttcttgtctttacaggaggaattccagaaacttgaaaaggaaaacctggaagaaagacagaaactgaaatctagacttgagaaattgctcactcaagttagaaatttgcaatttatgtctgaaaatgaaagaacgaagaatataaaacttcagcagcaaatcaacgaagtaaaaaatgagaatgcaaaacttaaacagcaggttgcaaggagtgaagagcaaaattatgtccctaaatttgagacagctcagttaaaggatcaattagaggaagtcttgaagtcagatattaccaaggatacaaaaacgacacattctaatctgctcccggattgctcaccttgtgaagagaggctgaatcctgcagatataaaaagagcttctcagctggcctccaaaatgcacagtcttctggctctgatggtgggacttctcacatgccaggacatcatcaattctgatgctgaacatttcaaagagagtgagaaggttagtgatataatgctgcaaaaactgaagagcctccatcttaaaaagaaaactttagataaagaggtcatagactgtgattcagatgaagccaagagtatcagagatgtacctacccttctgggagccaaactggataagtaccacagtctaaatgaggagcttgatttcttggttacatcatatgaagaaatcattgaatgtgctgaccaaaggcttgcaatatcccactcccagattgcacatttggaagagagaaataaacatttagaggatttaattagaaagcccagagaaaaagccagaaaaccaagatcaaaaagcttagaaaatcatccgaagtccatgaccatgatgccagctctttttaaagaaaatagaaatgatttagattaa

SEQ ID NO: 113881 - DNA, 2361 bp, Homo sapiens
  Payload ID: 2237
  Gene Symbol: CASC1
  Gene Name: cancer susceptibility candidate 1
  Uniprot ID: Q6TDU7
  ENST ID: ENST00000320267
  CDS Start-End: 83-2233
gtcgtccgggcaacccgggagcgtttgtccacacaatttctgctccgactctgcggactactgcagtggagcttgactcttaatgtctggcagtaagaaaaagaaagtcaccaaagctgaacgattgaagctgctacaagaggaggaggagagacgactgaaagaggaagaggaagcccgtttgaaatatgagaaagaagaaatggaaaggcttgaaatacagcgaattgagaaagaaaaatggcatcgacttgaagcaaaagatctagaaaggagaaatgaagaacttgaagaactttatttattagagaggtgttttcctgaagcagagaaattgaaacaggaaactaaattgctttctcagtggaagcactacattcaatgtgatgggagtcctgatccttcagtagcccaagaaatgaacacgtttattagtttgtggaaagagaaaacaaatgagacttttgaggaagtgattgagaagagtaaagtagtgctaaatttaattgagaaattgaaatttattttactggaaactccaccatgtgatttgcaagataaaaatataatacagtaccaagaatcaatactacaactgcaggagctccttcatcttaaattcggtgtagccacagaaatacttctcaaacaagctagtactttggcagatctggacagtggaaatatggaaaaagtcattaaagatgaaaatgttactctgtatgtgtgggcaaacctcaagaagaatccaaggcacagaagtgttagattctctgaaacacaaattggatttgagattccaaggatattagcaacaagtgacattgctgtacgactcctgcatacccactatgatcatgtttctgcactgcaccctgtttcaacaccatcaaaagaatacacttctgcagtaactgagcttgtcaaagatgatgttaagaatgtagaaaaagcaatcagcaaggaggtcgaagaagagtccaaacaacaagaaagagggtctcacttaattcaggaggaagaaataaaagttgaggaggaacaaggtgatattgaagtgaaaatgagttctgctgaggaagaatctgaagccataaaatgtgaacgagagatgaaagtattaagtgaaactgtttcagcagcacagttgttgctggtagagaattcttctgaaaagccagatttctttgaagacaatgtggtggatttatgccagttcacaactctgggtggagtataccacttggatattttggagcttcctccacagtgtaaaccagtgaagggatggatgattgtggaaatactcaaagaaggattacagaaatacacatatcctccggaaactacagaagagtttgagacagaaaatgctttcccacctatagaggtcacacttgaggttcatgagaatgtaatcttttttgaggatcctgtggttgtaaggtgggatgctgaaggtaaacattggagaactgatggcatcagcaatgtatcctacaaaccaaaagaaagacttgtaacattcagcctggacacctttggccctgttaccttgattcaagatgctcatattaacatgccgtaccagtcatgggaactaagaccacttgatgtaaataaagtacttttaactgtgactacagtatttactgagattcaaatacaaattaaggaaaacctctgcatgttatcttcaatcaaactaaaagacaagaaacacatctctattttggaaggaacctggatgactcctattcctttcattattgctttgaaagaagctggactgaatatctttcctactagacactctcatttttatgttattataaacaataaggttcctttggtagaagtgaaagcttatcgacagatggccctactaagttctgcttttgcatttggttggagcaagtggaacctactatgtaattctacaaaagtcgtatttaaggtgagggaacaccttactgaagcatgtactgagaatcctaattgggcccttttaatgtttagtggtgacagagcacaaagactgaagatcaaggaagagagtgaggcattttctgaagcacttaaagaagaaactgagtttcattctactttatatcacatggtgaaggattttgcttctgaggaagcaatggagaaagtcaggagttccaactgtcagtttgtcaactctgtgtgccacatgctgctctctaccagattgctcagctactcctaacctccacttacaaactgtattgtaagtatgaagaaccaagcatggtgaaagacaggtatttctgcaacacaatgtaatgagtgaatgaatacatttcaaatcaactattaaaaattttctaatctgca

SEQ ID NO: 113882 - DNA, 2445 bp, Homo sapiens
  Payload ID: 2237
  Gene Symbol: CASC1
  Gene Name: cancer susceptibility candidate 1
  Uniprot ID: Q6TDU7
  ENST ID: ENST00000354189
  CDS Start-End: 37-2109
gcagtggagcttgactcttaatggtgagcaaggcaaatgaggcagacaggtggaggggcgaccactgattctgcttcaccagtgttaaataatgtaatcaagagccagtcatattttacagcgaagcgggtcggtttgggaaataactcataccttggggtgggtcggccctcttctcagcaatggctttccttacctggaccaggcggacagggtcccaaagcaaaaaagtctggcagtaagaaaaagaaagtcaccaaagctgaacgattgaagctgctacaagaggaggaggagagacgactgaaagaggaagaggaagcccgtttgaaatatgagaaagaagaaatggaaaggcttgaaatacagcgaattgagaaagaaaaatggcatcgacttgaagcaaaagatctagaaaggagaaatgaagaacttgaagaactttatttattagagaggtgttttcctgaagcagagaaattgaaacaggaaactaaattgctttctcagtggaagcactacattcaatgtgatgggagtcctgatccttcagtagcccaagaaatgaacacgtttattagtttgtggaaagagaaaacaaatgagacttttgaggaagtgattgagaagagtaaagtagtgctaaatttaattgagaaattgaaatttattttactggaaactccaccatgtgatttgcaagataaaaatataatacagtaccaagaatcaatactacaactgcaggagctccttcatcttaaattcggtgtagccacagaaatacttctcaaacaagctagtactttggcagatctggacagtggaaatatggaaaaagtcattaaagatgaaaatgttactctgtatgtgtgggcaaacctcaagaagaatccaaggcacagaagtgttagattctctgaaacacaaattggatttgagattccaaggatattagcaacaagtgacattgctgtacgactcctgcatacccactatgatcatgtttctgcactgcaccctgtttcaacaccatcaaaagaatacacttctgcagtaactgagcttgtcaaagatgatgttaagaatgtagaaaaagcaatcagcaaggaggtcgaagaagagtccaaacaacaagaaagagggtctcacttaattcaggaggaagaaataaaagttgaggaggaacaaggtgatattgaagtgaaaatgagttctgctgaggaagaatctgaagccataaaatgtgaacgagagatgaaagtattaagtgaaactgtttcagcagcacagttgttgctggtagagaattcttctgaaaagccagatttctttgaagacaatgtggtggatttatgccagttcacaactctgggtggagtataccacttggatattttggagcttcctccacagtgtaaaccagtgaagggatggatgattgtggaaatactcaaagaaggattacagaaatacacatatcctccggaaactacagaagagtttgagacagaaaatgctttcccacctatagaggtcacacttgaggttcatgagaatgtaatcttttttgaggatcctgtggttgtaaggtgggatgctgaaggtaaacattggagaactgatggcatcagcaatgtatcctacaaaccaaaagaaagacttgtaacattcagcctggacacctttggccctgttaccttgattcaagatgctcatattaacatgccgtaccagtcatgggaactaagaccacttgatgtaaataaagtacttttaactgtgactacagtatttactgagattcaaatacaaattaaggaaaacctctgcatgttatcttcaatcaaactaaaagacaagaaacacatctctattttggaaggaacctggatgactcctattcctttcattattgctttgaaagaagctggactgaatatctttcctactagacactctcatttttatgttattataaacaataaggttcctttggtagaagtgaaagcttatcgacagatggccctactaagttctgcttttgcatttggttggagcaagtggaacctactatgtaattctacaaaagtcgtatttaagtggtgacagagcacaaagactgaagatcaaggaagagagtgaggcattttctgaagcacttaaagaagaaactgagtttcattctactttatatcacatggtgaaggattttgcttctgaggaagcaatggagaaagtcaggagttccaactgtcagtttgtcaactctgtgtgccacatgctgctctctaccagattgctcagctactcctaacctccacttacaaactgtattgtaagtatgaagaaccaagcatggtgaaagacaggtatttctgcaacacaatgtaatgagtgaatgaatacatttcaaatcaactattaaaaattttctaatctgca

SEQ ID NO: 113883 - DNA, 2363 bp, Homo sapiens
  Payload ID: 2237
  Gene Symbol: CASC1
  Gene Name: cancer susceptibility candidate 1
  ENST ID: ENST00000395987
  CDS Start-End: 67-2235
gggagcgtttgtccacacaatttctgctccgactctgcggactactgcagtggagcttgactcttaatgggtcccaaagcaaaaaagtctggcagtaagaaaaagaaagtcaccaaagctgaacgattgaagctgctacaagaggaggaggagagacgactgaaagaggaagaggaagcccgtttgaaatatgagaaagaagaaatggaaaggcttgaaatacagcgaattgagaaagaaaaatggcatcgacttgaagcaaaagatctagaaaggagaaatgaagaacttgaagaactttatttattagagaggtgttttcctgaagcagagaaattgaaacaggaaactaaattgctttctcagtggaagcactacattcaatgtgatgggagtcctgatccttcagtagcccaagaaatgaacacgtttattagtttgtggaaagagaaaacaaatgagacttttgaggaagtgattgagaagagtaaagtagtgctaaatttaattgagaaattgaaatttattttactggaaactccaccatgtgatttgcaagataaaaatataatacagtaccaagaatcaatactacaactgcaggagctccttcatcttaaattcggtgtagccacagaaatacttctcaaacaagctagtactttggcagatctggacagtggaaatatggaaaaagtcattaaagatgaaaatgttactctgtatgtgtgggcaaacctcaagaagaatccaaggcacagaagtgttagattctctgaaacacaaattggatttgagattccaaggatattagcaacaagtgacattgctgtacgactcctgcatacccactatgatcatgtttctgcactgcaccctgtttcaacaccatcaaaagaatacacttctgcagtaactgagcttgtcaaagatgatgttaagaatgtagaaaaagcaatcagcaaggaggtcgaagaagagtccaaacaacaagaaagagggtctcacttaattcaggaggaagaaataaaagttgaggaggaacaaggtgatattgaagtgaaaatgagttctgctgaggaagaatctgaagccataaaatgtgaacgagagatgaaagtattaagtgaaactgtttcagcagcacagttgttgctggtagagaattcttctgaaaagccagatttctttgaagacaatgtggtggatttatgccagttcacaactctgggtggagtataccacttggatattttggagcttcctccacagtgtaaaccagtgaagggatggatgattgtggaaatactcaaagaaggattacagaaatacacatatcctccggaaactacagaagagtttgagacagaaaatgctttcccacctatagaggtcacacttgaggttcatgagaatgtaatcttttttgaggatcctgtggttgtaaggtgggatgctgaaggtaaacattggagaactgatggcatcagcaatgtatcctacaaaccaaaagaaagacttgtaacattcagcctggacacctttggccctgttaccttgattcaagatgctcatattaacatgccgtaccagtcatgggaactaagaccacttgatgtaaataaagtacttttaactgtgactacagtatttactgagattcaaatacaaattaaggaaaacctctgcatgttatcttcaatcaaactaaaagacaagaaacacatctctattttggaaggaacctggatgactcctattcctttcattattgctttgaaagaagctggactgaatatctttcctactagacactctcatttttatgttattataaacaataaggttcctttggtagaagtgaaagcttatcgacagatggccctactaagttctgcttttgcatttggttggagcaagtggaacctactatgtaattctacaaaagtcgtatttaaggtgagggaacaccttactgaagcatgtactgagaatcctaattgggcccttttaatgtttagtggtgacagagcacaaagactgaagatcaaggaagagagtgaggcattttctgaagcacttaaagaagaaactgagtttcattctactttatatcacatggtgaaggattttgcttctgaggaagcaatggagaaagtcaggagttccaactgtcagtttgtcaactctgtgtgccacatgctgctctctaccagattgctcagctactcctaacctccacttacaaactgtattgtaagtatgaagaaccaagcatggtgaaagacaggtatttctgcaacacaatgtaatgagtgaatgaatacatttcaaatcaactattaaaaattttctaatctgca

SEQ ID NO: 113884 - DNA, 2417 bp, Homo sapiens
  Payload ID: 2237
  Gene Symbol: CASC1
  Gene Name: cancer susceptibility candidate 1
  Uniprot ID: Q6TDU7
  ENST ID: ENST00000395990
  CDS Start-End: 259-2289
gtcgtccgggcaacccgggagcgtttgtccacacaatttctgctccgactctgcggactactgcagtggagcttgactcttaatgggtcccaaagcaaaaaaggaacactgtcatcacaaacaggcttcagtggccaaagatctggcagtaagaaaaagaaagtcaccaaagctgaacgattgaagctgctacaagaggaggaggagagacgactgaaagaggaagaggaagcccgtttgaaatatgagaaagaagaaatggaaaggcttgaaatacagcgaattgagaaagaaaaatggcatcgacttgaagcaaaagatctagaaaggagaaatgaagaacttgaagaactttatttattagagaggtgttttcctgaagcagagaaattgaaacaggaaactaaattgctttctcagtggaagcactacattcaatgtgatgggagtcctgatccttcagtagcccaagaaatgaacacgtttattagtttgtggaaagagaaaacaaatgagacttttgaggaagtgattgagaagagtaaagtagtgctaaatttaattgagaaattgaaatttattttactggaaactccaccatgtgatttgcaagataaaaatataatacagtaccaagaatcaatactacaactgcaggagctccttcatcttaaattcggtgtagccacagaaatacttctcaaacaagctagtactttggcagatctggacagtggaaatatggaaaaagtcattaaagatgaaaatgttactctgtatgtgtgggcaaacctcaagaagaatccaaggcacagaagtgttagattctctgaaacacaaattggatttgagattccaaggatattagcaacaagtgacattgctgtacgactcctgcatacccactatgatcatgtttctgcactgcaccctgtttcaacaccatcaaaagaatacacttctgcagtaactgagcttgtcaaagatgatgttaagaatgtagaaaaagcaatcagcaaggaggtcgaagaagagtccaaacaacaagaaagagggtctcacttaattcaggaggaagaaataaaagttgaggaggaacaaggtgatattgaagtgaaaatgagttctgctgaggaagaatctgaagccataaaatgtgaacgagagatgaaagtattaagtgaaactgtttcagcagcacagttgttgctggtagagaattcttctgaaaagccagatttctttgaagacaatgtggtggatttatgccagttcacaactctgggtggagtataccacttggatattttggagcttcctccacagtgtaaaccagtgaagggatggatgattgtggaaatactcaaagaaggattacagaaatacacatatcctccggaaactacagaagagtttgagacagaaaatgctttcccacctatagaggtcacacttgaggttcatgagaatgtaatcttttttgaggatcctgtggttgtaaggtgggatgctgaaggtaaacattggagaactgatggcatcagcaatgtatcctacaaaccaaaagaaagacttgtaacattcagcctggacacctttggccctgttaccttgattcaagatgctcatattaacatgccgtaccagtcatgggaactaagaccacttgatgtaaataaagtacttttaactgtgactacagtatttactgagattcaaatacaaattaaggaaaacctctgcatgttatcttcaatcaaactaaaagacaagaaacacatctctattttggaaggaacctggatgactcctattcctttcattattgctttgaaagaagctggactgaatatctttcctactagacactctcatttttatgttattataaacaataaggttcctttggtagaagtgaaagcttatcgacagatggccctactaagttctgcttttgcatttggttggagcaagtggaacctactatgtaattctacaaaagtcgtatttaaggtgagggaacaccttactgaagcatgtactgagaatcctaattgggcccttttaatgtttagtggtgacagagcacaaagactgaagatcaaggaagagagtgaggcattttctgaagcacttaaagaagaaactgagtttcattctactttatatcacatggtgaaggattttgcttctgaggaagcaatggagaaagtcaggagttccaactgtcagtttgtcaactctgtgtgccacatgctgctctctaccagattgctcagctactcctaacctccacttacaaactgtattgtaagtatgaagaaccaagcatggtgaaagacaggtatttctgcaacacaatgtaatgagtgaatgaatacatttcaaatcaactattaaaaattttctaatctgca

SEQ ID NO: 113885 - DNA, 2146 bp, Homo sapiens
  Payload ID: 2237
  Gene Symbol: CASC1
  Gene Name: cancer susceptibility candidate 1
  Uniprot ID: Q6TDU7
  ENST ID: ENST00000545133
  CDS Start-End: 49-2022
aatttctgctccgactctgcggactactgcagtggagcttgactcttaatggatctagaaaggagaaatgaagaacttgaagaactttatttattagagaggtgttttcctgaagcagagaaattgaaacaggaaactaaattgctttctcagtggaagcactacattcaatgtgatgggagtcctgatccttcagtagcccaagaaatgaacacgtttattagtttgtggaaagagaaaacaaatgagacttttgaggaagtgattgagaagagtaaagtagtgctaaatttaattgagaaattgaaatttattttactggaaactccaccatgtgatttgcaagataaaaatataatacagtaccaagaatcaatactacaactgcaggagctccttcatcttaaattcggtgtagccacagaaatacttctcaaacaagctagtactttggcagatctggacagtggaaatatggaaaaagtcattaaagatgaaaatgttactctgtatgtgtgggcaaacctcaagaagaatccaaggcacagaagtgttagattctctgaaacacaaattggatttgagattccaaggatattagcaacaagtgacattgctgtacgactcctgcatacccactatgatcatgtttctgcactgcaccctgtttcaacaccatcaaaagaatacacttctgcagtaactgagcttgtcaaagatgatgttaagaatgtagaaaaagcaatcagcaaggaggtcgaagaagagtccaaacaacaagaaagagggtctcacttaattcaggaggaagaaataaaagttgaggaggaacaaggtgatattgaagtgaaaatgagttctgctgaggaagaatctgaagccataaaatgtgaacgagagatgaaagtattaagtgaaactgtttcagcagcacagttgttgctggtagagaattcttctgaaaagccagatttctttgaagacaatgtggtggatttatgccagttcacaactctgggtggagtataccacttggatattttggagcttcctccacagtgtaaaccagtgaagggatggatgattgtggaaatactcaaagaaggattacagaaatacacatatcctccggaaactacagaagagtttgagacagaaaatgctttcccacctatagaggtcacacttgaggttcatgagaatgtaatcttttttgaggatcctgtggttgtaaggtgggatgctgaaggtaaacattggagaactgatggcatcagcaatgtatcctacaaaccaaaagaaagacttgtaacattcagcctggacacctttggccctgttaccttgattcaagatgctcatattaacatgccgtaccagtcatgggaactaagaccacttgatgtaaataaagtacttttaactgtgactacagtatttactgagattcaaatacaaattaaggaaaacctctgcatgttatcttcaatcaaactaaaagacaagaaacacatctctattttggaaggaacctggatgactcctattcctttcattattgctttgaaagaagctggactgaatatctttcctactagacactctcatttttatgttattataaacaataaggttcctttggtagaagtgaaagcttatcgacagatggccctactaagttctgcttttgcatttggttggagcaagtggaacctactatgtaattctacaaaagtcgtatttaaggtgagggaacaccttactgaagcatgtactgagaatcctaattgggcccttttaatgtttagtggtgacagagcacaaagactgaagatcaaggaagagagtgaggcattttctgaagcacttaaagaagaaactgagtttcattctactttatatcacatggtgaaggattttgcttctgaggaagcaatggagaaagtcaggagttccaactgtcagtttgtcaactctgtgtgccacatgctgctctctaccagattgctcagctactcctaacctccacttacaaactgtattgtaagtatgaagaaccaagcatggtgaaagacaggtatttctgcaacacaatgtaatgagtgaatgaatacatttcaaatcaactattaaaaattttctaatc

SEQ ID NO: 113886 - DNA, 2208 bp, Homo sapiens
  Payload ID: 2237
  Gene Symbol: CASC1
  Gene Name: cancer susceptibility candidate 1
  ENST ID: ENST00000554533
  CDS Start-End: 85-192
ctgtcgtccgggcaacccgggagcgtttgtccacacaatttctgctccgactctgcggactactgcagtggagcttgactcttaatgtctggcagtaagaaaaagaaagtcaccaaagctgaacgattgaagctgctacaagaggaggaggagagacgactgaaagaggaaggatctagaaaggagaaatgaagaacttgaagaactttatttattagagaggtgttttcctgaagcagagaaattgaaacaggaaactaaattgctttctcagtggaagcactacattcaatgtgatgggagtcctgatccttcagtagcccaagaaatgaacacgtttattagtttgtggaaagagaaaacaaatgagacttttgaggaagtgattgagaagagtaaagtagtgctaaatttaattgagaaattgaaatttattttactggaaactccaccatgtgatttgcaagataaaaatataatacagtaccaagaatcaatactacaactgcaggagctccttcatcttaaattcggtgtagccacagaaatacttctcaaacaagctagtactttggcagatctggacagtggaaatatggaaaaagtcattaaagatgaaaatgttactctgtatgtgtgggcaaacctcaagaagaatccaaggcacagaagtgttagattctctgaaacacaaattggatttgagattccaaggatattagcaacaagtgacattgctgtacgactcctgcatacccactatgatcatgtttctgcactgcaccctgtttcaacaccatcaaaagaatacacttctgcagtaactgagcttgtcaaagatgatgttaagaatgtagaaaaagcaatcagcaaggaggtcgaagaagagtccaaacaacaagaaagagggtctcacttaattcaggaggaagaaataaaagttgaggaggaacaaggtgatattgaagtgaaaatgagttctgctgaggaagaatctgaagccataaaatgtgaacgagagatgaaagtattaagtgaaactgtttcagcagcacagttgttgctggtagagaattcttctgaaaagccagatttctttgaagacaatgtggtggatttatgccagttcacaactctgggtggagtataccacttggatattttggagcttcctccacagtgtaaaccagtgaagggatggatgattgtggaaatactcaaagaaggattacagaaatacacatatcctccggaaactacagaagagtttgagacagaaaatgctttcccacctatagaggtcacacttgaggttcatgagaatgtaatcttttttgaggatcctgtggttgtaaggtgggatgctgaaggtaaacattggagaactgatggcatcagcaatgtatcctacaaaccaaaagaaagacttgtaacattcagcctggacacctttggccctgttaccttgattcaagatgctcatattaacatgccgtaccagtcatgggaactaagaccacttgatgtaaataaagtacttttaactgtgactacagtatttactgagattcaaatacaaattaaggaaaacctctgcatgttatcttcaatcaaactaaaagacaagaaacacatctctattttggaaggaacctggatgactcctattcctttcattattgctttgaaagaagctggactgaatatctttcctactagacactctcatttttatgttattataaacaataaggttcctttggtagaagtgaaagcttatcgacagatggccctactaagttctgcttttgcatttggttggagcaagtggaacctactatgtaattctacaaaagtcgtatttaagtggtgacagagcacaaagactgaagatcaaggaagagagtgaggcattttctgaagcacttaaagaagaaactgagtttcattctactttatatcacatggtgaaggattttgcttctgaggaagcaatggagaaagtcaggagttccaactgtcagtttgtcaactctgtgtgccacatgctgctctctaccagattgctcagctactcctaacctccacttacaaactgtattgtaagtatgaagaaccaagcatggtgaaagacaggtatttctgcaacacaatgtaatgagtgaatgaatacatttcaaatcaactattaaaaattttctaatctgc

SEQ ID NO: 113887 - DNA, 563 bp, Homo sapiens
  Payload ID: 2237
  Gene Symbol: CASC1
  Gene Name: cancer susceptibility candidate 1
  ENST ID: ENST00000556467
  CDS Start-End: 83-220
gtcgtccgggcaacccgggagcgtttgtccacacaatttctgctccgactctgcggactactgcagtggagcttgactcttaatgtctggcagtaagaaaaagaaagtcaccaaagctgaacgattgaagctgctacaagaggaggaggagagacgactgaaagaggaagttactgtcttgaagaaaggagaactgacacttttctcatatctaccataggaagcccgtttgaaatatgagaaagaagaaatggaaaggcttgaaatacagcgaattgagaaagaaaaatggcatcgacttgaagcaaaagatctagaaaggagaaatgaagaacttgaagaactttatttattagagaggtgttttcctgaagcagagaaattgaaacaggaaactaaattgctttctcagtggaagcactacattcaatgtgatgggagtcctgatccttcagtagcccaagaaatgaacacgtttattagtttgtggaaagagaaaacaaatgagacttttgaggaagtgattgagaagagtaaagtagtgctaaatttaattgagaaat

SEQ ID NO: 113888 - DNA, 583 bp, Homo sapiens
  Payload ID: 2237
  Gene Symbol: CASC1
  Gene Name: cancer susceptibility candidate 1
  ENST ID: ENST00000554347
  CDS Start-End: 306-583
acacaatttctgctccgactctgcggactactgcagtggagcttgactcttaatgagtttcgctctgttgcccaggctggaatgcaatggcgcgatctcggcttactgaaacctctgcctcccgggttcaagcgattctccttcaagcgattctcctgcctcagcctcccgagtagctgggattacagtctggcagtaagaaaaagaaagtcaccaaagctgaacgattgaagctgctacaagaggaggaggagagacgactgaaagaggaagaggaagcccgtttgaaatatgagaaagaagaaatggaaaggcttgaaatacagcgaattgagaaagaaaaatggcatcgacttgaagcaaaagatctagaaaggagaaatgaagaacttgaagaactttatttattagagaggtgttttcctgaagcagagaaattgaaacaggaaactaaattgctttctcagtggaagcactacattcaatgtgatgggagtcctgatccttcagtagcccaagaaatgaacacgtttattagtttgtggaaagagaaaacaaatgagacttttgaggaagtgattga

SEQ ID NO: 113889 - DNA, 1774 bp, Homo sapiens
  Payload ID: 2237
  Gene Symbol: CASC1
  Gene Name: cancer susceptibility candidate 1
  ENST ID: ENST00000556006
  CDS Start-End: 1-1646
aggaagcccgtttgaaatatgagaaagaagaaatggaaaggcttgaaatacagcgaattgagaaagaaaaatggcatcgacttgaagcaaaagatctagaaaggagaaatgaagaacttgaagaactttatttattagagaggtgttttcctgaagcagagaaattgaaacaggaaactaaattgctttctcagtggaagcactacattcaatgtgatgggagtcctgatccttcagtagcccaagaaatgaacacgtttattagtttgtggaaagagaaaacaaatgagacttttgaggaagtgattgagaagagtaaagtagtgctaaatttaattgagaaattgaaatttattttactggaaactccaccatgtgatttgcaagataaaaatataatacagtaccaagaatcaatactacaactgcaggagctccttcatcttaaattcggtgtagccacagaaatacttctcaaaagttctgctgaggaagaatctgaagccataaaatgtgaacgagagatgaaagtattaagtgaaactgtttcagcagcacagttgttgctggtagagaattcttctgaaaagccagatttctttgaagacaatgtggtggatttatgccagttcacaactctgggtggagtataccacttggatattttggagcttcctccacagtgtaaaccagtgaagggatggatgattgtggaaatactcaaagaaggattacagaaatacacatatcctccggaaactacagaagagtttgagacagaaaatgctttcccacctatagaggtcacacttgaggttcatgagaatgtaatcttttttgaggatcctgtggttgtaaggtgggatgctgaaggtaaacattggagaactgatggcatcagcaatgtatcctacaaaccaaaagaaagacttgtaacattcagcctggacacctttggccctgttaccttgattcaagatgctcatattaacatgccgtaccagtcatgggaactaagaccacttgatgtaaataaagtacttttaactgtgactacagtatttactgagattcaaatacaaattaaggaaaacctctgcatgttatcttcaatcaaactaaaagacaagaaacacatctctattttggaaggaacctggatgactcctattcctttcattattgctttgaaagaagctggactgaatatctttcctactagacactctcatttttatgttattataaacaataaggttcctttggtagaagtgaaagcttatcgacagatggccctactaagttctgcttttgcatttggttggagcaagtggaacctactatgtaattctacaaaagtcgtatttaaggtgagggaacaccttactgaagcatgtactgagaatcctaattgggcccttttaatgtttagtggtgacagagcacaaagactgaagatcaaggaagagagtgaggcattttctgaagcacttaaagaagaaactgagtttcattctactttatatcacatggtgaaggattttgcttctgaggaagcaatggagaaagtcaggagttccaactgtcagtttgtcaactctgtgtgccacatgctgctctctaccagattgctcagctactcctaacctccacttacaaactgtattgtaagtatgaagaaccaagcatggtgaaagacaggtatttctgcaacacaatgtaatgagtgaatgaatacatttcaaatcaactattaaaaattttctaatctgca

SEQ ID NO: 113890 - DNA, 3801 bp, Homo sapiens
  Payload ID: 2238
  Gene Symbol: CASC10
  Gene Name: cancer susceptibility candidate 10
  Uniprot ID: Q5T4H9
  ENST ID: ENST00000377113
  CDS Start-End: 449-859
ccattgaggaccagggtcgcgccgagaggccggagggggctccaggcagcctggagctgacggcgccgggctgcgtcctcttcacctgggggtggggggtgggggcacgtactttgtgaccaggatggtgccgagccccctctacggcgggagcttgcaggggtgcgggggtgtgactggcgctccgcggactcgtgtccacagtacagaggacatgtagggttcggccggggcgcggctgcaccggggcctgcctcgcggacctggactcgggactccgggcggccctgcctggtgccattgcctcagccaagtctcccacctctctgctcggtttcccgccccacctttcccctactaccgcatccctgtcccctcgcttccctccgcgatgtctccatccgagtaagaaacgaagctgaacgcattggtaactgtgctcaagaagatgcaatcgcgggagccctcagggtggcgcacggcggagaggcgacgcgggtggcgctgcagaggcgtccccaccccctccggggaccggggccccggagctgccaggcccgctgcacgcggcggcgcgggagaaaccacggggcagcagcgccccctgcaggtgccgggcgcctccgcagccgctgcgcggacccgactcttaaggtggcaccaccgggttcccagcccgcgcgcaacccgcagccctggctccatccgccgcacttctccctgtagcggcgggcctgaccgtccggaacggccggagtgtgctgatgcctgctgctatctgcttgatcccttcaccctacctctcatccaggacttcttccgcggatgcgcagctagcgatttcgacaggcgagattgaaaattccgggcgagtatatgaggttgagtaagtcccgcttcagggaggaacgaccagaatgacatttctttaagcctaaatcaaacttttattttcgtttataaaaagcagaaggccagcaggaaagggtcgcggaggactggcacatccacaaccgtaggactcttggatccaagtttttaggctgagactgggcggtccggggttctccttcggcgctcacaccccgcaaactcgtgggcagtgcagtgctggaggccgggggcagtggcggacccgcagggtaaccttgtctcgcgcacctcccgagcccccagcagcccactctcgtccgaatgctttgtttatttggtgacaccagggaacgtggagaagaagatcgaagttcagtttttcttttttctttattttaaatatttttcttaactaaatggtatgtttatgtgaacccatcatctcttggaattaagtgtcctcagcgaactccagattcctaggggaaacctacgtgcccagagcaggaaacgcacaagtcaattcaggttccggtgccatccgcagtaaattcccttccttttgctccaaattcctcctctgcgtccaggagagggacccccgggactcccgcacacccaggaccgggagcggcagagcagagggcgggtgcgagggcgcgagggaagggaggcggcctgcggacctggggcgcgcagtttcccggctccgtgggaacctccaaccccggggcgcgcggcctaggctccgccctgccaggcttggggccgagcggcccacctagtgggtcctgacctggggaagccgagtccgcgcgcgggtcgggccgcgacgagggaagctcgcctgggcaagtgccgcgcggggtcagacccaccccaggggttgcaaaccgcaagcgaaagtcgagaggggctggagctttccctctgatccgttttacactgtgaaaaccgcaggcctgtcgcctaggcggccacttttaaattgggaagcaaatagacgaaaaaccaaaacaaacgtacgagctgacttttcccagctaagtttcccctcaataaaaagcccgctttctgggaaagacagaaactgatccgcgctcacgattgctttcttggagattctgggggcactggggcgcgcaggaggcgcggcgacaaccccagcgcgcatggggcagcctggactgtgcccctcttaccaagctccttcccaggcttctccgtgcttctctctccactggggtcccgcctctccacgggtcacgccgaggctatatgctgcttgcaaggggtccgcgctttctcgttcggcgggaaaggcacatgttggagctcgatgttggggctcagggtgtggttgatttgtctgctgatctgggtttcttcccagcaccgggcaggaagtgtaggagtttgggtcgccagtccagggactcgggaaacttccaggccaaccagaagaaacacttgcagacacctttcgaatgtcacagttttccccaggggaaaaagcagaagttgctgggcacatcacccagcacccgggcaaactctccacttacctcgcgccctgctagggggtgttgggggccctccgggaacccctagatgagcaagcaaagttgcaagaagtggggtggggaacgctcacccgataaaccatgcaccaaacttaatcagcctgtaatgcttactctaaatctaggcccatctaggccaggtgggctgagtcttgggatagtgggtgtctccttcctatgttgatacattaaggattccatatggacaattatttttagtcaaatttgtggtcctggagatagaaagaggagaagaagagagaagaaagacagaagagctttattgttcttttttttttttttttttttttgagatggagtctcgccctgttgtccaggctggagtacagtggcgccatcttggctaactgcaacctccacctccccggttcaagcaattctcctacctcagcctcctgagtagctgggactacaggcagccgccaccatgaccagctaatttttttttttacttttagtagagatggggtttcaccatgttagccaggatggtctcgaactcctgaccttgtgatccgcccacctcagcctccctaggtgctgggattacaggcgtgagcaaccacccggccttattgttcttatattaaaacaaaagaacctagaaaaaattgcttggttaaattgtagagaggaagggagggaaggaaaatgaaggcttttcttctttgttctttaaaagtccaagcactttctttcagaatcaaaatgtagagaggcagtcagtcttggagcatgcttttgcattttaggatactactcattaattcagttttaaagcattcactgggttgagcacaattttaaaaaggttctgactcacccagatcctgtttgaagctcaactcattttgattgaaagagatttgagacaagaatttcagaagagaaaaatgtgtgttacacctggacatatatacacatgtaacagggattgtattccttctagtctaagacaagagattctatggtaaattatttaaaaaaattagttttttttctagcattgtattgtcaccagaaagaagagtgctgaattctctgtttctgcatttcccaataataaatctcctaggagagataactttttgcagttgtgccccccacccattttctctgtggcttgctttatttcccacatatgaatacacacacagcagatacatcatgcacaaactttttttaatgtgtaatctgtaaatctaggcccattaagttttcattgaagttgggaaactgttgaggacttacttttgttcttcaccatgcgtgcactttgccaaggatctttggtaaccaataaaacgatcatgttcactctgaa

SEQ ID NO: 113891 - DNA, 4116 bp, Homo sapiens
  Payload ID: 2239
  Gene Symbol: CASC3
  Gene Name: cancer susceptibility candidate 3
  Uniprot ID: O15234
  ENST ID: ENST00000264645
  CDS Start-End: 227-2338
cacacacacacacacacacacacacaccccaacacacacacacacaccccaacacacacacacacacacacacacacacacacacacacacacacacacacacacacagcgggatggccgagcgccgcacgcgtagcacgccgggactagctatccagcctcccagcagcctctgcgacgggcgcggtgcgtaagtacctcgccggtggtggccgttctccgtaagatggcggaccggcggcggcagcgcgcttcgcaagacaccgaggacgaggaatctggtgcttcgggctccgacagcggcggctccccgttgcggggaggcgggagctgcagcggtagcgccggaggcggcggcagcggctctctgccttcacagcgcggaggccgaaccggggcccttcatctgcggcgggtggagagcgggggcgccaagagtgctgaggagtcggagtgtgagagtgaagatggcattgaaggtgatgctgttctctcggattatgaaagtgcagaagactcggaaggtgaagaaggtgaatacagtgaagaggaaaactccaaagtggagctgaaatcagaagctaatgatgctgttaattcttcaacaaaagaagagaagggagaagaaaagcctgacaccaaaagcactgtgactggagagaggcaaagtggggacggacaggagagcacagagcctgtggagaacaaagtgggtaaaaagggccctaagcatttggatgatgatgaagatcggaagaatccagcatacatacctcggaaagggctcttctttgagcatgatcttcgagggcaaactcaggaggaggaagtcagacccaaggggcgtcagcgaaagctatggaaggatgagggtcgctgggagcatgacaagttccgggaagatgagcaggccccaaagtcccgacaggagctcattgctctttatggttatgacattcgctcagctcataatcctgatgacatcaaacctcgaagaatccggaaaccccgatatgggagtcctccacaaagagatccaaactggaacggtgagcggctaaacaagtctcatcgccaccagggtcttgggggcaccctaccaccaaggacatttattaacaggaatgctgcaggtaccggccgtatgtctgcacccaggaattattctcgatctgggggcttcaaggaaggtcgtgctggttttaggcctgtggaagctggtgggcagcatggtggccggtctggtgagactgttaagcatgagattagttaccggtcacggcgcctagagcagacttctgtgagggatccatctccagaagcagatgctccagtgcttggcagtcctgagaaggaagaggcagcctcagagccaccagctgctgctcctgatgctgcaccaccaccccctgataggcccattgagaagaaatcctattcccgggcaagaagaactcgaaccaaagttggagatgcagtcaagcttgcagaggaggtgccccctcctcctgaaggactgattccagcacctccagtcccagaaaccaccccaactccacctactaagactgggacctgggaagctccggtggattctagtacaagtggacttgagcaagatgtggcacaactaaatatagcagaacagaattggagtccggggcagccttctttcctgcaaccacgggaacttcgaggtatgcccaaccatatacacatgggagcaggacctccacctcagtttaaccggatggaagaaatgggtgtccagggtggtcgagccaaacgctattcatcccagcggcaaagacctgtgccagagccccccgcccctccagtgcatatcagtatcatggagggacattactatgatccactgcagttccagggaccaatctatacccatggtgacagccctgccccgctgcctccacagggcatgcttgtgcagccaggaatgaaccttccccacccaggtttacatccccaccagacaccagctcctctgcccaatccaggcctctatcccccaccagtgtccatgtctccaggacagccaccacctcagcagttgcttgctcctacttacttttctgctccaggcgtcatgaactttggtaatcccagttacccttatgctccaggggcactgcctcccccaccaccgcctcatctgtatcctaatacacaggccccatcacaggtatatggaggagtgacctactataaccccgcccagcagcaggtgcagccaaagccctccccaccccggaggactccccagccagtcaccatcaagccccctccacctgaggttgtaagcaggggttccagttaatacaagtttctgaatattttaaatcttaacatcatataaaaagcagcagaggtgagaactcagaagagaaatacagctggctatctactaccagaagggcttcaaagatatagggtgtggctcctaccagcaaacagctgaaagaggaggacccctgccttcctctgaggacaggctctagagagagggagaaacaagtggacctcgtcccatcttcactcttcacttgagttggctgtgttcgggggagcagagagagccagacagccccaagcttctgagtctagatacagaagcccatgtcttctgctgttcttcacttctgggaaattgaagtgtcttctgttcccaaggaagctccttcctgtttgttttgttttctaagatgttcatttttaaagcctggcttcttatccttaatattattttaattttttctctttgtttctgtttcttgctctctctccctgcctttaaatgaaacaagtctagtcttctggttttctagcccctctggattcccttttgactcttccgtgcatcccagataatggagaatgtatcagccagccttccccaccaagtctaaaaagacctggcctttcacttttagttggcatttgttatcctcttgtatacttgtattcccttaactctaaccctgtggaagcatggctgtctgcacagagggtcccattgtgcagaaaagctcagagtaggtgggtaggagcccttctctttgacttaggtttttaggagtctgagcatccatcaatacctgtactatgatgggcttctgttctctgctgagggccaataccctactgtggggagagatggcacaccagatgcttttgtgagaaagggatggtggagtgagagcctttgcctttaggggtgtgtattcacatagtcctcagggctcagtcttttgaggtaagtggaattagagggccttgcttctcttctttccattcttcttgctacaccccttttccagttgctgtggaccaatgcatctctttaaaggcaaatattatccagcaagcagtctaccctgtcctttgcaattgctcttctccacgtctttcctgctacaagtgttttagatgttactaccttattttccccgaattctatttttgtccttgcagacagaatataaaaactcctgggcttaaggcctaaggaagccagtcaccttctgggcaagggctcctatctttcctccctatccatggcactaaaccacttctctgctgcctctgtggaagagattcctattactgcagtacatacgtctgccaggggtaacctggccactgtccctgtccttctacagaacctgagggcaaagatggtggctgtgtctctccccggtaatgtcactgtttttattccttccatctagcagctggcctaatcactctgagtcacaggtgtgggatggagagtggggagaggcacttaatctgtaacccccaaggaggaaataactaagagattcttctaggggtagctggtggttgtgccttttgtaggctgttccctttgccttaaacctgaagatgtctcctcaagcctgtgggcagcatgcccagattcccagaccttaagacactgtgagagttgtctctgttggtccactgtgtttagttgcaaggatttttccatgtgtggtggtgttttttgttactgttttaaagggtgcccatttgtgatcagcattgtgacttggagataataaaatttagactataaacttggctcccttgcca

SEQ ID NO: 113892 - DNA, 908 bp, Homo sapiens
  Payload ID: 2239
  Gene Symbol: CASC3
  Gene Name: cancer susceptibility candidate 3
  ENST ID: ENST00000474190
  CDS Start-End: 1-670
gctgaaatcagaagctaatgatgctgttaattcttcaacaaaagaagagaagggagaagaaaagcctgacaccaaaagcactgtgactggagagaggcaaagtggggacggacaggagagcacagagcctgtggagaacaaagtgggtaaaaagggccctaagcatttggatgatgatgaagatcggaagaatccagcatacatacctcggaaagggctcttctttgagcatgatcttcgagggcaaactcaggaggaggaagtcagacccaaggggcgtcagcgaaagctatggaaggatgagggtcgctgggagcatgacaagttccgggaagatgagcaggccccaaagtcccgacaggagctcattgctctttatggttatgacattcgctcagctcataatcctgatgacatcaaacctcgaagaatccggaaaccccgatatgggagtcctccacaaagagatccaaactggaacggtgagcggctaaacaagtctcatcgccaccagggtcttgggggcaccctaccaccaaggacatttattaacaggaatgctgcaggcccattgagaagaaatcctattcccgggcaagaagaactcgaaccaaagttggagatgcagtcaagcttgcagaggaggtgccccctcctcctgaaggactgattccagcacctccagtcccagaaaccaccccaactccacctactaagactgggacctgggaagctccggtggattctagtacaagtggacttgagcaagatgtggcacaactaaatatagcagaacagaattggagtccggggcagccttctttcctgcaaccacgggaacttcgaggtatgcccaaccatatacacatgggagcaggacctccacctcagtttaaccggatggaaga

SEQ ID NO: 113893 - DNA, 714 bp, Homo sapiens
  Payload ID: 2239
  Gene Symbol: CASC3
  Gene Name: cancer susceptibility candidate 3
  ENST ID: ENST00000577605
  CDS Start-End: 1-389
gggcaagaagaactcgaaccaaagttggagatgcagtcaagcttgcagaggaggtgccccctcctcctgaaggactgattccagcacctccagtcccagaaaccaccccaactccacctactaagactgggacctgggaagctccggtggattctagtacaagtggacttgagcaagatgtggcacaactaaatatagcagaacagaattggagtccggggcagccttctttcctgcaaccacgggaacttcgaggtatgcccaaccatatacacatgggagcaggacctccacctcagtttaaccggatggaagaaatgctcactttgcaaatatccattaaatacctgccatgtaccaagtgtttttcaacacctaaaggaaggtaggacttgatatgagagccctctagaattcttattgtttaggcctctttctttgtctcagggtgtccagggtggtcgagccaaacgctattcatcccagcggcaaagacctgtgccagagccccccgcccctccagtgcatatcagtatcatggagggacattactatgatccactgcagttccagggaccaatctatacccatggtgacagccctgccccgctgcctccacagggcatgcttgtgcagccaggaatgaaccttccccacccaggtttacatccccaccagacaccagctcctctgcccaatccaggcctctatccc

SEQ ID NO: 113894 - DNA, 543 bp, Homo sapiens
  Payload ID: 2239
  Gene Symbol: CASC3
  Gene Name: cancer susceptibility candidate 3
  ENST ID: ENST00000584997
  CDS Start-End: 345-543
aggtgatgctaggtagtctgtgagttgatagtagatactgggacttttttttgtttttgagagaaaaggggagttatcccaatgcgagtttgcatccggagttccaagggaagaagaaggattgggggtttctgggaggatggtagagccgctggagatggaaagcggatgttttattcagaagtcggggctggagggaaggagaccagacctgccttggctactacttgataaagatttacctatctctgtctccctctccaaccattttgtgctgaatcttcagcttttcacccacatttctttattgggctccccacctctggaaatcacagaactaacccatgtcttctgctttctttcaggagagtgaagatggcattgaaggtgatgctgttctctcggattatgaaagtgcagaagactcggaaggtgaagaaggtgaatacagtgaagaggaaaactccaaagtggagctgaaatcagaagctaatgatgctgttaattcttcaacaaaagaagagaagggagaagaaaagcctg

SEQ ID NO: 113895 - DNA, 3962 bp, Homo sapiens
  Payload ID: 2240
  Gene Symbol: CASC4
  Gene Name: cancer susceptibility candidate 4
  Uniprot ID: Q6P4E1
  ENST ID: ENST00000299957
  CDS Start-End: 300-1610
ccgtgaggtgttgggtttgggggacgctggcagctgggttctcccggttcccttgggcaggtgcagggtcgggttcaaagcctccggaacgcgttttggcctgatttgaggaggggggcggggagggacctgcggcttgcggccccgcccccttctccggctcgcagccgaccggtaagcccgcctcctccctcggccggccctggggccgtgtccgccgggcaactccagccgaggcctgggcttctgcctgcaggtgtctgcggcgaggcccctagggtacagcccgatttggccccatggtgggtttcggggccaaccggcgggctggccgcctgccctctctcgtgctggtggtgctgctggtggtgatcgtcgtcctcgccttcaactactggagcatctcctcccgccacgtcctgcttcaggaggaggtggccgagctgcagggccaggtccagcgcaccgaagtggcccgcgggcggctggaaaagcgcaattcggacctcttgctgttggtggacacgcacaagaaacagatcgaccagaaggaggccgactacggccgcctcagcagccggctgcaggccagagagggcctcgggaagagatgcgaggatgacaaggttaaactacagaacaacatatcgtatcagatggcagacatacatcatttaaaggagcaacttgctgagcttcgtcaggaatttcttcgacaagaagaccagcttcaggactataggaagaacaatacttaccttgtgaagaggttagaatatgaaagttttcagtgtggacagcagatgaaggaattgagagcacagcatgaagaaaatattaaaaagttagcagaccagtttttagaggaacaaaagcaagagacccaaaagattcaatcaaatgatggaaaggaattggatataaacaatcaagtagtacctaaaaatattccaaaagtagctgagaatgttgcagataagaatgaagaaccctcaagcaatcatattccacatgggaaagaacaaatcaaaagaggtggtgatgcagggatgcctggaatagaagagaatgacctagcaaaagttgatgatcttccccctgctttaaggaagcctcctatttcagtttctcaacatgaaagtcatcaagcaatctcccatcttccaactggacaacctctctccccaaatatgcctccagattcacacataaaccacaatggaaaccccggtacttcaaaacagaatccttccagtcctcttcagcgtttaattccaggctcaaacttggacagtgaacccagaattcaaacagatatactaaagcaggctaccaaggacagagtcagtgatttccataaattgaagcaaagccgattctttgatgaaaatgaatcccctgttgatccgcagcatggctctaaactggcggattataatggggatgatggtaacgtaggtgagtatgaggcagacaagcaggctgagctggcttacaatgaggaagaagatggtgatggtggagaggaagacgtccaagatgatgaagaacgagagcttcaaatggatcctgcagactatggaaagcaacatttcaatgatgtcctttaagtcctaaaggaatgcttcagaaaacctaaagtgctgtaaaatgaaatcattctactttgtcctttctgacttttgttgtaaagacgaattgtatcagttgtaaagatacattgagatagaattaaggaaaaactttaatgaaggaatgtacccatgtacatatgtgaactttttcatattgtattatcaaggtatagacttttttggttatgatacagttaagccaaaaacagctaatctttgcatctaaagcaaactaatgtatatttcacattttattgagccgacttatttccacaaatagataaacaggacaaaatagttgtacaggttatatgtggcatagcataaccacagtaagaacagaacagatattcagcagaaaactttttatactctaattctttttttttttttttttgagacagagttttagtcttgtttcccaggctggagtgcaatggcacaatcttggctcactgcaacctccgcctcctgggttcaggcaattttcctgcctcagcctcccaagtagctgggattacaggcacccaccaccatgcccagctaatttttgtatttttaatagagagctaataattgtatatttaataaagacgggtttcaccatgttggccaggctggtcttgaactcctgacctcaggtgatcctcctgcattggcctcccaaagtgctggaattccaggcatgagccactgcgcccagtctacacactaattcttgttagcccaacagctgttctgttctatctacccctcatttcacgctcaaggagtcatacctagaatagttacacacaagagggaaactggaagccaaacactgtacagtattgtgtagaaagtcacctccctactccttttattttacatgagtgctgatgtgttttggcagatgagctttcagctgaggcctgatggaaattgagataacctgcaaagacataacagtatttatgagttatatcttagttcttgaaattgtggaatgcatgattgacaatatatttttaatttttattttttcaagtaataccagtactgtttaactatagccagaactggctaaaatttttatattttcagagttgaagttggtgaagacattcatgatttaaacaccagatcctgaaaggggttaaatctactttgaaatgaatctgcaatcagtatttcaaagcttttctggtaattttagtgatcttatttgattagactttttcagaagtactaaataaggaattttaacaggtttttattaatgcacagataaatagaagtacagtgaggtctatagccattttattaaaatagcttaaaagtttgtaaaaaaatgaatctttgtaattacttaatatgttagttaagaacccgtcaagcttatatttgctagacttacaaattattttaaatgcatttatcttttttgacactattcagtggaatgtgtaagctagctaattcttgttttctgatttaaagcacttttaaatcttatcctgccccctaaaaacaaaaggttttgatcacaaggggaaatttaagattgttaaccctgtttttcagaagggctactgttaattgcacataaacatgaaatgtgttttcccctgtgtactaacacattctaggcaaaattcaaacttatagtggtaaagaaacaggttgttcacttgctgaggtgcaaaaattcttaagacttctgtttgaaattgctcaatgactaggaaaagatgtagtagtttactaaaattgtttttctaccatatcaaattaaacaattcatgcctttatagggtcaggcctacaatgaataggtatggtggtttcacagaattttaaaatagagttaaagggaagtgatgtacatttcgggggcattagggtagggagatgaatcaaaaaatacccctagtaatgctttatattttaatactgcaaaagctttacaaatggaaaccatgcaattacctgccttagttcttttgtcataaaaacaatcacttggttggttgtattgtagctattacttatacagcaacatttcttcaattagcagtctagacattttataaacagaaatcttggaccaattgataatatttctgactgtattaatattttagtgctataaaatactatgtgaatctcttaaaaatctgacattttacagtctgtattagacatactgtttttataatgttttacttctgccttaagatttaggttttttaaatgtatttttgccctgaattaagtgttaatttgatggaaactctgcttttaaaatcatcatttactgggttctaataaattaaaaattaaacttgt

SEQ ID NO: 113896 - DNA, 3764 bp, Homo sapiens
  Payload ID: 2240
  Gene Symbol: CASC4
  Gene Name: cancer susceptibility candidate 4
  Uniprot ID: Q6P4E1
  ENST ID: ENST00000345795
  CDS Start-End: 271-1413
gcagctgggttctcccggttcccttgggcaggtgcagggtcgggttcaaagcctccggaacgcgttttggcctgatttgaggaggggggcggggagggacctgcggcttgcggccccgcccccttctccggctcgcagccgaccggtaagcccgcctcctccctcggccggccctggggccgtgtccgccgggcaactccagccgaggcctgggcttctgcctgcaggtgtctgcggcgaggcccctagggtacagcccgatttggccccatggtgggtttcggggccaaccggcgggctggccgcctgccctctctcgtgctggtggtgctgctggtggtgatcgtcgtcctcgccttcaactactggagcatctcctcccgccacgtcctgcttcaggaggaggtggccgagctgcagggccaggtccagcgcaccgaagtggcccgcgggcggctggaaaagcgcaattcggacctcttgctgttggtggacacgcacaagaaacagatcgaccagaaggaggccgactacggccgcctcagcagccggctgcaggccagagagggcctcgggaagagatgcgaggatgacaaggttaaactacagaacaacatatcgtatcagatggcagacatacatcatttaaaggagcaacttgctgagcttcgtcaggaatttcttcgacaagaagaccagcttcaggactataggaagaacaatacttaccttgtgaagaggttagaatatgaaagttttcagtgtggacagcagatgaaggaattgagagcacagcatgaagaaaatattaaaaagttagcagaccagtttttagaggaacaaaagcaagagacccaaaagattcaatcaaatgatggaaaggaattggatataaacaatcaagtagtacctaaaaatattccaaaagtagctgagaatgttgcagataagaatgaagaaccctcaagcaatcatattccacatgggaaagaacaaatcaaaagaggtggtgatgcagggatgcctggaatagaagagaatgacctagcaaaagttgatgatcttccccctgctttaaggaagcctcctatttcagtttctcaacatgaaagtcatcaagcaatctcccatcttccaactggacaacctctctccccaaatatgcctccagattcacacataaaccacaatggaaaccccggtacttcaaaacagaatccttccagtcctcttcagcgtttaattccaggctcaaacttggacagtgaacccagaattcaaacagatatactaaagcaggctaccaaggacagagtcagtgatttccataaattgaagcaaaatgatgaagaacgagagcttcaaatggatcctgcagactatggaaagcaacatttcaatgatgtcctttaagtcctaaaggaatgcttcagaaaacctaaagtgctgtaaaatgaaatcattctactttgtcctttctgacttttgttgtaaagacgaattgtatcagttgtaaagatacattgagatagaattaaggaaaaactttaatgaaggaatgtacccatgtacatatgtgaactttttcatattgtattatcaaggtatagacttttttggttatgatacagttaagccaaaaacagctaatctttgcatctaaagcaaactaatgtatatttcacattttattgagccgacttatttccacaaatagataaacaggacaaaatagttgtacaggttatatgtggcatagcataaccacagtaagaacagaacagatattcagcagaaaactttttatactctaattctttttttttttttttttgagacagagttttagtcttgtttcccaggctggagtgcaatggcacaatcttggctcactgcaacctccgcctcctgggttcaggcaattttcctgcctcagcctcccaagtagctgggattacaggcacccaccaccatgcccagctaatttttgtatttttaatagagagctaataattgtatatttaataaagacgggtttcaccatgttggccaggctggtcttgaactcctgacctcaggtgatcctcctgcattggcctcccaaagtgctggaattccaggcatgagccactgcgcccagtctacacactaattcttgttagcccaacagctgttctgttctatctacccctcatttcacgctcaaggagtcatacctagaatagttacacacaagagggaaactggaagccaaacactgtacagtattgtgtagaaagtcacctccctactccttttattttacatgagtgctgatgtgttttggcagatgagctttcagctgaggcctgatggaaattgagataacctgcaaagacataacagtatttatgagttatatcttagttcttgaaattgtggaatgcatgattgacaatatatttttaatttttattttttcaagtaataccagtactgtttaactatagccagaactggctaaaatttttatattttcagagttgaagttggtgaagacattcatgatttaaacaccagatcctgaaaggggttaaatctactttgaaatgaatctgcaatcagtatttcaaagcttttctggtaattttagtgatcttatttgattagactttttcagaagtactaaataaggaattttaacaggtttttattaatgcacagataaatagaagtacagtgaggtctatagccattttattaaaatagcttaaaagtttgtaaaaaaatgaatctttgtaattacttaatatgttagttaagaacccgtcaagcttatatttgctagacttacaaattattttaaatgcatttatcttttttgacactattcagtggaatgtgtaagctagctaattcttgttttctgatttaaagcacttttaaatcttatcctgccccctaaaaacaaaaggttttgatcacaaggggaaatttaagattgttaaccctgtttttcagaagggctactgttaattgcacataaacatgaaatgtgttttcccctgtgtactaacacattctaggcaaaattcaaacttatagtggtaaagaaacaggttgttcacttgctgaggtgcaaaaattcttaagacttctgtttgaaattgctcaatgactaggaaaagatgtagtagtttactaaaattgtttttctaccatatcaaattaaacaattcatgcctttatagggtcaggcctacaatgaataggtatggtggtttcacagaattttaaaatagagttaaagggaagtgatgtacatttcgggggcattagggtagggagatgaatcaaaaaatacccctagtaatgctttatattttaatactgcaaaagctttacaaatggaaaccatgcaattacctgccttagttcttttgtcataaaaacaatcacttggttggttgtattgtagctattacttatacagcaacatttcttcaattagcagtctagacattttataaacagaaatcttggaccaattgataatatttctgactgtattaatattttagtgctataaaatactatgtgaatctcttaaaaatctgacattttacagtctgtattagacatactgtttttataatgttttacttctgccttaagatttaggttttttaaatgtatttttgccctgaattaagtgttaatttgatggaaactctgcttttaaaatcatcatttactgggttctaataaattaaaaattaaacttg

SEQ ID NO: 113897 - DNA, 353 bp, Homo sapiens
  Payload ID: 2240
  Gene Symbol: CASC4
  Gene Name: cancer susceptibility candidate 4
  ENST ID: ENST00000561305
  CDS Start-End: 1-75
caagatgatgaagaacgagagcttcaaatggatcctgcagactatggaaagcaacatttcaatgatgtcctttaagtcctaaaggaatgcttcagaaaacctaaaagttgaagttggtgaagacattcatgatttaaacaccagatcctgaaaggggttaaatctactttgaaatgaatctgcaatcagtatttcaaagcttttctggtaattttagtgatcttatttgattagactttttcagaagtactaaataaggaattttaacaggtttttattaatgcacagataaatagaagtacagtgaggtctatagccattttattaaaatagcttaaaagtttgtaaaaaaa

SEQ ID NO: 113898 - DNA, 622 bp, Homo sapiens
  Payload ID: 2240
  Gene Symbol: CASC4
  Gene Name: cancer susceptibility candidate 4
  ENST ID: ENST00000558847
  CDS Start-End: 1-485
aagagacccaaaagattcaatcaaatgatggaaaggaattggatataaacaatcaagtagtacctaaaaatattccaaaagtagctgagaatgttgcagataagaatgaagaaccctcaagcaatcatattccacatgggaaagctttaaggaagcctcctatttcagtttctcaacatgaaagtcatcaagcaatctcccatcttccaactggacaacctctctccccaaatatgcctccagattcacacataaaccacaatggaaaccccggtacttcaaaacagaatccttccagtcctcttcagcgtttaattccaggctcaaacttggacagtgaacccagaattcaaacagatatactaaagcaggctaccaaggacagagtcagtgatttccataaattgaagcaaaatgatgaagaacgagagcttcaaatggatcctgcagactatggaaagcaacatttcaatgatgtcctttaagtcctaaaggaatgcttcagaaaacctaaagtgctgtaaaatgaaatcattctactttgtcctttctgacttttgttgtaaagacgaattgtatcagttgtaaagatacattgagatagaattaaggaaaaacttta

SEQ ID NO: 113899 - DNA, 742 bp, Homo sapiens
  Payload ID: 2240
  Gene Symbol: CASC4
  Gene Name: cancer susceptibility candidate 4
  ENST ID: ENST00000559222
  CDS Start-End: 405-742
aaccgtgaggtgttgggtttgggggacgctggcagctgggttctcccggttcccttgggcaggtgcagggtcgggttcaaagcctccggaacgcgttttggcctgatttgaggaggggggcggggagggacctgcggcttgcggccccgcccccttctccggctcgcagccgaccggaggaggtggccgagctgcagggccaggtccagcgcaccgaagtggcccgcgggcggctggaaaagcgcaattcggacctcttgctgttggtggacacgcacaagaaacagatcgaccagaaggaggccgactacggccgcctcagcagccggctgcaggccagagagggcctcgggaagagatgcgaggatgacaaggttaaactacagaacaacatatcgtatcagatggcagacatacatcatttaaaggagcaacttgctgagcttcgtcaggaatttcttcgacaagaagaccagcttcaggactataggaagaacaatacttaccttgtgaagaggttagaatatgaaagttttcagtgtggacagcagatgaaggaattgagagcacagcatgaagaaaatattaaaaagttagcagaccagtttttagaggaacaaaagcaagagacccaaaagattcaatcaaatgatggaaaggaattggatataaacaatcaagtagtacctaaaaatattccaaaagtagctgagaatgttgcagataagaatgaagaaccctc

SEQ ID NO: 113900 - DNA, 1386 bp, Homo sapiens
  Payload ID: 2240
  Gene Symbol: CASC4
  Gene Name: cancer susceptibility candidate 4
  Uniprot ID: Q6P4E1
  ENST ID: ENST00000557945
  CDS Start-End: 300-833
ccgtgaggtgttgggtttgggggacgctggcagctgggttctcccggttcccttgggcaggtgcagggtcgggttcaaagcctccggaacgcgttttggcctgatttgaggaggggggcggggagggacctgcggcttgcggccccgcccccttctccggctcgcagccgaccggtaagcccgcctcctccctcggccggccctggggccgtgtccgccgggcaactccagccgaggcctgggcttctgcctgcaggtgtctgcggcgaggcccctagggtacagcccgatttggccccatggtgggtttcggggccaaccggcgggctggccgcctgccctctctcgtgctggtggtgctgctggtggtgatcgtcgtcctcgccttcaactactggagcatctcctcccgccacgtcctgcttcaggaggaggtggccgagctgcagggccaggtccagcgcaccgaagtggcccgcgggcggctggaaaagcgcaattcggacctcttgctgttggtggacacgcacaagaaacagatcgaccagaaggaggccgactacggccgcctcagcagccggctgcaggccagagagggcctcgggaagagatgcgaggatgacaaggttaaactacagaacaacatatcgtatcagatggcagacatacatcatttaaaggagcaacttgctgagcttcgtcaggaatttcttcgacaagaagaccagcttcaggactataggaagaacaatacttaccttgtgaagaggttagaatatgaaagcaagagacccaaaagattcaatcaaatgatggaaaggaattggatataaacaatcaagtagtacctaaaaatattccaaaagtagctgagaatgttgcagataagaatgaagaaccctcaagcaatcatattccacatgggaaagaacaaatcaaaagaggtggtgatgcagggatgcctggaatagaagagaatgacctagcaaaagttgatgatcttccccctggccctggttcccagacatcatctctgaacctgctgggggaatttgccaccctgaaaggaaggacacaagcccagctggcttcatcatctgctgattgtggagctctagggccttgagcaaacatatgtggtagccaggtagtggttacagcaggccttggtaagacccagtgctgtattggcttcaggtctaacccagcacagttctaatggtggtgccacagtggtacatgcctatagtcccagctactccagaagctgaggtgggaagatcacttgagcctgggagattgaggctgcagtgagctgagatcatgccattgcactccagcttgggcaccagagcaagaccttgtctcaaaaaaagaaaaaaaaaa

SEQ ID NO: 113901 - DNA, 427 bp, Homo sapiens
  Payload ID: 2240
  Gene Symbol: CASC4
  Gene Name: cancer susceptibility candidate 4
  ENST ID: ENST00000558735
  CDS Start-End: 1-248
gtcgtcctcgccttcaactactggagcatctcctcccgccacgtcctgcttcaggaggaggtggccgagctgcagggccaggtccagcgcaccgaagtggcccgcgggcggctggaaaagcgcaattcggacctcttgctgttggtggacacgcacaagaaacagatcgaccagaaggaggccgactacggccgcctcagcagccggctgcaggccagagagggcctcgggaagagatgcgaggatgacaagagcaacttgctgagcttcgtcaggaatttcttcgacaagaagaccagcttcaggactataggaagaacaatacttaccttgtgaagaggttagaatatgaaagttttcagtgtggacagcagatgaaggaattgagagcacagcatgaagaaaatattaaaaagttagcagacca

SEQ ID NO: 113902 - DNA, 9573 bp, Homo sapiens
  Payload ID: 2241
  Gene Symbol: CASC5
  Gene Name: cancer susceptibility candidate 5
  Uniprot ID: Q8NG31
  ENST ID: ENST00000346991
  CDS Start-End: 391-7419
aagcaatcgaaagaagatggccgctcccacgattgtgggggaggtctccactggggaggggcagaggaaattcggtcgaaaaagagataaagctgaaggaaataaaattggcacggagtctgggaaagtagtttccctaaaggagtcttagaaatagggttggtctggaacctaaggggcggagccgacgcgtagagccgctttgcgcgtgcgcatcacctaggcggttagatttgaatacttcactgaggcgagccgggcgttgtgagcggactgctagaggcggctgtctgtttccgctctaaggaaactcagagcgtgtggaccccaaacaagtctgcgcaaaatttgtcgaggaggtttgccgcggcagaaaagttttcttcaaaaatggatggggtgtcttcagaggctaatgaagaaaatgacaatatagagagacctgttagaagacggcattcttcaatattgaaacccccaaggagtcctcttcaggacctcagaggtgggaatgaaagagttcaggaatccaatgctttgagaaataagaaaaactctcgtcgagtcagctttgcagatactataaaggtattccagacggagtctcatatgaaaatagtgagaaagtcagaaatggaaggctgcagtgcaatggtgccatctcagctgcaacttctgcctcctgggtttaagcgattctcctgcctcagcctcccagaaacagaaacaggagaaaatcttcttttgatacagaataagaaattagaagataattactgtgaaattactgggatgaacacattgctttctgctcccattcatacccagatgcaacagaaggagttttcaattatagaacatacccgtgaaaggaaacatgcaaatgaccagacagtcattttttcagatgaaaaccagatggacctgacatcaagtcacactgtaatgattaccaaaggccttttagataatcccataagtgaaaagtccaccaagatagataccacatcatttctagctaatttaaagcttcacaccgaggactcaagaatgaaaaaagaagtaaatttttccgtggatcaaaacacttcttcagaaaataaaatagatttcaatgacttcataaaaagattgaaaacaggaaaatgtagtgcttttcctgatgtgcctgataaagaaaattttgagatacctatttattccaaggaaccgaacagtgcctcttctacacatcaaatgcatgtatctcttaaggaagatgaaaataacagtaatattactaggctctttagagaaaaagatgatgggatgaatttcacccagtgtcatacagccaatattcagacattgattcccacatccagtgagaccaactcacgggaatctaaaggtaatgatattacaatttatggcaatgactttatggacttgacatttaaccacactttgcagatcttacctgcaacaggtaatttttctgaaatagaaaatcaaactcagaatgccatggatgtaacaacaggttatggaactaaagcttcaggaaataaaacagtttttaagagtaaacaaaatactgcttttcaagacctttccataaactctgcagacaaaatacatattaccagaagtcatattatgggggcagaaactcacatagtctcacagacttgtaatcaggatgccagaatattagccatgaccccagaatctatatattctaatccatctattcaaggttgtaagactgttttctattctagttgtaatgatgccatggaaatgaccaaatgtctctcaaatatgagagaggagaaaaatttgctaaagcatgacagtaattatgctaaaatgtattgcaatccagatgctatgtcttctctcacagagaaaactatttattccggagaggagaacatggacattaccaagagtcatacagttgcaatagataatcaaatttttaaacaagatcaatcaaatgtgcaaatagcagctgcaccaacacccgaaaaagaaatgatgctccaaaatcttatgaccacatcagaagatgggaaaatgaatgtaaattgtaactcagttcctcatgtatctaaggaaagaatacagcagagcctgtcaaatcctttgtctatttcattgactgatagaaagactgaactcttatcaggtgaaaatatggatttgactgaaagtcacacaagtaacttaggaagtcaggttcctcttgcagcttataatctagcaccggagagtaccagtgaatctcactctcagagcaaaagctcttcagatgaatgtgaagaaattaccaaaagtcgtaatgaaccatttcagcgatcagacataatagccaaaaacagcttaaccgacacctggaacaaagacaaagattgggttttgaagattttgccctaccttgataaagattctcctcagtcagctgattgtaatcaggagatagcaacaagccataatatagtctactgtggtggagttcttgataaacaaataactaatagaaatacagtatcatgggaacaatctttgttttctaccacaaagccattattttcatcaggacagttctctatgaaaaatcatgatactgctataagtagtcatacagtgaaatctgtactaggccagaattctaaactggctgagccactgaggaaaagtttaagcaatcccacacctgactattgccatgacaagatgattatatgttcagaggaagagcaaaatatggatctaacaaagagccacactgtcgtcattggatttggtccttctgaactacaagaacttggtaaaactaatttagaacacactactggccagctaacaacaatgaacagacagatagctgtaaaagttgaaaaatgtggtaaaagtcccatagaaaaaagtggagtgcttaaatctaactgtattatggatgtgttagaggacgaaagtgtacagaaacctaaatttccaaaggaaaagcaaaatgtcaaaatttggggaaggaaaagtgttggtggaccaaaaattgataagactattgtattttcagaagacgataagaatgatatggatatcactaagagttatacaatagaaataaaccatagacctttattagagaaacgtgattgtcatttggtgccattggcaggaacttctgaaactattttatatacatgtaggcaggatgacatggagatcactagaagtcacacaactgccttagaatgtaaaactgtctcaccagatgaaataactactaggcctatggacaaaactgtagtgtttgtagataatcatgttgaactagaaatgacagagtcccatactgttttcattgactaccaagaaaaggaaagaacagacagacctaactttgaactatcccaaaggaaaagcctaggaacaccaacagtgatatgtactcctactgaggagagtgttttctttccaggaaatggtgaaagtgaccgtctagtagcaaatgacagccagctaacccctctggaggaatggtctaataataggggccctgtagaggtagctgataacatggaattgtctaaatcagccacttgcaaaaacatcaaagatgtacaaagtcctggatttctgaatgaacctctatcaagcaaaagtcagagaagaaaaagccttaagctaaaaaatgacaagaccattgtattttcagagaatcataaaaatgatatggatattacccagagttgtatggtggaaatagataacgaaagtgccctggaggataaagaggacttccatttggcaggggcttctaaaactattttgtattcatgtgggcaggatgacatggagatcactaggagtcacacaactgccttagaatgtaaaactctcctgccaaatgaaatagctattaggcccatggacaaaaccgtattgttcacagataattacagtgatctggaagtcaccgattcccatactgttttcattgactgtcaagccacagagaaaatacttgaagaaaaccctaaatttggaataggaaaaggaaaaaacttgggtgtttcctttcctaaggataatagctgtgttcaagaaatcgctgaaaaacaagcactggctgtaggaaacaaaatagttcttcacaccgagcaaaagcaacaactctttgctgctactaatagaactactaatgaaatcatcaaatttcatagtgctgctatggatgaaaaggtcatagggaaagttgtagaccaggcctgtacattggaaaaagcgcaagttgaaagctgtcagttaaataatagagatagaagaaatgtggactttacaagtagtcatgcaactgctgtttgtggatccagtgataattattcctgtttaccaaatgttatttcctgtactgataatttggagggtagtgccatgctcttatgtgataaagatgaggaaaaagccaattattgcccagtgcaaaatgatcttgcttatgcaaatgattttgccagtgaatattacttggaatctgagggacagcctctctctgctccttgtcctttgttagagaaggaagaagttattcaaaccagtaccaaaggacagttagactgtgttataacactgcacaaagatcaagatctgattaaggatccacgaaatctattggctaatcaaactttagtatatagtcaagatctgggggagatgactaaacttaattcaaagcgagtatcttttaagcttccaaaggatcaaatgaaagtctatgttgatgacatttatgttattcctcagcctcatttctcaaccgaccaacctccattacctaaaaaaggacagagtagtatcaataaagaagaagtaatactgtctaaagctggaaataagagtttaaatattatagaaaattcctctgcacccatatgtgaaaacaagcccaaaatactcaatagtgaggaatggtttgctgcagcctgtaaaaaagaactgaaggaaaatattcaaacaactaactataatacagctctagatttccacagtaactcagacgtaactaagcaagtcattcaaactcatgtcaatgctggagaagcaccagatcctgtaattacatctaatgttccatgttttcatagtatcaaaccaaatctgaataatttgaatggaaaaactggagagtttttagcctttcaaactgttcatctaccaccccttccagagcaattacttgaattaggaaataaggcacacaatgatatgcatatagtgcaagctacagaaatacataatattaacataatctccagcaatgctaaagatagtagagatgaggaaaataaaaagtctcataatggagctgaaaccacctctctaccgccaaagacagtttttaaagataaagtaaggagatgttctttgggaatctttttgcctagattgcccaacaagagaaattgtagtgtcactggtattgatgacctggaacagattccagcagacacaactgatataaatcacttagaaactcagccggtctctagcaaagattcaggcattggatctgttgcaggtaaactgaacctaagtccttctcaatatataaatgaggaaaatcttcctgtatatcctgatgagatcaattcttcagactctattaacatagaaactgaggaaaaggccttgattgagacataccaaaaagagatttcaccatatgaaaataaaatgggaaaaacttgcaatagccaaaaaagaacgtgggtacaagaagaagaagatattcataaggagaaaaaaatcagaaaaaatgagattaagtttagtgatacgacacaagatcgggagatttttgatcaccatactgaagaggatatagataaaagtgctaacagtgtattgataaaaaacctgagcaggaccccatctagttgcagcagctctctggattcaatcaaggctgatgggacctctctggacttcagcacttaccgcagtagtcaaatggaatcacagtttctcagagatactatttgtgaagagagcttgagggagaaactccaagatgggagaataacaataagggagttctttatacttctccaggtccacatcttgatacagaaaccccgacagagcaatctcccaggcaattttactgtaaacacaccacctactccagaagacctgatgttaagtcaatatgtttaccgacccaagatacagatttatagagaagattgtgaggctcgtcgccaaaagattgaagaattaaagctttctgcatcgaaccaagataagctgttggttgatataaataagaacctgtgggaaaaaatgagacactgctctgacaaagagctgaaggcctttggaatttatcttaacaaaataaagtcatgttttaccaagatgactaaagtcttcactcaccaaggaaaagtggctctgtatggcaagctggtgcagtcagctcagaatgagagggagaaacttcaaataaagatagatgagatggataaaatacttaagaagatcgataactgcctcactgagatggaaacagaaactaagaatttggaggatgaagagaaaaacaatcctgtggaagaatgggattctgaaatgagagctgcagaaaaagaattggaacagctgaaaactgaagaagaggagcttcaaagaaatctcttagaactggaggtacaaaaagagcagacccttgctcaaatagactttatgcaaaaacaaagaaatagaactgaagagctactggatcagttgagcttgtctgagtgggatgtcgttgagtggagtgatgatcaagctgtattcacctttgtttatgacacgatacaactcaccatcacctttgaagagtcagttgttggtttccctttcctggacaagcgttataggaagattgttgatgtcaattttcaatctctgttagatgaggatcaagctcctccttcctcccttttagttcataagcttattttccagtacgttgaagaaaaggaatcctggaagaagacatgtacaacccagcatcagttacccaagatgcttgaagaattctcactggtagtgcaccattgcagactccttggagaggagattgagtatttaaagagatggggaccaaattataacctaatgaacatagatattaataataatgaattgagacttttattctctagctccgcagcatttgcaaagtttgaaataactttgtttctctcagcctattatccatctgtaccattaccttccaccattcagaatcacgttgggaacactagccaagatgatattgctaccattctatctaaagtgccactggagaacaactacctgaagaatgtagtcaagcaaatttaccaagatctgtttcaggactgccatttctaccactagacccttggaccaccattggaacaaccaagcagaatgtacttgatattatttcagggtcccattgctgttcagcctttgtttttacgtcattacaagctgagtaaaattccttctgatgatgttatagttaatctgtatgttttttatatctctgcagaatgatggtgatgaagtctggatggtaggcctcatagcctactatcaacttactcatctttgtaccaaaggtttaagtaataggacacttaggaaaaatgtctcctaactaaactagtgctttctgctttagtacaagccctaaggattaacttaagtataagaagtgttatcactgacaagaacattagccattttcccataactagatagagctatgattttttaggttgcctggcttctgcctagcagatatttctggagtagaaatgtatctgtctacaaactattatcctttttctccgttactaaaatgctattaagagaaagtagggctgggtgcggtggctcacacctgtaataccagcagtttgggaggccaaaatgggtgaatagcctgagtccaggaattcaagaccagcctgggcaacatggcaaaaccccacctctacaaaaaatacgaaagttagccagtcatggtggcttgcgcctgtggtcccagctacttaggagcttaaggcaggaggatcacttgagcccaggaggcagaggttgcagtaagccgagaccattccactgcactccagcctaggcaacagagcaagaccctgtctcaaaaaaacaaaaagagagaaagcaatagcactcagctattgaaatggttgccatctttttttgaaggccttgctttttattctatggtgtctattatgttttctttttctttttttttgagacggagtcttgctctgtcgcccaggctggagtgcagtggcatgatctcagctcactgcaagctccgcctcctgggttcacgccattctcctgcctcagcctcccgagtagctgggactacaggtgcccaccaccatgccgggctaattttttgtctttttagtagaaatggggtttcacgatgttagccaggatggtctcgatctcctgacctcgtgatccgcctgcctcggcttcaaagtgctgggattacaggtgtgagccaccacacccagcaatgttttcttaataagtatagtttttctagggaaagttaattcatttttgtctagtacatatatgtaaatatattaatgttgtttttgtgtttgtgatgtagtaaggagatgtacatagaaattcattgaggtatatagatactcatctgtctaggcagttcccaattttctgaagaatgttttacagcaaaattttctattttcttttattaaatagtgacacgtcaaacaatgtcacatccaaaacactagtttcatcaatttctagcagtaataatagacttgctgtaagtattgttttctgatgccatacccttgtcatacatattattaaatgaccaatattatgtatgaagtagacaaaaaaatttactcaaacttcattcaaatcctaattgtgataatttttgttttatatttaattataaaccaaaatacatttgcatttttaagctaatttgtctcaaaattttgctttatatttttggatcaggttaaagtcctgtggatcccctgaatgttattgtccctcttgattggtttttacttctgagctatacgtcaaaagacacataagcttcaaaagtcaagacaaacctcatttgccataaaaatcaagatatagatgttctgttccgtaaactccttgaaaaacattttaaagtcatcaatatgatctgtttcccatgaaacttaagttagctttcttattggagttatttcttttctgtaagtctgaaaagtagagattttgttttacgcattttagtaacctgcaacaaccaactctaaaaaagatttggcttgtaatgacggtctctgcttttttgggtttggagtacacaattgtaatatttacttagttatttgtgtttttctttgttcaaggtattgactagtttcataaattttttgaaagtttttctttcattggttggaaagcagattacattttgcactattaaaataagtttattactttaaa

SEQ ID NO: 113903 - DNA, 7607 bp, Homo sapiens
  Payload ID: 2241
  Gene Symbol: CASC5
  Gene Name: cancer susceptibility candidate 5
  Uniprot ID: Q8NG31
  ENST ID: ENST00000399668
  CDS Start-End: 162-7112
agatttgaatacttcactgaggcgagccgggcgttgtgagcggactgctagaggcggctgtctgtttccgctctaaggaaactcagagcgtgtggaccccaaacaagtctgcgcaaaatttgtcgaggaggtttgccgcggcagaaaagttttcttcaaaaatggatggggtgtcttcagaggctaatgaagaaaatgacaatatagagagacctgttagaagacggcattcttcaatattgaaacccccaaggagtcctcttcaggacctcagaggtgggaatgaaagagttcaggaatccaatgctttgagaaataagaaaaactctcgtcgagtcagctttgcagatactataaaggtattccagacggagtctcatatgaaaatagtgagaaagtcagaaatggaagaaacagaaacaggagaaaatcttcttttgatacagaataagaaattagaagataattactgtgaaattactgggatgaacacattgctttctgctcccattcatacccagatgcaacagaaggagttttcaattatagaacatacccgtgaaaggaaacatgcaaatgaccagacagtcattttttcagatgaaaaccagatggacctgacatcaagtcacactgtaatgattaccaaaggccttttagataatcccataagtgaaaagtccaccaagatagataccacatcatttctagctaatttaaagcttcacaccgaggactcaagaatgaaaaaagaagtaaatttttccgtggatcaaaacacttcttcagaaaataaaatagatttcaatgacttcataaaaagattgaaaacaggaaaatgtagtgcttttcctgatgtgcctgataaagaaaattttgagatacctatttattccaaggaaccgaacagtgcctcttctacacatcaaatgcatgtatctcttaaggaagatgaaaataacagtaatattactaggctctttagagaaaaagatgatgggatgaatttcacccagtgtcatacagccaatattcagacattgattcccacatccagtgagaccaactcacgggaatctaaaggtaatgatattacaatttatggcaatgactttatggacttgacatttaaccacactttgcagatcttacctgcaacaggtaatttttctgaaatagaaaatcaaactcagaatgccatggatgtaacaacaggttatggaactaaagcttcaggaaataaaacagtttttaagagtaaacaaaatactgcttttcaagacctttccataaactctgcagacaaaatacatattaccagaagtcatattatgggggcagaaactcacatagtctcacagacttgtaatcaggatgccagaatattagccatgaccccagaatctatatattctaatccatctattcaaggttgtaagactgttttctattctagttgtaatgatgccatggaaatgaccaaatgtctctcaaatatgagagaggagaaaaatttgctaaagcatgacagtaattatgctaaaatgtattgcaatccagatgctatgtcttctctcacagagaaaactatttattccggagaggagaacatggacattaccaagagtcatacagttgcaatagataatcaaatttttaaacaagatcaatcaaatgtgcaaatagcagctgcaccaacacccgaaaaagaaatgatgctccaaaatcttatgaccacatcagaagatgggaaaatgaatgtaaattgtaactcagttcctcatgtatctaaggaaagaatacagcagagcctgtcaaatcctttgtctatttcattgactgatagaaagactgaactcttatcaggtgaaaatatggatttgactgaaagtcacacaagtaacttaggaagtcaggttcctcttgcagcttataatctagcaccggagagtaccagtgaatctcactctcagagcaaaagctcttcagatgaatgtgaagaaattaccaaaagtcgtaatgaaccatttcagcgatcagacataatagccaaaaacagcttaaccgacacctggaacaaagacaaagattgggttttgaagattttgccctaccttgataaagattctcctcagtcagctgattgtaatcaggagatagcaacaagccataatatagtctactgtggtggagttcttgataaacaaataactaatagaaatacagtatcatgggaacaatctttgttttctaccacaaagccattattttcatcaggacagttctctatgaaaaatcatgatactgctataagtagtcatacagtgaaatctgtactaggccagaattctaaactggctgagccactgaggaaaagtttaagcaatcccacacctgactattgccatgacaagatgattatatgttcagaggaagagcaaaatatggatctaacaaagagccacactgtcgtcattggatttggtccttctgaactacaagaacttggtaaaactaatttagaacacactactggccagctaacaacaatgaacagacagatagctgtaaaagttgaaaaatgtggtaaaagtcccatagaaaaaagtggagtgcttaaatctaactgtattatggatgtgttagaggacgaaagtgtacagaaacctaaatttccaaaggaaaagcaaaatgtcaaaatttggggaaggaaaagtgttggtggaccaaaaattgataagactattgtattttcagaagacgataagaatgatatggatatcactaagagttatacaatagaaataaaccatagacctttattagagaaacgtgattgtcatttggtgccattggcaggaacttctgaaactattttatatacatgtaggcaggatgacatggagatcactagaagtcacacaactgccttagaatgtaaaactgtctcaccagatgaaataactactaggcctatggacaaaactgtagtgtttgtagataatcatgttgaactagaaatgacagagtcccatactgttttcattgactaccaagaaaaggaaagaacagacagacctaactttgaactatcccaaaggaaaagcctaggaacaccaacagtgatatgtactcctactgaggagagtgttttctttccaggaaatggtgaaagtgaccgtctagtagcaaatgacagccagctaacccctctggaggaatggtctaataataggggccctgtagaggtagctgataacatggaattgtctaaatcagccacttgcaaaaacatcaaagatgtacaaagtcctggatttctgaatgaacctctatcaagcaaaagtcagagaagaaaaagccttaagctaaaaaatgacaagaccattgtattttcagagaatcataaaaatgatatggatattacccagagttgtatggtggaaatagataacgaaagtgccctggaggataaagaggacttccatttggcaggggcttctaaaactattttgtattcatgtgggcaggatgacatggagatcactaggagtcacacaactgccttagaatgtaaaactctcctgccaaatgaaatagctattaggcccatggacaaaaccgtattgttcacagataattacagtgatctggaagtcaccgattcccatactgttttcattgactgtcaagccacagagaaaatacttgaagaaaaccctaaatttggaataggaaaaggaaaaaacttgggtgtttcctttcctaaggataatagctgtgttcaagaaatcgctgaaaaacaagcactggctgtaggaaacaaaatagttcttcacaccgagcaaaagcaacaactctttgctgctactaatagaactactaatgaaatcatcaaatttcatagtgctgctatggatgaaaaggtcatagggaaagttgtagaccaggcctgtacattggaaaaagcgcaagttgaaagctgtcagttaaataatagagatagaagaaatgtggactttacaagtagtcatgcaactgctgtttgtggatccagtgataattattcctgtttaccaaatgttatttcctgtactgataatttggagggtagtgccatgctcttatgtgataaagatgaggaaaaagccaattattgcccagtgcaaaatgatcttgcttatgcaaatgattttgccagtgaatattacttggaatctgagggacagcctctctctgctccttgtcctttgttagagaaggaagaagttattcaaaccagtaccaaaggacagttagactgtgttataacactgcacaaagatcaagatctgattaaggatccacgaaatctattggctaatcaaactttagtatatagtcaagatctgggggagatgactaaacttaattcaaagcgagtatcttttaagcttccaaaggatcaaatgaaagtctatgttgatgacatttatgttattcctcagcctcatttctcaaccgaccaacctccattacctaaaaaaggacagagtagtatcaataaagaagaagtaatactgtctaaagctggaaataagagtttaaatattatagaaaattcctctgcacccatatgtgaaaacaagcccaaaatactcaatagtgaggaatggtttgctgcagcctgtaaaaaagaactgaaggaaaatattcaaacaactaactataatacagctctagatttccacagtaactcagacgtaactaagcaagtcattcaaactcatgtcaatgctggagaagcaccagatcctgtaattacatctaatgttccatgttttcatagtatcaaaccaaatctgaataatttgaatggaaaaactggagagtttttagcctttcaaactgttcatctaccaccccttccagagcaattacttgaattaggaaataaggcacacaatgatatgcatatagtgcaagctacagaaatacataatattaacataatctccagcaatgctaaagatagtagagatgaggaaaataaaaagtctcataatggagctgaaaccacctctctaccgccaaagacagtttttaaagataaagtaaggagatgttctttgggaatctttttgcctagattgcccaacaagagaaattgtagtgtcactggtattgatgacctggaacagattccagcagacacaactgatataaatcacttagaaactcagccggtctctagcaaagattcaggcattggatctgttgcaggtaaactgaacctaagtccttctcaatatataaatgaggaaaatcttcctgtatatcctgatgagatcaattcttcagactctattaacatagaaactgaggaaaaggccttgattgagacataccaaaaagagatttcaccatatgaaaataaaatgggaaaaacttgcaatagccaaaaaagaacgtgggtacaagaagaagaagatattcataaggagaaaaaaatcagaaaaaatgagattaagtttagtgatacgacacaagatcgggagatttttgatcaccatactgaagaggatatagataaaagtgctaacagtgtattgataaaaaacctgagcaggaccccatctagttgcagcagctctctggattcaatcaaggctgatgggacctctctggacttcagcacttaccgcagtagtcaaatggaatcacagtttctcagagatactatttgtgaagagagcttgagggagaaactccaagatgggagaataacaataagggagttctttatacttctccaggtccacatcttgatacagaaaccccgacagagcaatctcccaggcaattttactgtaaacacaccacctactccagaagacctgatgttaagtcaatatgtttaccgacccaagatacagatttatagagaagattgtgaggctcgtcgccaaaagattgaagaattaaagctttctgcatcgaaccaagataagctgttggttgatataaataagaacctgtgggaaaaaatgagacactgctctgacaaagagctgaaggcctttggaatttatcttaacaaaataaagtcatgttttaccaagatgactaaagtcttcactcaccaaggaaaagtggctctgtatggcaagctggtgcagtcagctcagaatgagagggagaaacttcaaataaagatagatgagatggataaaatacttaagaagatcgataactgcctcactgagatggaaacagaaactaagaatttggaggatgaagagaaaaacaatcctgtggaagaatgggattctgaaatgagagctgcagaaaaagaattggaacagctgaaaactgaagaagaggagcttcaaagaaatctcttagaactggaggtacaaaaagagcagacccttgctcaaatagactttatgcaaaaacaaagaaatagaactgaagagctactggatcagttgagcttgtctgagtgggatgtcgttgagtggagtgatgatcaagctgtattcacctttgtttatgacacgatacaactcaccatcacctttgaagagtcagttgttggtttccctttcctggacaagcgttataggaagattgttgatgtcaattttcaatctctgttagatgaggatcaagctcctccttcctcccttttagttcataagcttattttccagtacgttgaagaaaaggaatcctggaagaagacatgtacaacccagcatcagttacccaagatgcttgaagaattctcactggtagtgcaccattgcagactccttggagaggagattgagtatttaaagagatggggaccaaattataacctaatgaacatagatattaataataatgaattgagacttttattctctagctccgcagcatttgcaaagtttgaaataactttgtttctctcagcctattatccatctgtaccattaccttccaccattcagaatcacgttgggaacactagccaagatgatattgctaccattctatctaaagtgccactggagaacaactacctgaagaatgtagtcaagcaaatttaccaagatctgtttcaggactgccatttctaccactagacccttggaccaccattggaacaaccaagcagaatgtacttgatattatttcagggtcccattgctgttcagcctttgtttttacgtcattacaagctgagtaaaattccttctgatgatgttatagttaatctgtatgttttttatatctctgcagaatgatggtgatgaagtctggatggtaggcctcatagcctactatcaacttactcatctttgtaccaaaggtttaagtaataggacacttaggaaaaatgtctcctaactaaactagtgctttctgctttagtacaagccctaaggattaacttaagtataagaagtgttatcactgacaagaacattagccattttcccataactagatagagctatgattttttaggttgcctggcttctgcctagcagatatttctggagtagaaatgtatctgtctacaaactattatcctttttctccgttactaaaatgctattaagagaaagtagggctgg

SEQ ID NO: 113904 - DNA, 5584 bp, Homo sapiens
  Payload ID: 2241
  Gene Symbol: CASC5
  Gene Name: cancer susceptibility candidate 5
  ENST ID: ENST00000526913
  CDS Start-End: 1-4084
gtcccatactgttttcattgactaccaagaaaaggaaagaacagacagacctaactttgaactatcccaaaggaaaagcctaggaacaccaacagtgatatgtactcctactgaggagagtgttttctttccaggaaatggtgaaagtgaccgtctagtagcaaatgacagccagctaacccctctggaggaatggtctaataataggggccctgtagaggtagctgataacatggaattgtctaaatcagccacttgcaaaaacatcaaagatgtacaaagtcctggatttctgaatgaacctctatcaagcaaaagtcagagaagaaaaagccttaagctaaaaaatgacaagaccattgtattttcagagaatcataaaaatgatatggatattacccagagttgtatggtggaaatagataacgaaagtgccctggaggataaagaggacttccatttggcaggggcttctaaaactattttgtattcatgtgggcaggatgacatggagatcactaggagtcacacaactgccttagaatgtaaaactctcctgccaaatgaaatagctattaggcccatggacaaaaccgtattgttcacagataattacagtgatctggaagtcaccgattcccatactgttttcattgactgtcaagccacagagaaaatacttgaagaaaaccctaaatttggaataggaaaaggaaaaaacttgggtgtttcctttcctaaggataatagctgtgttcaagaaatcgctgaaaaacaagcactggctgtaggaaacaaaatagttcttcacaccgagcaaaagcaacaactctttgctgctactaatagaactactaatgaaatcatcaaatttcatagtgctgctatggatgaaaaggtcatagggaaagttgtagaccaggcctgtacattggaaaaagcgcaagttgaaagctgtcagttaaataatagagatagaagaaatgtggactttacaagtagtcatgcaactgctgtttgtggatccagtgataattattcctgtttaccaaatgttatttcctgtactgataatttggagggtagtgccatgctcttatgtgataaagatgaggaaaaagccaattattgcccagtgcaaaatgatcttgcttatgcaaatgattttgccagtgaatattacttggaatctgagggacagcctctctctgctccttgtcctttgttagagaaggaagaagttattcaaaccagtaccaaaggacagttagactgtgttataacactgcacaaagatcaagatctgattaaggatccacgaaatctattggctaatcaaactttagtatatagtcaagatctgggggagatgactaaacttaattcaaagcgagtatcttttaagcttccaaaggatcaaatgaaagtctatgttgatgacatttatgttattcctcagcctcatttctcaaccgaccaacctccattacctaaaaaaggacagagtagtatcaataaagaagaagtaatactgtctaaagctggaaataagagtttaaatattatagaaaattcctctgcacccatatgtgaaaacaagcccaaaatactcaatagtgaggaatggtttgctgcagcctgtaaaaaagaactgaaggaaaatattcaaacaactaactataatacagctctagatttccacagtaactcagacgtaactaagcaagtcattcaaactcatgtcaatgctggagaagcaccagatcctgtaattacatctaatgttccatgttttcatagtatcaaaccaaatctgaataatttgaatggaaaaactggagagtttttagcctttcaaactgttcatctaccaccccttccagagcaattacttgaattaggaaataaggcacacaatgatatgcatatagtgcaagctacagaaatacataatattaacataatctccagcaatgctaaagatagtagagatgaggaaaataaaaagtctcataatggagctgaaaccacctctctaccgccaaagacagtttttaaagataaagtaaggagatgttctttgggaatctttttgcctagattgcccaacaagagaaattgtagtgtcactggtattgatgacctggaacagattccagcagacacaactgatataaatcacttagaaactcagccggtctctagcaaagattcaggcattggatctgttgcaggtaaactgaacctaagtccttctcaatatataaatgaggaaaatcttcctgtatatcctgatgagatcaattcttcagactctattaacatagaaactgaggaaaaggccttgattgagacataccaaaaagagatttcaccatatgaaaataaaatgggaaaaacttgcaatagccaaaaaagaacgtgggtacaagaagaagaagatattcataaggagaaaaaaatcagaaaaaatgagattaagtttagtgatacgacacaagatcgggagatttttgatcaccatactgaagaggatatagataaaagtgctaacagtgtattgataaaaaacctgagcaggaccccatctagttgcagcagctctctggattcaatcaaggctgatgggacctctctggacttcagcacttaccgcagtagtcaaatggaatcacagtttctcagagatactatttgtgaagagagcttgagggagaaactccaagatgggagaataacaataagggagttctttatacttctccaggtccacatcttgatacagaaaccccgacagagcaatctcccaggcaattttactgtaaacacaccacctactccagaagacctgatgttaagtcaatatgtttaccgacccaagatacagatttatagagaagattgtgaggctcgtcgccaaaagattgaagaattaaagctttctgcatcgaaccaagataagctgttggttgatataaataagaacctgtgggaaaaaatgagacactgctctgacaaagagctgaaggcctttggaatttatcttaacaaaataaagtcatgttttaccaagatgactaaagtcttcactcaccaaggaaaagtggctctgtatggcaagctggtgcagtcagctcagaatgagagggagaaacttcaaataaagatagatgagatggataaaatacttaagaagatcgataactgcctcactgagatggaaacagaaactaagaatttggaggatgaagagaaaaacaatcctgtggaagaatgggattctgaaatgagagctgcagaaaaagaattggaacagctgaaaactgaagaagaggagcttcaaagaaatctcttagaactggaggtacaaaaagagcagacccttgctcaaatagactttatgcaaaaacaaagaaatagaactgaagagctactggatcagttgagcttgtctgagtgggatgtcgttgagtggagtgatgatcaagctgtattcacctttgtttatgacacgatacaactcaccatcacctttgaagagtcagttgttggtttccctttcctggacaagcgttataggaagattgttgatgtcaattttcaatctctgttagatgaggatcaagctcctccttcctcccttttagttcataagcttattttccagtacgttgaagaaaaggaatcctggaagaagacatgtacaacccagcatcagttacccaagatgcttgaagaattctcactggtagtgcaccattgcagactccttggagaggagattgagtatttaaagagatggggaccaaattataacctaatgaacatagatattaataataatgaattgagacttttattctctagctccgcagcatttgcaaagtttgaaataactttgtttctctcagcctattatccatctgtaccattaccttccaccattcagaatcacgttgggaacactagccaagatgatattgctaccattctatctaaagtgccactggagaacaactacctgaagaatgtagtcaagcaaatttaccaagatctgtttcaggactgccatttctaccactagacccttggaccaccattggaacaaccaagcagaatgtacttgatattatttcagggtcccattgctgttcagcctttgtttttacgtcattacaagctgagtaaaattccttctgatgatgttatagttaatctgtatgttttttatatctctgcagaatgatggtgatgaagtctggatggtaggcctcatagcctactatcaacttactcatctttgtaccaaaggtttaagtaataggacacttaggaaaaatgtctcctaactaaactagtgctttctgctttagtacaagccctaaggattaacttaagtataagaagtgttatcactgacaagaacattagccattttcccataactagatagagctatgattttttaggttgcctggcttctgcctagcagatatttctggagtagaaatgtatctgtctacaaactattatcctttttctccgttactaaaatgctattaagagaaagtagggctgggtgtgagccaccacacccagcaatgttttcttaataagtatagtttttctagggaaagttaattcatttttgtctagtacatatatgtaaatatattaatgttgtttttgtgtttgtgatgtagtaaggagatgtacatagaaattcattgaggtatatagatactcatctgtctaggcagttcccaattttctgaagaatgttttacagcaaaattttctattttcttttattaaatagtgacacgtcaaacaatgtcacatccaaaacactagtttcatcaatttctagcagtaataatagacttgctgtaagtattgttttctgatgccatacccttgtcatacatattattaaatgaccaatattatgtatgaagtagacaaaaaaatttactcaaacttcattcaaatcctaattgtgataatttttgttttatatttaattataaaccaaaatacatttgcatttttaagctaatttgtctcaaaattttgctttatatttttggatcaggttaaagtcctgtggatcccctgaatgttattgtccctcttgattggtttttacttctgagctatacgtcaaaagacacataagcttcaaaagtcaagacaaacctcatttgccataaaaatcaagatatagatgttctgttccgtaaactccttgaaaaacattttaaagtcatcaatatgatctgtttcccatgaaacttaagttagctttcttattggagttatttcttttctgtaagtctgaaaagtagagattttgttttacgcattttagtaacctgcaacaaccaactctaaaaaagatttggcttgtaatgacggtctctgcttttttgggtttggagtacacaattgtaatatttacttagttatttgtgtttttctttgttcaaggtattgactagtttcataaattttttgaaagtttttctttcattggttggaaagcagattacattttgcactattaaaataagtttattacttt

SEQ ID NO: 113905 - DNA, 5404 bp, Homo sapiens
  Payload ID: 2241
  Gene Symbol: CASC5
  Gene Name: cancer susceptibility candidate 5
  ENST ID: ENST00000527044
  CDS Start-End: 162-5402
agatttgaatacttcactgaggcgagccgggcgttgtgagcggactgctagaggcggctgtctgtttccgctctaaggaaactcagagcgtgtggaccccaaacaagtctgcgcaaaatttgtcgaggaggtttgccgcggcagaaaagttttcttcaaaaatggatggggtgtcttcagaggctaatgaagaaaatgacaatatagagagacctgttagaagacggcattcttcaatattgaaacccccaaggagtcctcttcaggacctcagaggtgggaatgaaagagttcaggaatccaatgctttgagaaataagaaaaactctcgtcgagtcagctttgcagatactataaaggtattccagacggagtctcatatgaaaatagtgagaaagtcagaaatggaagaaacagaaacaggagaaaatcttcttttgatacagaataagaaattagaagataattactgtgaaattactgggatgaacacattgctttctgctcccattcatacccagatgcaacagaaggagttttcaattatagaacatacccgtgaaaggaaacatgcaaatgaccagacagtcattttttcagatgaaaaccagatggacctgacatcaagtcacactgtaatgattaccaaaggccttttagataatcccataagtgaaaagtccaccaagatagataccacatcatttctagctaatttaaagcttcacaccgaggactcaagaatgaaaaaagaagtaaatttttccgtggatcaaaacacttcttcagaaaataaaatagatttcaatgacttcataaaaagattgaaaacaggaaaatgtagtgcttttcctgatgtgcctgataaagaaaattttgagatacctatttattccaaggaaccgaacagtgcctcttctacacatcaaatgcatgtatctcttaaggaagatgaaaataacagtaatattactaggctctttagagaaaaagatgatgggatgaatttcacccagtgtcatacagccaatattcagacattgattcccacatccagtgagaccaactcacgggaatctaaaggtaatgatattacaatttatggcaatgactttatggacttgacatttaaccacactttgcagatcttacctgcaacaggtaatttttctgaaatagaaaatcaaactcagaatgccatggatgtaacaacaggttatggaactaaagcttcaggaaataaaacagtttttaagagtaaacaaaatactgcttttcaagacctttccataaactctgcagacaaaatacatattaccagaagtcatattatgggggcagaaactcacatagtctcacagacttgtaatcaggatgccagaatattagccatgaccccagaatctatatattctaatccatctattcaaggttgtaagactgttttctattctagttgtaatgatgccatggaaatgaccaaatgtctctcaaatatgagagaggagaaaaatttgctaaagcatgacagtaattatgctaaaatgtattgcaatccagatgctatgtcttctctcacagagaaaactatttattccggagaggagaacatggacattaccaagagtcatacagttgcaatagataatcaaatttttaaacaagatcaatcaaatgtgcaaatagcagctgcaccaacacccgaaaaagaaatgatgctccaaaatcttatgaccacatcagaagatgggaaaatgaatgtaaattgtaactcagttcctcatgtatctaaggaaagaatacagcagagcctgtcaaatcctttgtctatttcattgactgatagaaagactgaactcttatcaggtgaaaatatggatttgactgaaagtcacacaagtaacttaggaagtcaggttcctcttgcagcttataatctagcaccggagagtaccagtgaatctcactctcagagcaaaagctcttcagatgaatgtgaagaaattaccaaaagtcgtaatgaaccatttcagcgatcagacataatagccaaaaacagcttaaccgacacctggaacaaagacaaagattgggttttgaagattttgccctaccttgataaagattctcctcagtcagctgattgtaatcaggagatagcaacaagccataatatagtctactgtggtggagttcttgataaacaaataactaatagaaatacagtatcatgggaacaatctttgttttctaccacaaagccattattttcatcaggacagttctctatgaaaaatcatgatactgctataagtagtcatacagtgaaatctgtactaggccagaattctaaactggctgagccactgaggaaaagtttaagcaatcccacacctgactattgccatgacaagatgattatatgttcagaggaagagcaaaatatggatctaacaaagagccacactgtcgtcattggatttggtccttctgaactacaagaacttggtaaaactaatttagaacacactactggccagctaacaacaatgaacagacagatagctgtaaaagttgaaaaatgtggtaaaagtcccatagaaaaaagtggagtgcttaaatctaactgtattatggatgtgttagaggacgaaagtgtacagaaacctaaatttccaaaggaaaagcaaaatgtcaaaatttggggaaggaaaagtgttggtggaccaaaaattgataagactattgtattttcagaagacgataagaatgatatggatatcactaagagttatacaatagaaataaaccatagacctttattagagaaacgtgattgtcatttggtgccattggcaggaacttctgaaactattttatatacatgtaggcaggatgacatggagatcactagaagtcacacaactgccttagaatgtaaaactgtctcaccagatgaaataactactaggcctatggacaaaactgtagtgtttgtagataatcatgttgaactagaaatgacagagtcccatactgttttcattgactaccaagaaaaggaaagaacagacagacctaactttgaactatcccaaaggaaaagcctaggaacaccaacagtgatatgtactcctactgaggagagtgttttctttccaggaaatggtgaaagtgaccgtctagtagcaaatgacagccagctaacccctctggaggaatggtctaataataggggccctgtagaggtagctgataacatggaattgtctaaatcagccacttgcaaaaacatcaaagatgtacaaagtcctggatttctgaatgaacctctatcaagcaaaagtcagagaagaaaaagccttaagctaaaaaatgacaagaccattgtattttcagagaatcataaaaatgatatggatattacccagagttgtatggtggaaatagataacgaaagtgccctggaggataaagaggacttccatttggcaggggcttctaaaactattttgtattcatgtgggcaggatgacatggagatcactaggagtcacacaactgccttagaatgtaaaactctcctgccaaatgaaatagctattaggcccatggacaaaaccgtattgttcacagataattacagtgatctggaagtcaccgattcccatactgttttcattgactgtcaagccacagagaaaatacttgaagaaaaccctaaatttggaataggaaaaggaaaaaacttgggtgtttcctttcctaaggataatagctgtgttcaagaaatcgctgaaaaacaagcactggctgtaggaaacaaaatagttcttcacaccgagcaaaagcaacaactctttgctgctactaatagaactactaatgaaatcatcaaatttcatagtgctgctatggatgaaaaggtcatagggaaagttgtagaccaggcctgtacattggaaaaagcgcaagttgaaagctgtcagttaaataatagagatagaagaaatgtggactttacaagtagtcatgcaactgctgtttgtggatccagtgataattattcctgtttaccaaatgttatttcctgtactgataatttggagggtagtgccatgctcttatgtgataaagatgaggaaaaagccaattattgcccagtgcaaaatgatcttgcttatgcaaatgattttgccagtgaatattacttggaatctgagggacagcctctctctgctccttgtcctttgttagagaaggaagaagttattcaaaccagtaccaaaggacagttagactgtgttataacactgcacaaagatcaagatctgattaaggatccacgaaatctattggctaatcaaactttagtatatagtcaagatctgggggagatgactaaacttaattcaaagcgagtatcttttaagcttccaaaggatcaaatgaaagtctatgttgatgacatttatgttattcctcagcctcatttctcaaccgaccaacctccattacctaaaaaaggacagagtagtatcaataaagaagaagtaatactgtctaaagctggaaataagagtttaaatattatagaaaattcctctgcacccatatgtgaaaacaagcccaaaatactcaatagtgaggaatggtttgctgcagcctgtaaaaaagaactgaaggaaaatattcaaacaactaactataatacagctctagatttccacagtaactcagacgtaactaagcaagtcattcaaactcatgtcaatgctggagaagcaccagatcctgtaattacatctaatgttccatgttttcatagtatcaaaccaaatctgaataatttgaatggaaaaactggagagtttttagcctttcaaactgttcatctaccaccccttccagagcaattacttgaattaggaaataaggcacacaatgatatgcatatagtgcaagctacagaaatacataatattaacataatctccagcaatgctaaagatagtagagatgaggaaaataaaaagtctcataatggagctgaaaccacctctctaccgccaaagacagtttttaaagataaagtaaggagatgttctttgggaatctttttgcctagattgcccaacaagagaaattgtagtgtcactggtattgatgacctggaacagattccagcagacacaactgatataaatcacttagaaactcagccggtctctagcaaagattcaggcattggatctgttgcaggtaaactgaacctaagtccttctcaatatataaatgaggaaaatcttcctgtatatcctgatgagatcaattcttcagactctattaacatagaaactgaggaaaagaacgtgggtacaagaagaagaagatattcataagg

SEQ ID NO: 113906 - DNA, 579 bp, Homo sapiens
  Payload ID: 2241
  Gene Symbol: CASC5
  Gene Name: cancer susceptibility candidate 5
  ENST ID: ENST00000532406
  CDS Start-End: 1-579
ttgatcaccatactgaagaggatatagataaaagtgctaacagtgtattgataaaaaacctgagcaggaccccatctagttgcagcagctctctggattcaatcaaggctgatgggacctctctggacttcagcacttaccgcagtagtcaaatggaatcacagtttctcagagatactatttgtgaagagagcttgagggagtttactgtaaacacaccacctactccagaagacctgatgttaagtcaatatgtttaccgacccaagatacagatttatagagaagattgtgaggctcgtcgccaaaagattgaagaattaaagctttctgcatcgaaccaagataagctgttggttgatataaataagaacctgtgggaaaaaatgagacactgctctgacaaagagctgaaggcctttggaatttatcttaacaaaataaagtcatgttttaccaagatgactaaagtcttcactcaccaaggaaaagtggctctgtatggcaagctggtgcagtcagctcagaatgagagggagaaacttcaaataaagatagatgagatggataaaatactta

SEQ ID NO: 113907 - DNA, 565 bp, Homo sapiens
  Payload ID: 2241
  Gene Symbol: CASC5
  Gene Name: cancer susceptibility candidate 5
  ENST ID: ENST00000534204
  CDS Start-End: 139-381
gagccgggcgttgtgagcggactgctagaggcggctgtctgtttccgctctaaggaaactcagagcgtgtggaccccaaacaagtctgcgcaaaatttgtcgaggaggtttgccgcggcagaaaagttttcttcaaaaatggatggggtgtcttcagaggctaatgaagaaaatgacaatatagagagacctgttagaagacggcattcttcaatattgaaacccccaaggagtcctcttcaggacctcagaggtccacatcttgatacagaaaccccgacagagcaatctcccaggcaattttactgtaaacacaccacctactccagaagacctgatgttaagtcaatatgtttaccgacccaagatacagatttatagagaagattgtgaggctcgtcgccaaaagattgaagaattaaagctttctgcatcgaaccaagataagctgttggttgatataaataagaacctgtgggaaaaaatgagacactgctctgacaaagagctgaaggcctttggaatttatcttaacaaaataaagtcatgttttaccaagatgact

SEQ ID NO: 113908 - DNA, 259 bp, Homo sapiens
  Payload ID: 2241
  Gene Symbol: CASC5
  Gene Name: cancer susceptibility candidate 5
  ENST ID: ENST00000532056
  CDS Start-End: 229-259
agatttgaatacttcactgaggcgagccgggcgttgtgagcggactgctagaggcggctgtctgtttccgctctaaggaaactcagagcgtgtggaccccaaacaagtctgcgcaaaatttgtcgaggaggtttgccgcggcaggaatccaatgctttgagaaataagaaaaactctcgtcgagtcagctttgcagatactataaaggtattccagacggagtctcatatgaaaatagtgagaaagtcagaaatggaag

SEQ ID NO: 113909 - DNA, 578 bp, Homo sapiens
  Payload ID: 2241
  Gene Symbol: CASC5
  Gene Name: cancer susceptibility candidate 5
  ENST ID: ENST00000528975
  CDS Start-End: 556-578
agatggccgctcccacgattgtgggggaggtctccactggggaggggcagaggaaattcggtcgaaaaagagataaagctgaaggaaataaaattggcacggagtctgggaaagtagtttccctaaaggagtcttagaaatagggttggtctggaacctaaggggcggagccgacgcgtagagccgctttgcgcgtgcgcatcacctaggcggttagatttgaatacttcactgaggcgagccgggcgttgtgagcggactgctagaggcggctgtctgtttccgctctaaggaaactcagagcgtgtggaccccaaacaagtctgcgcaaaatttgtcgaggaggtttgccgcggcagaaaagttttcttcaaaaatggatggggtgtcttcagaggctaatgaagaaaaatattgaaacccccaaggagtcctcttcaggacctcagaggtgggaatgaaagagttcaggaatccaatgctttgagaaataagaaaaactctcgtcgagtcagctttgcagatactataaaggtattccagacggagtctcatatgaaaatagtgagaaagtcaga

SEQ ID NO: 113910 - DNA, 748 bp, Homo sapiens
  Payload ID: 2242
  Gene Symbol: CTAG1A
  Gene Name: cancer/testis antigen 1A
  Uniprot ID: P78358
  ENST ID: ENST00000599837
  CDS Start-End: 54-596
atcctcgtgggccctgaccttctctctgagagccgggcagaggctccggagccatgcaggccgaaggccggggcacagggggttcgacgggcgatgctgatggcccaggaggccctggcattcctgatggcccagggggcaatgctggcggcccaggagaggcgggtgccacgggcggcagaggtccccggggcgcaggggcagcaagggcctcggggccgggaggaggcgccccgcggggtccgcatggcggcgcggcttcagggctgaatggatgctgcagatgcggggccagggggccggagagccgcctgcttgagttctacctcgccatgcctttcgcgacacccatggaagcagagctggcccgcaggagcctggcccaggatgccccaccgcttcccgtgccaggggtgcttctgaaggagttcactgtgtccggcaacatactgactatccgactgactgctgcagaccaccgccaactgcagctctccatcagctcctgtctccagcagctttccctgttgatgtggatcacgcagtgctttctgcccgtgtttttggctcagcctccctcagggcagaggcgctaagcccagcctggcgccccttcctaggtcatgcctcctcccctagggaatggtcccagcacgagtggccagttcattgtgggggcctgattgtttgtcgctggaggaggacggcttacatgtttgtttctgtagaaaataaaactgagctacga

SEQ ID NO: 113911 - DNA, 993 bp, Homo sapiens
  Payload ID: 2242
  Gene Symbol: CTAG1A
  Gene Name: cancer/testis antigen 1A
  ENST ID: ENST00000593606
  CDS Start-End: 65-697
tctgcctccgcatcctcgtgggccctgaccttctctctgagagccgggcagaggctccggagccatgcaggccgaaggccggggcacagggggttcgacgggcgatgctgatggcccaggaggccctggcattcctgatggcccagggggcaatgctggcggcccaggagaggcgggtgccacgggcggcagaggtccccggggcgcaggggcagcaagggcctcggggccgggaggaggcgccccgcggggtccgcatggcggcgcggcttcagggctgaatggatgctgcagatgcggggccagggggccggagagccgcctgcttgagttctacctcgccatgcctttcgcgacacccatggaagcagagctggcccgcaggagcctggcccaggatgccccaccgcttcccgtgccaggggtgcttctgaaggagttcactgtgtccggcaacatactgactatgtcagttcaggaccaggacagggatggggccgggtggcggagcgtggcagggtgggggctgggatccgcctacccccacggtcaggctgctagaaacctgggaacaccccagcacagggtctcagaacagagacctggtacaccaggcccgccgccacccgagggagcccagggagatgggtgcagaggtgtcgcctttaacgtgatgttctctgcccctcacatttagccgactgactgctgcagaccaccgccaactgcagctctccatcagctcctgtctccagcagctttccctgttgatgtggatcacgcagtgctttctgcccgtgtttttggctcagcctccctcagggcagaggcgctaagcccagcctggcgccccttcctaggtcatgcctcctcccctagggaatggtcccagcacgagtggccagttcattgtgggggcctgattgtttgtcgctggaggaggacggcttacatgtttgtttctgtagaaaataaaactgagctacgattccg

SEQ ID NO: 113912 - DNA, 748 bp, Homo sapiens; identical to SEQ ID NO: 113910
  Payload ID: 2243
  Gene Symbol: CTAG1B
  Gene Name: cancer/testis antigen 1B
  Uniprot ID: P78358
  ENST ID: ENST00000328435
  CDS Start-End: 54-596

SEQ ID NO: 113913 - DNA, 998 bp, Homo sapiens
  Payload ID: 2243
  Gene Symbol: CTAG1B
  Gene Name: cancer/testis antigen 1B
  Uniprot ID: P78358
  ENST ID: ENST00000359887
  CDS Start-End: 65-571
tctgcctccgcatcctcgtgggccctgaccttctctctgagagccgggcagaggctccggagccatgcaggccgaaggccggggcacagggggttcgacgggcgatgctgatggcccaggaggccctggcattcctgatggcccagggggcaatgctggcggcccaggagaggcgggtgccacgggcggcagaggtccccggggcgcaggggcagcaagggcctcggggccgggaggaggcgccccgcggggtccgcatggcggcgcggcttcagggctgaatggatgctgcagatgcggggccagggggccggagagccgcctgcttgagttctacctcgccatgcctttcgcgacacccatggaagcagagctggcccgcaggagcctggcccaggatgccccaccgcttcccgtgccaggggtgcttctgaaggagttcactgtgtccggcaacatactgactatgtcagttcaggaccaggacagggatggggcctgggtgggtggcggtcacagcgtggcagggtgggggctgggatccgcctacaccccacggtcaggctgctagaaacctgggaacaccccagcacagggtctcagaacagagacctggtacaccaggcccgccgccacccgagggagcccagggagatgggtgcagaggtgtcgcctttaacgtgatgttctctgcccctcacatttagccgactgactgctgcagaccaccgccaactgcagctctccatcagctcctgtctccagcagctttccctgttgatgtggatcacgcagtgctttctgcccgtgtttttggctcagcctccctcagggcagaggcgctaagcccagcctggcgccccttcctaggtcatgcctcctcccctagggaatggtcccagcacgagtggccagttcattgtgggggcctgattgtttgtcgctggaggaggacggcttacatgtttgtttctgtagaaaataaaactgagctacga

SEQ ID NO: 113914 - DNA, 993 bp, Homo sapiens; identical to SEQ ID NO: 113911
  Payload ID: 2243
  Gene Symbol: CTAG1B
  Gene Name: cancer/testis antigen 1B
  ENST ID: ENST00000595485
  CDS Start-End: 65-697

SEQ ID NO: 113915 - DNA, 993 bp, Homo sapiens
  Payload ID: 2244
  Gene Symbol: CTAG2
  Gene Name: cancer/testis antigen 2
  Uniprot ID: O75638
  ENST ID: ENST00000247306
  CDS Start-End: 65-697
tctgcctccgcatcctcgtgggccctgaccttctctctgagagccgggcagaggctccggagccatgcaggccgaaggccggggcacagggggttcgacgggcgatgctgatggcccaggaggccctggcattcctgatggcccagggggcaatgctggcggcccaggagaggcgggtgccacgggcggcagaggtccccggggcgcaggggcagcaagggcctcggggccgagaggaggcgccccgcggggtccgcatggcggtgccgcttctgcgcaggatggaaggtgcccctgcggggccaggaggccggacagccgcctgcttgagttgcacatcacgatgcctttctcgtcgcccatggaagcggagctggtccgcaggatcctgtcccgggatgccgcaccgctcccccgaccaggggcggttctgaaggacttcaccgtgtccggcaacctactgtttatgtcagttcgggaccaggacagggaaggcgctgggcggatgagggtggtgggttgggggctgggatccgcctccccggaggggcagaaagctagagatctcagaacacccaaacacaaggtctcagaacagagacctggtacaccaggcccgccgccacccgagggagcccagggagatgggtgcagaggtgtcgcctttaatgtgatgttctctgcccctcacatttagccgactgactgctgcagaccaccgccaactgcagctctccatcagctcctgtctccagcagctttccctgttgatgtggatcacgcagtgctttctgcccgtgtttttggctcaggctccctcagggcagaggcgctaagcccagcctggcgccccttcctaggtcatgcctcctcccctagggaatggtcccagcacgagtggccagttcattgtgggggcctgattgtttgtcgctggaggaggacggcttacatgtttgtttctgtagaaaataaagctgagctacgattccg

SEQ ID NO: 113916 - DNA, 748 bp, Homo sapiens
  Payload ID: 2244
  Gene Symbol: CTAG2
  Gene Name: cancer/testis antigen 2
  Uniprot ID: O75638
  ENST ID: ENST00000369585
  CDS Start-End: 54-596
atcctcgtgggccctgaccttctctctgagagccgggcagaggctccggagccatgcaggccgaaggccggggcacagggggttcgacgggcgatgctgatggcccaggaggccctggcattcctgatggcccagggggcaatgctggcggcccaggagaggcgggtgccacgggcggcagaggtccccggggcgcaggggcagcaagggcctcggggccgagaggaggcgccccgcggggtccgcatggcggtgccgcttctgcgcaggatggaaggtgcccctgcggggccaggaggccggacagccgcctgcttgagttgcacatcacgatgcctttctcgtcgcccatggaagcggagctggtccgcaggatcctgtcccgggatgccgcaccgctcccccgaccaggggcggttctgaaggacttcaccgtgtccggcaacctactgtttatccgactgactgctgcagaccaccgccaactgcagctctccatcagctcctgtctccagcagctttccctgttgatgtggatcacgcagtgctttctgcccgtgtttttggctcaggctccctcagggcagaggcgctaagcccagcctggcgccccttcctaggtcatgcctcctcccctagggaatggtcccagcacgagtggccagttcattgtgggggcctgattgtttgtcgctggaggaggacggcttacatgtttgtttctgtagaaaataaagctgagctacga

SEQ ID NO: 113917 - DNA, 1445 bp, Homo sapiens
  Payload ID: 2245
  Gene Symbol: CT55
  Gene Name: cancer/testis antigen 55
  Uniprot ID: Q8WUE5
  ENST ID: ENST00000276241
  CDS Start-End: 228-1022
agagggagaagtcagcggagaagctgggagctcctttggaggctgcggtgtccctgactctcctgaggggggctcactaacgggtgggtcccatgccacagtgtctgaggagaagcaggaagtgagtccctgaggagacgccgtgacctgagggcttcccttactgaggaggcctcgtgcttcatctgccacaagcggtgcccaggccggtggtgacaactgggacgatgctcaggcttctgagacttgctttggccttctacgggaggacggccgaccctgcagagcgacagggcccacagcagcagggcctcccacaaggtgacacccagttgacaactgtgcagggagttgtcacaagtttctgtggtgattatggcatgattgatgagtcgatctacttcagtagtgatgttgtgactggcaacgtgcctctaaaagttggacaaaaagttaatgtggttgtggaagaagataaaccacattatggattgagagcaatcaaggtggatgttgtgcctcgccatctttatggtgctggaccctcagactcaggaaccagagttttaattggatgtgttacttctataaatgaagataatatttatattagtaacagcatttatttttccatagccattgtttctgaagattttgtgccttataagggtgacttgttagaagttgaatattccactgagccaggcatctcaaacatcaaggcaacttctgtgaagcccatccgttgtattcatacggaagaggtctgcattactagcgtacatggaagaaatggggtgatagattatactatttttttcaccttggattctgtgaaacttcctgatggatacgtacctcaagtagatgatatcgtcaatgtggtcatggtggagagcattcagttctgctttatttggagagcgatttctatcaccccagtgcataaatccagcagcggattccaggatgacggaggcctgggacggcccaaaagggaacgtcggagccaaagcatttaactgaaaaggcatcagggacagcatgttaaaggcatgatttaaagttacaatttgacttcagttttgagccccgttatgctgcctgtacaacctgtattgttccatagcctctttcatcttctgtcacccacataacttgcggtgtttgttgttttacttgttccttcttccccatgctagaatgtaaactccacaatggcaggatgtcttttaatctggtttttttttttcttttttctttctttttttttttctgttgtcattaaagcatcaccaagcacttagaagagtgcctggcagactcaatgagcagataaaatgttattaagttcaatgactgaatgactgggccagcaatgatacttacctgtggttcattcatcactggttccttaggaataaaattgttgagcaatgcactaa

SEQ ID NO: 113918 - DNA, 1728 bp, Homo sapiens
  Payload ID: 2245
  Gene Symbol: CT55
  Gene Name: cancer/testis antigen 55
  Uniprot ID: Q8WUE5
  ENST ID: ENST00000344129
  CDS Start-End: 228-956
agagggagaagtcagcggagaagctgggagctcctttggaggctgcggtgtccctgactctcctgaggggggctcactaacgggtgggtcccatgccacagtgtctgaggagaagcaggaagtgagtccctgaggagacgccgtgacctgagggcttcccttactgaggaggcctcgtgcttcatctgccacaagcggtgcccaggccggtggtgacaactgggacgatgctcaggcttctgagacttgctttggccttctacgggaggacggccgaccctgcagagcgacagggcccacagcagcagggcctcccacaaggtgacacccagttgacaactgtgcagggagttgtcacaagtttctgtggtgattatggcatgattgatgagtcgatctacttcagtagtgatgttgtgactggcaacgtgcctctaaaagttggacaaaaagttaatgtggttgtggaagaagataaaccacattatggattgagagcaatcaaggtggatgttgtgcctcgccatctttatggtgctggaccctcagactcaggaaccagagttttaattggatgtgttacttctataaatgaagataatatttatattagtaacagcatttatttttccatagccattgtttctgaagattttgtgccttataagggtgacttgttagaagttgaatattccactgagccaggcatctcaaacatcaaggcaacttctgtgaagcccatccgttgtattcatacggaagaggtctgcattactagcgtacatggaagaaatggggtgatagattatactatttttttcaccttggattctgtgaaacttcctgatggatacgtacctcaagtagatgatatcgtcaatgtggtcatggtggagagcattcagttctgctttatttggagagcgatttctatcaccccagtgcataaatcgtaatgacaaagcatttttattctgtttatctttccttttatgagcagtaaaggggctggtttaacttaaaaggttagcttagtaagcctaaatagtattttatatatgacttttctggcaaatctaattgagacactggccagtccaactggaccaggaacccagcttagggaaataacttattaattaaaaagcatgctaaattagcttgctagtcactggaggaaaggagttcttaattaaaatgaacacggccattaaatttgaattccatatttcccattagcagcagcggattccaggatgacggaggcctgggacggcccaaaagggaacgtcggagccaaagcatttaactgaaaaggcatcagggacagcatgttaaaggcatgatttaaagttacaatttgacttcagttttgagccccgttatgctgcctgtacaacctgtattgttccatagcctctttcatcttctgtcacccacataacttgcggtgtttgttgttttacttgttccttcttccccatgctagaatgtaaactccacaatggcaggatgtcttttaatctggtttttttttttcttttttctttctttttttttttctgttgtcattaaagcatcaccaagcacttagaagagtgcctggcagactcaatgagcagataaaatgttattaagttcaatgactgaatgactgggccagcaatgatacttacctgtggttcattcatcactggttccttaggaataaaattgttgagcaatgca

SEQ ID NO: 113919 - DNA, 1825 bp, Homo sapiens
  Payload ID: 2246
  Gene Symbol: CT62
  Gene Name: cancer/testis antigen 62
  Uniprot ID: P0C5K7
  ENST ID: ENST00000449977
  CDS Start-End: 508-918
ggagagctctggctcagagtttgcgatccgagagcgggatccgcgctccctcggtccttcctccctcccctcttgcggcctcccgctgtcatctggagccgctcctgccgccccctggcggcgaccgcgggaagggccggcccccatccgcacccctgaccccggaggtcaacaacgggatggtccctgggtcccaggggaagagacatcacccagtaggagggagtacggtctagacagaggccacgagggcgggagggggcgagagtggagagtggcccagctggccagggtcgtctaagtgagaggaaaagggagagggcggttgagaccaggccctgaattccgcgttcatcttatcctgaggtattcagtgccgagtgtggccttggtgctaggattcaaagaggaaaggaagaaaactttccattctaaaagaaactccacgtgaggcgaagaagatgaaatatagtcagaaaaccataccagtaggtgttaagttgataaatgatgcatacgacatcctatagaagactgtcaccaccccacctcactgatcagccctctgcctacagccacacccacagaacattcagccatttctcctgtggttcccagcctgcagcacagcgtctgcacgtggaactctggaatgctgacctacagtctgagttcctgtgcccttgcctggggctgactctctacttgacctgtaacccacaactgggcaagagaaaattctgcagccacagctctgaggacatgagcaaaatggtttccagacggaatgtcaaggattcccatgaagtgtcagggagtcttcaggccacacttcaggttatctccttctctttcccttttctgcttcacacttgctctcatcctctttctcaccccacatctggtcagaggagataggaaggttcttgttacctggtacaagacaacttttggaatcccagatattcagattatttccccttttcctctttgcaaatgataatactcacagccaagaggcatcacccggatccgaggctgcttctccttaggacatgcagacagaaggagaaggcggggctggcagcctccagtccacagcctccctttcttcttccggcgatgattaactaggcctagacaatggagatctacggcatacgcccagggcctcctcttctcaagcatggctgatcagtcactttcccgtctatccttcatttattgaagccaactatgaacgactaaaggaaggatgagaaaagtcacccaaagtcaaaggggacagcgtgggagactgttctagacagaaggaaacacctttgcaaagaccctgaggaaggcaggggactctccaggagcagaagggctgtgtggcttcagagtccacaaaagagagcagatacaggacactggctagagcaggccctggagcccgctgctgtcctggaggccttggggaggcccagtgttcccagggtggaagaagtaggggacagcttgacgtagtggctgttgatcagctgatatggaagtatgtcattttattaacaattgagaaaggagtgctgtgcaattccattcaatgccagtgatgcttatggccgtttttatgagttctgtcattttcaaatgagcaagaggaagcctctaagggggtttaagcagggactgacgtaatcagatctgtgtttttccaaagggagagggagaaaaagaacatttcttatttttcaaaaaaggtaatgcaaaagcatcattccacaattctcttgtaatgaaaaaaataaatgcaaacttaagcaaatccatcattctgaaagaa

SEQ ID NO: 113920 - DNA, 982 bp, Homo sapiens
  Payload ID: 2246
  Gene Symbol: CT62
  Gene Name: cancer/testis antigen 62
  ENST ID: ENST00000567117
  CDS Start-End: 692-982
tgcgatccgagagcgggatccgcgctccctcggtccttcctccctcccctcttgcggcctcccgctgtcatctggagccgctcctgccgccccctggcggcgaccgcgggaagggccggcccccatccgcacccctgaccccggaggtcaacaacgggatggtccctgggtcccaggggaagagacatcacccagtaggagggagtacggtctagacagaggccacgagggcgggagggggcgagagtggagagtggcccagctggccagggtcgtctaagtgagaggaaaagggagagggcggttgagaccaggccctgaattccgcgttcatcttatcctgaggtctgtggggacctgttgaaggactggggcaggggacggacgcgggcatccttccatttggaacagccattccggcagcatcaggatggggcggaggcaaagcggggagtgggcgaggcaagtggtgctgtaaacctgtgcgagaagggggcggtgactctaagggcaggaaggagccctggtcacacacacactcccacgcaaggtattcagtgccgagtgtggccttggtgctaggattcaaagaggaaaggaagaaaactttccattctaaaagaaactccacgtgaggcgaagaagatgaaatatagtcagaaaaccataccagtaggtgttaagttgataaatgatgcatacgacatcctatagaagactgtcaccaccccacctcactgatcagccctctgcctacagccacacccacagaacattcagccatttctcctgtggttcccagcctgcagcacagcgtctgcacgtggaactctggaatgctgacctacagtctgagttcctgtgcccttgcctggggctgactctctacttgacctgtaacccacaactgggcaagagaaaattctgcagccacagctctgaggacatgagcaaaatggtttccagacggaatgtcaaggat

SEQ ID NO: 113921 - DNA, 2822 bp, Homo sapiens
  Payload ID: 2246
  Gene Symbol: CT62
  Gene Name: cancer/testis antigen 62
  ENST ID: ENST00000566432
  CDS Start-End: 784-1017
ccgagagcgggatccgcgctccctcggtccttcctccctcccctcttgcggcctcccgctgtcatctggagccgctcctgccgccccctggcggcgaccgcgggaagggccggcccccatccgcacccctgaccccggaggtcaacaacgggatggtccctgggtcccaggggaagagacatcacccagtaggagggagtacggtctagacagaggccacgagggcgggagggggcgagagtggagagtggcccagctggccagggtcgtctaagtgagaggaaaagggagagggcggttgagaccaggccctgaattccgcgttcatcttatcctgaggtctgtggggacctgttgaaggactggggcaggggacggacgcgggcatccttccatttggaacagccattccggcagcatcaggatggggcggaggcaaagcggggagtgggcgaggcaagtggtgctgtaaacctgtgcgagaagggggcggtgactctaagggcaggaaggagccctggtcacacacacactcccacgcaaggtattcagtgccgagtgtggccttggtgctaggattcaaagaggaaaggaagaaaactttccattctaaaagaaactccacgtgaggcgaagaagatgaaatatagtcagaaaaccataccagtaggtggtaggtaaatgcagaagtatttaagagctcatacaggagtacctgcctcaggacagggaatctgagatgctctgcagagctggatcttaaagaacggattaagttgataaatgatgcatacgacatcctatagaagactgtcaccaccccacctcactgatcagccctctgcctacagccacacccacagaacattcagccatttctcctgtggttcccagcctgcagcacagcgtctgcacgtggtgagggctcccaaatctctgaggaatgaatggctcactgctgagagcaaccttctgggagttcagggcatgtggaactggaataagagcaacgtgtgaacagattacaggaaggcaatgcaggacagctggaccctttggggggaaacttatggggaacacagttttcttacttataagcactgagattgcctgagaggggagagatgatgcagagtgtcccaaatgtatttgacgtggaatccttttaccagcgaaacatctcttgggcctagagttctgaaaattgcactttgaaaaacactgctctcagctcttacaaacctcgtgttttcatcctaactgtgcttcagagaattgtgtcccagcaggaaaggaaacccccgtataattccctacgttgctagcatttggaagtgggatgaaaatggacctacattcaaacccctaatttcaagctctgaaggaggtaccaggatccatcacgatgcttgtaaaattgttcctttcattttcctggttgtaaacttatgcagactgtaaagtcaaggcaagcctgtgcccagcaaataataagaaaataagggaggcatggtaaacaaaacaaaacactttgagagttggtcaacttgctgttattttgagctgtttctaaaaatctcagggtagattccctcccctgcttgcctccttaacccagtcctttttcttcctcctccaggaactctggaatgctgacctacagtctgagttcctgtgcccttgcctggggctgactctctacttgacctgtaacccacaactgggcaagagaaaattctgcagccacagctctgaggacatgagcaaaatggtttccagacggaatgtcaaggattcccatgaagtgtcagggagtcttcaggccacacttcaggttatctccttctctttcccttttctgcttcacacttgctctcatcctctttctcaccccacatctggtcagaggagataggaaggttcttgttacctggtacaagacaacttttggaatcccagatattcagattatttccccttttcctctttgcaaatgataatactcacagccaagaggcatcacccggatccgaggctgcttctccttaggacatgcagacagaaggagaaggcggggctggcagcctccagtccacagcctccctttcttcttccggcgatgattaactaggcctagacaatggagatctacggcatacgcccagggcctcctcttctcaagcatggctgatcagtcactttcccgtctatccttcatttattgaagccaactatgaacgactaaaggaaggatgagaaaagtcacccaaagtcaaaggggacagcgtgggagactgttctagacagaaggaaacacctttgcaaagaccctgaggaaggcaggggactctccaggagcagaagggctgtgtggcttcagagtccacaaaagagagcagatacaggacactggctagagcaggccctggagcccgctgctgtcctggaggccttggggaggcccagtgttcccagggtggaagaagtaggggacagcttgacgtagtggctgttgatcagctgatatggaagtatgtcattttattaacaattgagaaaggagtgctgtgcaattccattcaatgccagtgatgcttatggccgtttttatgagttctgtcattttcaaatgagcaagaggaagcctctaagggggtttaagcagggactgacgtaatcagatctgtgtttttccaaagggagagggagaaaaagaacatttcttatttttcaaaaaaggtaatgcaaaagcatcattccacaattctcttgtaatgaaaaaaataaatgcaaacttaagcaaatccatcattctgaaagaa

SEQ ID NO: 113922 - DNA, 693 bp, Homo sapiens
  Payload ID: 2246
  Gene Symbol: CT62
  Gene Name: cancer/testis antigen 62
  ENST ID: ENST00000564862
  CDS Start-End: 1-310
ggaactctggaatgctgacctacagtctgagttcctgtgcccttgcctggggctgactctctacttgacctgtaacccacaactgggcaagagaaaattctgcagccacagctctgaggacatgagcaaaatggtttccagacggaatgtcaaggattcccatgaagtgtcagggagtcttcaggccacacttcagccaagaggcatcacccggatccgaggctgcttctccttaggacatgcagacagaaggagaaggcggggctggcagcctccagtccacagcctccctttcttcttccggcgatgattaactaggcctagacaatggagatctacggcatacgcccagggcctcctcttctcaagcatggctgatcagtcactttcccgtctatccttcatttattgaagccaactatgaacgactaaaggaaggatgagaaaagtcacccaaagtcaaaggggacagcgtgggagactgttctagacagaaggaaacacctttgcaaagaccctgaggaaggcaggggactctccaggagcagaagggctgtgtggcttcagagtccacaaaagagagcagatacaggacactggctagagcaggccctggagcccgctgctgtcctggaggccttggggaggcccagtgttcccagggtggaagaagtaggggacagcttgacgtag

SEQ ID NO: 113923 - DNA, 548 bp, Homo sapiens
  Payload ID: 2247
  Gene Symbol: CT83
  Gene Name: cancer/testis antigen 83
  Uniprot ID: Q5H943
  ENST ID: ENST00000371894
  CDS Start-End: 148-489
ataaagcgggacaacacagaacttcccagttacaccaggcatcctggcccaaagtttcccaaatccaggcggctagaggcccactgcttcccaactaccagctgagggggtccgtcccgagaagggagaagaggccgaagaggaaacatgaacttctatttactcctagcgagcagcattctgtgtgccttgattgtcttctggaaatatcgccgctttcagagaaacactggcgaaatgtcatcaaattcaactgctcttgcactagtgagaccctcttcttctgggttaattaacagcaatacagacaacaatcttgcagtctacgacctctctcgggatattttaaataatttcccacactcaatagccaggcagaagcgaatattggtaaacctcagtatggtggaaaacaagctggttgaactggaacatactctacttagcaagggtttcagaggtgcatcacctcaccggaaatccacctaaaagcgtacaggatgtaatgccagtggtggaaatcattaaagacactttgagtagattca

SEQ ID NO: 113924 - DNA, 1087 bp, Homo sapiens
  Payload ID: 2248
  Gene Symbol: CT45A1
  Gene Name: cancer/testis antigen family 45, member A1
  Uniprot ID: Q5HYN5
  ENST ID: ENST00000594117
  CDS Start-End: 12-581
ttcaggaaacaatgaccgataaaacagagaaggtggctgtagatcctgaaactgtgtttaaacgtcccagggaatgtgacagtccttcgtatcagaaaaggcagaggatggccctgttggcaaggaaacaaggagcaggagacagccttattgcaggctctgccatgtccaaagcaaagaagcttatgacaggacatgctattccacccagccaattggattctcagattgatgacttcactggtttcagcaaagataggatgatgcagaaacctggtagcaatgcacctgtgggaggaaacgttaccagcagtttctctggagatgacctagaatgcagagaaacagcctcctctcccaaaagccaacgagaaattaatgctgatataaaacgtaaattagtgaaggaactccgatgcgttggacaaaaatatgaaaaaatcttcgaaatgcttgaaggagtgcaaggacctactgcagtcaggaagcgattttttgaatccatcatcaaggaagcagcaagatgtatgagacgagactttgttaagcaccttaagaagaaactgaaacgtatgatttgagaatacttgtccctggaggattatcacaccccaaatgcataatctcgttaatgattgaggagagaaaaggatcagattgctgttttctacaatggagcaggatattgctgaagtctcctggcatatgttaccgaatcaaatagccttccagaggctaagaaatttctgttagtaaaagatgttctttttcccaaagcattttatttgaaaggataacttgtgttttggttattttgtattcccacctgtgctggtagatattattaacccattaggtaaatactattacagtcgtggtttctgcagcagctcacagtgttgtagctggtatttatcactacgttctttcgctacccatttcacattccctttgccctgagatagcatgtcagttggtcatgatgcttggcctggcaggatgactcaaaccttcattacggaagagtctgaaccattagatgtcctgcctggatggggttgctgtgatcttccattaactctaatcg

SEQ ID NO: 113925 - DNA, 1007 bp, Homo sapiens
  Payload ID: 2248
  Gene Symbol: CT45A1
  Gene Name: cancer/testis antigen family 45, member A1
  Uniprot ID: Q5HYN5
  ENST ID: ENST00000594565
  CDS Start-End: 245-814
agtgttcggctgggccagcacactgtggctggctgcttcccttccttccatcccctttggaccaaacgggatcggtgcttctggtgagacgcctccccatgcacatcactcccaggtgccctagggggcacatttcccacaactcccagagggcaggtttctagaaagtgccaccagtggggaggcgccacaacttcactgccattttgtgaggtgctgctgtctctcctccagcaaggaaacaatgaccgataaaacagagaaggtggctgtagatcctgaaactgtgtttaaacgtcccagggaatgtgacagtccttcgtatcagaaaaggcagaggatggccctgttggcaaggaaacaaggagcaggagacagccttattgcaggctctgccatgtccaaagcaaagaagcttatgacaggacatgctattccacccagccaattggattctcagattgatgacttcactggtttcagcaaagataggatgatgcagaaacctggtagcaatgcacctgtgggaggaaacgttaccagcagtttctctggagatgacctagaatgcagagaaacagcctcctctcccaaaagccaacgagaaattaatgctgatataaaacgtaaattagtgaaggaactccgatgcgttggacaaaaatatgaaaaaatcttcgaaatgcttgaaggagtgcaaggacctactgcagtcaggaagcgattttttgaatccatcatcaaggaagcagcaagatgtatgagacgagactttgttaagcaccttaagaagaaactgaaacgtatgatttgagaatacttgtccctggaggattatcacaccccaaatgcataatctcgttaatgattgaggagagaaaaggatcagattgctgttttctacaatggagcaggatattgctgaagtctcctggcatatgttaccgaatcaaatagccttccagaggctaagaaatttctgttagtaaaagatgttctttttccca

SEQ ID NO: 113926 - DNA, 578 bp, Homo sapiens
  Payload ID: 2249
  Gene Symbol: CT45A10
  Gene Name: cancer/testis antigen family 45, member A10
  Uniprot ID: P0DMU9
  ENST ID: ENST00000617981
  CDS Start-End: 9-578
aggaaacaatgaccgataaaacagagaaggtggctgtagatcctgaaactgtgtttaaacgtcccagggaatgtgacagtccttcgtatcagaaaaggcagaggatggccctgttggcaaggaaacaaggagcaggagacagccttattgcaggctctgccatgtccaaagaaaagaagcttatgacaggacatgctattccacccagccaattggattctcagattgatgacttcactggtttcagcaaagatgggatgatgcagaaacctggtagcaatgcacctgtgggaggaaacgttaccagcaatttctctggagatgacctagaatgcagaggaatagcctcctctcccaaaagccaacaagaaattaatgctgatataaaatgtcaagtagtgaaggaaatccgatgccttggacgaaaatatgaaaaaatcttcgaaatgcttgaaggagtgcaaggacctactgcagtcaggaaacgattttttgaatccatcatcaaggaagcagcaagatgtatgagacgagactttgttaagcaccttaagaagaaactgaaacgtatgatttga

SEQ ID NO: 113927 - DNA, 1010 bp, Homo sapiens
  Payload ID: 2249
  Gene Symbol: CT45A10
  Gene Name: cancer/testis antigen family 45, member A10
  Uniprot ID: P0DMU9
  ENST ID: ENST00000611668
  CDS Start-End: 246-815
agtgttcggctggggcaggcacgctgtggctggctacttcccttccttccatcccccttgggccaaacaggatcggtgcttctggtgagacgcctccccatgcacatcactcccaggtaccctagggggcacatttcccacaactcccagagggcaggtttctagaaagtgccaccagtggggaggcgccacaacttcactgccattttgtgaggtgccgccgtctctcctccagcaaggaaacaatgaccgataaaacagagaaggtggctgtagatcctgaaactgtgtttaaacgtcccagggaatgtgacagtccttcgtatcagaaaaggcagaggatggccctgttggcaaggaaacaaggagcaggagacagccttattgcaggctctgccatgtccaaagaaaagaagcttatgacaggacatgctattccacccagccaattggattctcagattgatgacttcactggtttcagcaaagatgggatgatgcagaaacctggtagcaatgcacctgtgggaggaaacgttaccagcaatttctctggagatgacctagaatgcagaggaatagcctcctctcccaaaagccaacaagaaattaatgctgatataaaatgtcaagtagtgaaggaaatccgatgccttggacgaaaatatgaaaaaatcttcgaaatgcttgaaggagtgcaaggacctactgcagtcaggaaacgattttttgaatccatcatcaaggaagcagcaagatgtatgagacgagactttgttaagcaccttaagaagaaactgaaacgtatgatttgagaatacttgtccctggaggattatcacaccccaaatgcataatctcgttaatgattgaggagagaaaaggatcagattgctgttttctacaatggagcaggatattgctgaagtctcctggcatatgttaccgaatcaactggccttccagaggctaagaaatttctgttagtaaaagatgttctttttcccaaa

SEQ ID NO: 113928 - DNA, 1076 bp, Homo sapiens
  Payload ID: 2250
  Gene Symbol: CT45A2
  Gene Name: cancer/testis antigen family 45, member A2
  Uniprot ID: Q5DJT8
  ENST ID: ENST00000605791
  CDS Start-End: 1-570
atgaccgataaaacagagaaggtggctgtagatcctgaaactgtgtttaaacgtcccagggaatgtgacagtccttcgtatcagaaaaggcagaggatggccctgttggcaaggaaacaaggagcaggagacagccttattgcaggctctgccatgtccaaagaaaagaagcttatgacaggacatgctattccacccagccaattggattctcagattgatgacttcactggtttcagcaaagataggatgatgcagaaacctggtagcaatgcacctgtgggaggaaacgttaccagcagtttctctggagatgacctagaatgcagagaaacagccttctctcccaaaagccaacaagaaattaatgctgatataaaacgtcaattagtgaaggaactccgatgcgttggacaaaaatatgaaaaaatcttcgaaatgcttgaaggagtgcaaggacctactgcagtcaggaaacgattttttgaatccatcatcaaggaagcagcaagatgtatgagacgagactttgttaagcaccttaagaagaaactgaaacgtatgatttgagaatacttgtccctggaggattatcacaccccaaatgcataatctcattaatgattgaggagagaaaaggatcagattgctgttttctacaatggagcaggatattgctgaagtctcctggcatatgttaccgaatcaactggccttccagaggctaagaaatttctgttagtaaaagatgttctttttcccaaagcgttttatttgaaaggataacttgtgttttggttattttgtattcccacctgtgctggtagatattattaacccattaggtaaatactattacagtcgtggtttctgcagcagctcacactgatgtagctggcgtttataactaccttctttcgctacccgtttcgcattccctttgccctgagatagcatgtcagttggtcatgatgcttggcctggcaggatgactcaaaccttcattacagaagagtctgaaccattagatatcctgcctggatggggttgctgtgattttccattaactctaatcg

SEQ ID NO: 113929 - DNA, 1008 bp, Homo sapiens
  Payload ID: 2250
  Gene Symbol: CT45A2
  Gene Name: cancer/testis antigen family 45, member A2
  Uniprot ID: Q5DJT8
  ENST ID: ENST00000612907
  CDS Start-End: 246-815
agtgttcggctggggcaggcacgctgtggctggctacttcccttcctcccatcccccttgggccaaacgggatcggtgcttctggtgagacgcctccccatgcacatcactcccaggtgccctagggggcacatttcccacaactcccagagggcaggtttctagaaagtgccaccagtggggaggcgccacaacttcactgccattttgtgaggtgccgccgtctctcctccagcaaggaaacaatgaccgataaaacagagaaggtggctgtagatcctgaaactgtgtttaaacgtcccagggaatgtgacagtccttcgtatcagaaaaggcagaggatggccctgttggcaaggaaacaaggagcaggagacagccttattgcaggctctgccatgtccaaagaaaagaagcttatgacaggacatgctattccacccagccaattggattctcagattgatgacttcactggtttcagcaaagataggatgatgcagaaacctggtagcaatgcacctgtgggaggaaacgttaccagcagtttctctggagatgacctagaatgcagagaaacagccttctctcccaaaagccaacaagaaattaatgctgatataaaacgtcaattagtgaaggaactccgatgcgttggacaaaaatatgaaaaaatcttcgaaatgcttgaaggagtgcaaggacctactgcagtcaggaaacgattttttgaatccatcatcaaggaagcagcaagatgtatgagacgagactttgttaagcaccttaagaagaaactgaaacgtatgatttgagaatacttgtccctggaggattatcacaccccaaatgcataatctcattaatgattgaggagagaaaaggatcagattgctgttttctacaatggagcaggatattgctgaagtctcctggcatatgttaccgaatcaactggccttccagaggctaagaaatttctgttagtaaaagatgttctttttccca

SEQ ID NO: 113930 - DNA, 1076 bp, Homo sapiens
  Payload ID: 2251
  Gene Symbol: CT45A3
  Gene Name: cancer/testis antigen family 45, member A3
  Uniprot ID: Q8NHU0
  ENST ID: ENST00000597510
  CDS Start-End: 1-570
atgaccgataaaacagagaaggtggctgtagatcctgaaactgtgtttaaacgtcccagggaatgtgacagtccttcgtatcagaaaaggcagaggatggccctgttggcaaggaaacaaggagcaggagacagccttattgcaggctctgccatgtccaaagaaaagaagcttatgacaggacatgctattccacccagccaattggattctcagattgatgacttcactggtttcagcaaagataggatgatgcagaaacctggtagcaatgcacctgtgggaggaaacgttaccagcagtttctctggagatgacctagaatgcagagaaacagcctcctctcccaaaagccaacgagaaattaatgctgatataaaacgtaaattagtgaaggaactccgatgcgttggacaaaaatatgaaaaaatcttcgaaatgcttgaaggagtgcaaggacctactgcagtcaggaagcgattttttgaatccatcatcaaggaagcagcaagatgtatgagacgagactttgttaagcaccttaagaagaaactgaaacgtatgatttgagaatacttgtccctggaggattatcacaccccaaatgcataatctcgttaatgattgaggagagaaaaggatcagattgctgttttctacaatggagcaggatattgctgaagtctcctggcatatgttaccgaatcaaatagccttccagaggctaagaaatttctgttagtaaaagatgttctttttcccaaagcattttatttgaaaggataacttgtgttttggttattttgtattcccacctgtgctggtagatattattaacccattaggtaaatactattacagtcgtggtttctgcagcagctcacagtgttgtagctggtatttatcactacgttctttcgctacccatttcacattccctttgccctgagatagcatgtcagttggtcatgatgcttggcctggcaggatgactcaaaccttcattacggaagagtctgaaacattagatgtcctgcctggatggggttgctgtgatcttccattaactctaatcg

SEQ ID NO: 113931 - DNA, 855 bp, Homo sapiens
  Payload ID: 2251
  Gene Symbol: CT45A3
  Gene Name: cancer/testis antigen family 45, member A3
  Uniprot ID: Q8NHU0
  ENST ID: ENST00000598716
  CDS Start-End: 91-660
agtgttcggctggggcaggcacgctgtggctggctacttcccttcctcccatcccccttgggccaaacgggatcggtgcttctggaaacaatgaccgataaaacagagaaggtggctgtagatcctgaaactgtgtttaaacgtcccagggaatgtgacagtccttcgtatcagaaaaggcagaggatggccctgttggcaaggaaacaaggagcaggagacagccttattgcaggctctgccatgtccaaagaaaagaagcttatgacaggacatgctattccacccagccaattggattctcagattgatgacttcactggtttcagcaaagataggatgatgcagaaacctggtagcaatgcacctgtgggaggaaacgttaccagcagtttctctggagatgacctagaatgcagagaaacagcctcctctcccaaaagccaacgagaaattaatgctgatataaaacgtaaattagtgaaggaactccgatgcgttggacaaaaatatgaaaaaatcttcgaaatgcttgaaggagtgcaaggacctactgcagtcaggaagcgattttttgaatccatcatcaaggaagcagcaagatgtatgagacgagactttgttaagcaccttaagaagaaactgaaacgtatgatttgagaatacttgtccctggaggattatcacaccccaaatgcataatctcgttaatgattgaggagagaaaaggatcagattgctgttttctacaatggagcaggatattgctgaagtctcctggcatatgttaccgaatcaaatagccttccagaggctaagaaatttctgttagtaaaagatgttctttttcccaaa

SEQ ID NO: 113932 - DNA, 1161 bp, Homo sapiens
  Payload ID: 2252
  Gene Symbol: CT45A5
  Gene Name: cancer/testis antigen family 45, member A5
  Uniprot ID: P0DMU8
  ENST ID: ENST00000487941
  CDS Start-End: 86-655
gtggggaggcgccacaacttcactgccattttgtgaggtgccgccgtctctcctccagcaaggtcaggacttcaggactgaaacaatgaccgataaaacagagaaggtggctgtagatcctgaaactgtgtttaaacgtcccagggaatgtgacagtccttcgtatcagaaaaggcagaggatggccctgttggcaaggaaacaaggagcaggagacagccttattgcaggctctgccatgtccaaagaaaagaagcttatgacaggacatgctattccacccagccaattggattctcagattgatgacttcactggtttcagcaaagatgggatgatgcagaaacctggtagcaatgcacctgtgggaggaaacgttaccagcagtttctctggagatgacctagaatgcagagaaacagcctcctctcccaaaagccaacgagaaattaatgctgatataaaacgtaaattagtgaaggaactccgatgcgttggacaaaaatatgaaaaaatcttcgaaatgcttgaaggagtgcaaggacctactgcagtcaggaagcgattttttgaatccatcatcaaggaagcagcaagatgtatgagacgagactttgttaagcaccttaagaagaaactgaaacgtatgatttgagaatacttgtccctggaggattatcacaccccaaatgcataatctcgttaatgattgaggagagaaaaggatcagattgctgttttctacaatggagcaggatattgctgaagtctcctggcatatgttaccgaatcaactggccttccagaggctaagaaatttctgttagtaaaagatgttctttttcccaaagcgttttatttgaaaggataacttgtgttttggttattttgtattcccacctgtgctggtagatattattaacccattaggtaaatactattacagtcgtggtttctgcagcagctcacactgatgtagctggcgtttataactaccttctttcgctacccgtttcgcattccctttgccctgagatagcatgtcagttggtcatgatgcttggcctggcaggatgactcaaaccttcattacggaagagtctgaaccattagatatcctgcctggatggggttgctgtgattttccattaactctaatcg

SEQ ID NO: 113933 - DNA, 726 bp, Homo sapiens
  Payload ID: 2252
  Gene Symbol: CT45A5
  Gene Name: cancer/testis antigen family 45, member A5
  Uniprot ID: P0DMU8
  ENST ID: ENST00000617203
  CDS Start-End: 1-570
atgaccgataaaacagagaaggtggctgtagatcctgaaactgtgtttaaacgtcccagggaatgtgacagtccttcgtatcagaaaaggcagaggatggccctgttggcaaggaaacaaggagcaggagacagccttattgcaggctctgccatgtccaaagaaaagaagcttatgacaggacatgctattccacccagccaattggattctcagattgatgacttcactggtttcagcaaagatgggatgatgcagaaacctggtagcaatgcacctgtgggaggaaacgttaccagcagtttctctggagatgacctagaatgcagagaaacagcctcctctcccaaaagccaacgagaaattaatgctgatataaaacgtaaattagtgaaggaactccgatgcgttggacaaaaatatgaaaaaatcttcgaaatgcttgaaggagtgcaaggacctactgcagtcaggaagcgattttttgaatccatcatcaaggaagcagcaagatgtatgagacgagactttgttaagcaccttaagaagaaactgaaacgtatgatttgagaatacttgtccctggaggattatcacaccccaaatgcataatctcgttaatgattgaggagagaaaaggatcagattgctgttttctacaatggagcaggatattgctgaagtctcctggcatatgttaccgaatcaactggccttccagaggct

SEQ ID NO: 113934 - DNA, 878 bp, Homo sapiens
  Payload ID: 2253
  Gene Symbol: CT45A6
  Gene Name: cancer/testis antigen family 45, member A6
  Uniprot ID: P0DMU7
  ENST ID: ENST00000620654
  CDS Start-End: 153-722
ctccccatgcacatcactcccaggtgccctagggggcacatttcccacaactcccagagggcaggtttctagaaagtgccaccagtggggaggcgccacaacttcactgccattttgtgaggtgccgccgtctctcctccagcaaggaaacaatgaccgataaaacagagaaggtggctgtagatcctgaaactgtgtttaaacgtcccagggaatgtgacagtccttcgtatcagaaaaggcagaggatggccctgttggcaaggaaacaaggagcaggagacagccttattgcaggctctgccatgtccaaagaaaagaagcttatgacaggacatgctattccacccagccaattggattctcagattgatgacttcactggtttcagcaaagatgggatgatgcagaaacctggtagcaatgcacctgtgggaggaaacgttaccagcagtttctctggagatgacctagaatgcagagaaacagcctcctctcccaaaagccaacgagaaattaatgctgatataaaacgtaaattagtgaaggaactccgatgcgttggacaaaaatatgaaaaaatcttcgaaatgcttgaaggagtgcaaggacctactgcagtcaggaagcgattttttgaatccatcatcaaggaagcagcaagatgtatgagacgagactttgttaagcaccttaagaagaaactgaaacgtatgatttgagaatacttgtccctggaggattatcacaccccaaatgcataatctcgttaatgattgaggagagaaaaggatcagattgctgttttctacaatggagcaggatattgctgaagtctcctggcatatgttaccgaatcaactggccttccagaggct

SEQ ID NO: 113935 - DNA, 770 bp, Homo sapiens
  Payload ID: 2253
  Gene Symbol: CT45A6
  Gene Name: cancer/testis antigen family 45, member A6
  Uniprot ID: P0DMU7
  ENST ID: ENST00000612878
  CDS Start-End: 9-578
aggaaacaatgaccgataaaacagagaaggtggctgtagatcctgaaactgtgtttaaacgtcccagggaatgtgacagtccttcgtatcagaaaaggcagaggatggccctgttggcaaggaaacaaggagcaggagacagccttattgcaggctctgccatgtccaaagaaaagaagcttatgacaggacatgctattccacccagccaattggattctcagattgatgacttcactggtttcagcaaagatgggatgatgcagaaacctggtagcaatgcacctgtgggaggaaacgttaccagcagtttctctggagatgacctagaatgcagagaaacagcctcctctcccaaaagccaacgagaaattaatgctgatataaaacgtaaattagtgaaggaactccgatgcgttggacaaaaatatgaaaaaatcttcgaaatgcttgaaggagtgcaaggacctactgcagtcaggaagcgattttttgaatccatcatcaaggaagcagcaagatgtatgagacgagactttgttaagcaccttaagaagaaactgaaacgtatgatttgagaatacttgtccctggaggattatcacaccccaaatgcataatctcgttaatgattgaggagagaaaaggatcagattgctgttttctacaatggagcaggatattgctgaagtctcctggcatatgttaccgaatcaactggccttccagaggctaagaaatttctgttagtaaaagatgttctttttccc

SEQ ID NO: 113936 - DNA, 578 bp, Homo sapiens
  Payload ID: 2254
  Gene Symbol: CT45A7
  Gene Name: cancer/testis antigen family 45, member A7
  Uniprot ID: P0DMV0
  ENST ID: ENST00000620885
  CDS Start-End: 9-578
aggaaacaatgaccgataaaacagagaaggtggctgtagatcctgaaactgtgtttaaacgtcccagggaatgtgacagtccttcgtatcagaaaaggcagaggatggccctgttggcaaggaaacaaggagcaggagacagccttattgcaggctctgccatgtccaaagaaaagaagcttatgacaggacatgctattccacccagccaattggattctcagattgatgacttcactggtttcagcaaagatgggatgatgcagaaacctggtagcaatgcacctgtgggaggaaacgttaccagcagtttctctggagatgacctagaatgcagagaaacagcctcctctcccaaaagccaacgagaaattaatgctgatataaaacgtaaattagtgaaggaactccgatgcgttggacaaaaatatgaaaaaatcttcgaaatgcttgaaggagtgcaaggacctactgcagtcaggaagcgattttttgaatccatcatcaaggaagcagcaagatgtatgagacgagactttgttaagcaccttaagaagaaactgaaacgtatgatttga

SEQ ID NO: 113937 - DNA, 996 bp, Homo sapiens
  Payload ID: 2254
  Gene Symbol: CT45A7
  Gene Name: cancer/testis antigen family 45, member A7
  Uniprot ID: P0DMV0
  ENST ID: ENST00000610598
  CDS Start-End: 234-803
gggcaggcacgctgtggctggctacttcccttcctcccatcccccttgggccaaacgggatcggtgcttctggtgagacgcctccccatgcacatcactcccaggtgccctagggggcacatttcccacaactcccagagggcaggtttctagaaagtgccaccagtggggaggcgccacaacttcactgccattttgtgaggtgccgccgtctctcctccagcaaggaaacaatgaccgataaaacagagaaggtggctgtagatcctgaaactgtgtttaaacgtcccagggaatgtgacagtccttcgtatcagaaaaggcagaggatggccctgttggcaaggaaacaaggagcaggagacagccttattgcaggctctgccatgtccaaagaaaagaagcttatgacaggacatgctattccacccagccaattggattctcagattgatgacttcactggtttcagcaaagatgggatgatgcagaaacctggtagcaatgcacctgtgggaggaaacgttaccagcagtttctctggagatgacctagaatgcagagaaacagcctcctctcccaaaagccaacgagaaattaatgctgatataaaacgtaaattagtgaaggaactccgatgcgttggacaaaaatatgaaaaaatcttcgaaatgcttgaaggagtgcaaggacctactgcagtcaggaagcgattttttgaatccatcatcaaggaagcagcaagatgtatgagacgagactttgttaagcaccttaagaagaaactgaaacgtatgatttgagaatacttgtccctggaggattatcacaccccaaatgcataatctcgttaatgattgaggagagaaaaggatcagattgctgttttctacaatggagcaggatattgctgaagtctcctggcatatgttaccgaatcaactggccttccagaggctaagaaatttctgttagtaaaagatgttctttttccca

SEQ ID NO: 113938 - DNA, 770 bp, Homo sapiens
  Payload ID: 2255
  Gene Symbol: CT45A8
  Gene Name: cancer/testis antigen family 45, member A8
  Uniprot ID: P0DMV1
  ENST ID: ENST00000611438
  CDS Start-End: 9-578
aggaaacaatgaccgataaaacagagaaggtggctgtagatcctgaaactgtgtttaaacgtcccagggaatgtgacagtccttcgtatcagaaaaggcagaggatggccctgttggcaaggaaacaaggagcaggagacagccttattgcaggctctgccatgtccaaagaaaagaagcttatgacaggacatgctattccacccagccaattggattctcagattgatgacttcactggtttcagcaaagataggatgatgcagaaacctggtagcaatgcacctgtgggaggaaacgttaccagcagtttctctggagatgacctagaatgcagagaaacagccttctctcccaaaagccaacaagaaattaatgctgatataaaacgtcaattagtgaaggaactccgatgcgttggacaaaaatatgaaaaaatcttcgaaatgcttgaaggagtgcaaggacctactgcagtcaggaaacgattttttgaatccatcatcaaggaagcagcaagatgtatgagacgagactttgttaagcaccttaagaagaaactgaaacgtatgatttgagaatacttgtccctggaggattatcacaccccaaatgcataatctcattaatgattgaggagagaaaaggatcagattgctgttttctacaatggagcaggatattgctgaagtctcctggcatatgttaccgaatcaactggccttccagaggctaagaaatttctgttagtaaaagatgttctttttccc

SEQ ID NO: 113939 - DNA, 1008 bp, Homo sapiens; identical to SEQ ID NO: 113929
  Payload ID: 2255
  Gene Symbol: CT45A8
  Gene Name: cancer/testis antigen family 45, member A8
  Uniprot ID: P0DMV1
  ENST ID: ENST00000611660
  CDS Start-End: 246-815

SEQ ID NO: 113940 - DNA, 770 bp, Homo sapiens; identical to SEQ ID NO: 113938
  Payload ID: 2256
  Gene Symbol: CT45A9
  Gene Name: cancer/testis antigen family 45, member A9
  Uniprot ID: P0DMV2
  ENST ID: ENST00000604569
  CDS Start-End: 9-578

SEQ ID NO: 113941 - DNA, 1010 bp, Homo sapiens
  Payload ID: 2256
  Gene Symbol: CT45A9
  Gene Name: cancer/testis antigen family 45, member A9
  Uniprot ID: P0DMV2
  ENST ID: ENST00000620704
  CDS Start-End: 246-815
agtgttcggctggggcaggcacgctgtggctggctacttcccttcctcccatcccccttgggccaaacgggatcggtgcttctggtgagacgcctccccatgcacatcactcccaggtgccctagggggcacatttcccacaactcccagagggcaggtttctagaaagtgccaccagtggggaggcgccacaacttcactgccattttgtgaggtgccgccgtctctcctccagcaaggaaacaatgaccgataaaacagagaaggtggctgtagatcctgaaactgtgtttaaacgtcccagggaatgtgacagtccttcgtatcagaaaaggcagaggatggccctgttggcaaggaaacaaggagcaggagacagccttattgcaggctctgccatgtccaaagaaaagaagcttatgacaggacatgctattccacccagccaattggattctcagattgatgacttcactggtttcagcaaagataggatgatgcagaaacctggtagcaatgcacctgtgggaggaaacgttaccagcagtttctctggagatgacctagaatgcagagaaacagccttctctcccaaaagccaacaagaaattaatgctgatataaaacgtcaattagtgaaggaactccgatgcgttggacaaaaatatgaaaaaatcttcgaaatgcttgaaggagtgcaaggacctactgcagtcaggaaacgattttttgaatccatcatcaaggaagcagcaagatgtatgagacgagactttgttaagcaccttaagaagaaactgaaacgtatgatttgagaatacttgtccctggaggattatcacaccccaaatgcataatctcattaatgattgaggagagaaaaggatcagattgctgttttctacaatggagcaggatattgctgaagtctcctggcatatgttaccgaatcaactggccttccagaggctaagaaatttctgttagtaaaagatgttctttttcccaaa

SEQ ID NO: 113942 - DNA, 1298 bp, Homo sapiens
  Payload ID: 2257
  Gene Symbol: CT47A1
  Gene Name: cancer/testis antigen family 47, member A1
  Uniprot ID: Q5JQC4
  ENST ID: ENST00000433030
  CDS Start-End: 260-1126
gccaaccagaatctttcccaacttgtctaagtcctctcaggccagccttggtgggaggtttctaggattcgctccctgcccttcccatcttagggtgtcgtctgagacagactcttattccctcaataaagagagagactcttattccctcagcggccagctcctcgcctcccctcggccgtagccacctcagtggtcaccgtcttcaccgtggtcgcctcagcccgctcgccaccccagttgaggcgctgctggtgtcatgtctgccacaggggaccgacacccgacccaaggggaccaggaggccccggtaagccaggagggagcacaggccgaggcggccggagctggtaaccaggagggcggcgactccggccccgacagcagcgacgtggtgcctgcggccgaggtggtcggagtcgcagggcccgtggaaggcctcggggaggaggagggtgagcaggcggcaggcctggccgcagtcccccggggcgggagcgccgaggaggactcagatatcgggcccgcgacggaggaagaggaggaggaagaggggaacgaggcggccaacttcgacttggcggtggtcgcccgtcgctacccggcgtcgggcattcacttcgtgctcctggacatggtccactcccttctccaccgcctctctcacaacgaccacatcctcatagagaaccgtcaactcagccgcctgatggtggggccacacgctgctgcgcgcaacctctggggcaacctccccccgctgctgctgccccagaggctgggtgcaggggccgcagcccgggcgggcgagggcctgggcctgatccaggaggccgcatcggtcccagagcctgcagtgccagctgacctggccgagatggccagggagcccgcggaggaggccgcagaggagaagctctcagaggaggccacagaggaaccagacgcagaggaaccggccacagaagaaccgaccgcacaggaggccacggccccagaggaagtcactaaatctcagcccgaaaagtgggatgaagaggcccaagatgctgcaggcgaggaagagaaagaacaagaaaaagagaaggatgcagaaaacaaggtgaagaactccaaagggacctagacgcagcagaggtgaagccaagaaaatccagatgcctgtgggaattgtaacacatatcattccaaagttcgttacatcaaaagtgatatccagtgacatctaactttcatggatgtatgtgacagtgttcaagttaaaaaataaaagtttgttttaaatgaataaactgaaa

SEQ ID NO: 113943 - DNA, 1298 bp, Homo sapiens
  Payload ID: 2258
  Gene Symbol: CT47A10
  Gene Name: cancer/testis antigen family 47, member A10
  Uniprot ID: Q5JQC4
  ENST ID: ENST00000430448
  CDS Start-End: 260-1126
gccaaccagaatctttcccaacttgtctaagtcctctcaggccagccttggtgggaggtttctaggattcgctccctgcccttcccatcttagggtgtcgtctgagacagactcttattccctcaataaagagagagactcttattccctcagcggccagctcctcgcctcccctcggccgtagccacctcagtggtcaccgtcttcaccgtggtcgcctcagcccgctcgccaccccagttgaggcgctgctggtgtcatgtctgccacaggggaccgacacccgacccaaggggaccaggaggccccggtaagccaggagggagcacaggccgaggcggccggagctggtaaccaggagggcggcgactccggccccgacagcagcgacgtggtgcctgcggccgaggtggtcggagtcgcagggcccgtggaaggcctcggggaggaggagggtgagcaggcggcaggcctggccgcagtcccccggggcgggagcgccgaggaggactcagatatcgggcccgcgacggaggaagaggaggaggaagaggggaacgaggcggccaacttcgacttggcggtggtcgcccgtcgctacccggcgtcgggcattcacttcgtgctcctggacatggtccactcccttctccaccgcctctctcacaacgaccacatcctcatagagaaccgtcaactcagccgcctgatggtggggccacacgctgctgcgcgcaacctctggggcaacctccccccgctgctgctgccccagaggctgggtgcaggggccgcagcccgggcgggcgagggcctgggcctgatccaggaggccgcatcggtcccagagcctgcagtgccagctgacctggccgagatggccagggagcccgcggaggaggccgcagaggagaagctctcagaggaggccacagaggaaccagacgcagaggaaccggccacagaagaaccgaccgcacaggaggccacggccccagaggaagtcactaaatctcagcccgaaaagtgggatgaagaggcccaagatgctgcaggcgaggaagagaaagaacaagaaaaagagaaggatgcggaaaacaaggtgaagaactccaaagggacctagacgcagcagaggtgaagccaagaaaatccagatgcctgtgggaattgtaacacatatcattccaaagttcgttacatcaaaagtgatatccagtgacatctaactttcatggatgtatgtgacagtgttcaagttaaaaaataaaagtttgttttaaatgaataaactgaaa

SEQ ID NO: 113944 - DNA, 1294 bp, Homo sapiens
  Payload ID: 2259
  Gene Symbol: CT47A11
  Gene Name: cancer/testis antigen family 47, member A11
  Uniprot ID: Q5JQC4
  ENST ID: ENST00000457020
  CDS Start-End: 256-1122
accagaatctttcccaacttgtctaagtcctctcaggccagccttggtgggaggtttctaggattcgctccctgcccttcccatcttagggtgtcgtctgagacagactcttattccctcaataaagagagagactcttattccctcagcggccagctcctcgcctcccctcggccgtagccacctcagtggtcaccgtcttcaccgtggtcgcctcagcccgctcgccaccccagttgaggcgctgctggtgtcatgtctgccacaggggaccgacacccgacccaaggggaccaggaggccccggtaagccaggagggagcacaggccgaggcggccggagctggtaaccaggagggcggcgactccggccccgacagcagcgacgtggtgcctgcggccgaggtggtcggagtcgcagggcccgtggaaggcctcggggaggaggagggtgagcaggcggcaggcctggccgcagtcccccggggcgggagcgccgaggaggactcagatatcgggcccgcgacggaggaagaggaggaggaagaggggaacgaggcggccaacttcgacttggcggtggtcgcccgtcgctacccggcgtcgggcattcacttcgtgctcctggacatggtccactcccttctccaccgcctctctcacaacgaccacatcctcatagagaaccgtcaactcagccgcctgatggtggggccacacgctgctgcgcgcaacctctggggcaacctccccccgctgctgctgccccagaggctgggtgcaggggccgcagcccgggcgggcgagggcctgggcctgatccaggaggccgcatcggtcccagagcctgcagtgccagctgacctggccgagatggccagggagcccgcggaggaggccgcagaggagaagctctcagaggaggccacagaggaaccagacgcagaggaaccggccacagaagaaccgaccgcacaggaggccacggccccagaggaagtcactaaatctcagcccgaaaagtgggatgaagaggcccaagatgctgcaggcgaggaagagaaagaacaagaaaaagagaaggatgcggaaaacaaggtgaagaactccaaagggacctagacgcagcagaggtgaagccaagaaaatccagatgcctgtgggaattgtaacacatatcattccaaagttcgttacatcaaaagtgatatccagtgacatctaactttcatggatgtatgtgacagtgttcaagttaaaaaataaaagtttgttttaaatgaataaactgaaa

SEQ ID NO: 113945 - DNA, 1165 bp, Homo sapiens
  Payload ID: 2260
  Gene Symbol: CT47A12
  Gene Name: cancer/testis antigen family 47, member A12
  Uniprot ID: Q5JQC4
  ENST ID: ENST00000419982
  CDS Start-End: 260-1126
gccaaccagaatctttcccaacttgtctaagtcctctcaggccagccttggtgggaggtttctaggattcgctccctgcccttcccatcttagggtgtcgtctgagacagactcttattccctcaataaagagagagactcttattccctcagcggccagctcctcgcctcccctcggccgtagccacctcagtggtcaccgtcttcaccgtggtcgcctcagcccgctcgccaccccagttgaggcgctgctggtgtcatgtctgccacaggggaccgacacccgacccaaggggaccaggaggccccggtaagccaggagggagcacaggccgaggcggccggagctggtaaccaggagggcggcgactccggccccgacagcagcgacgtggtgcctgcggccgaggtggtcggagtcgcagggcccgtggaaggcctcggggaggaggagggtgagcaggcggcaggcctggccgcagtcccccggggcgggagcgccgaggaggactcagatatcgggcccgcgacggaggaagaggaggaggaagaggggaacgaggcggccaacttcgacttggcggtggtcgcccgtcgctacccggcgtcgggcattcacttcgtgctcctggacatggtccactcccttctccaccgcctctctcacaacgaccacatcctcatagagaaccgtcaactcagccgcctgatggtggggccacacgctgctgcgcgcaacctctggggcaacctccccccgctgctgctgccccagaggctgggtgcaggggccgcagcccgggcgggcgagggcctgggcctgatccaggaggccgcatcggtcccagagcctgcagtgccagctgacctggccgagatggccagggagcccgcggaggaggccgcagaggagaagctctcagaggaggccacagaggaaccagacgcagaggaaccggccacagaagaaccgaccgcacaggaggccacggccccagaggaagtcactaaatctcagcccgaaaagtgggatgaagaggcccaagatgctgcaggcgaggaagagaaagaacaagaaaaagagaaggatgcggaaaacaaggtgaagaactccaaagggacctagacgcagcagaggtgaagccaagaaaatccaggtatctgt

SEQ ID NO: 113946 - DNA, 1298 bp, Homo sapiens; identical to SEQ ID NO: 113943
  Payload ID: 2261
  Gene Symbol: CT47A2
  Gene Name: cancer/testis antigen family 47, member A2
  Uniprot ID: Q5JQC4
  ENST ID: ENST00000458218
  CDS Start-End: 260-1126

SEQ ID NO: 113947 - DNA, 1298 bp, Homo sapiens; identical to SEQ ID NO: 113943
  Payload ID: 2262
  Gene Symbol: CT47A3
  Gene Name: cancer/testis antigen family 47, member A3
  Uniprot ID: Q5JQC4
  ENST ID: ENST00000441330
  CDS Start-End: 260-1126

SEQ ID NO: 113948 - DNA, 1298 bp, Homo sapiens; identical to SEQ ID NO: 113943
  Payload ID: 2263
  Gene Symbol: CT47A4
  Gene Name: cancer/testis antigen family 47, member A4
  Uniprot ID: Q5JQC4
  ENST ID: ENST00000415858
  CDS Start-End: 260-1126

SEQ ID NO: 113949 - DNA, 1298 bp, Homo sapiens; identical to SEQ ID NO: 113943
  Payload ID: 2264
  Gene Symbol: CT47A5
  Gene Name: cancer/testis antigen family 47, member A5
  Uniprot ID: Q5JQC4
  ENST ID: ENST00000439466
  CDS Start-End: 260-1126

SEQ ID NO: 113950 - DNA, 1294 bp, Homo sapiens
  Payload ID: 2264
  Gene Symbol: CT47A5
  Gene Name: cancer/testis antigen family 47, member A5
  Uniprot ID: Q5JQC4
  ENST ID: ENST00000416816
  CDS Start-End: 256-1122
accagaatctttcccaacttgtctaagtcctctcaggccagccttggtgggaggtttctaggattcgctccctgcccttcccatcttagggtgtcgtctgagacagactcttattccctcaataaagagagagactcttattccctcagcggccagctcctcgcctcccctcggccgtagccacctcagtggtcaccgtcttcaccgtggtcgcctcagcccgctcgccaccccagttgaggcgctgctggtgtcatgtctgccacaggggaccgacacccgacccaaggggaccaggaggccccggtaagccaggagggagcacaggccgaggcggccggagctggtaaccaggagggcggcgactccggccccgacagcagcgacgtggtgcctgcggccgaggtggtcggagtcgcagggcccgtggaaggcctcggggaggaggagggtgagcaggcggcaggcctggccgcagtcccccggggcgggagcgccgaggaggactcagatatcgggcccgcgacggaggaagaggaggaggaagaggggaacgaggcggccaacttcgacttggcggtggtcgcccgtcgctacccggcgtcgggcattcacttcgtgctcctggacatggtccactcccttctccaccgcctctctcacaacgaccacatcctcatagagaaccgtcaactcagccgcctgatggtggggccacacgctgctgcgcgcaacctctggggcaacctccccccgctgctgctgccccagaggctgggtgcaggggccgcagcccgggcgggcgagggcctgggcctgatccaggaggccgcatcggtcccagagcctgcagtgccagctgacctggccgagatggccagggagcccgcggaggaggccgcagaggagaagctctcagaggaggccacagaggaaccagacgcagaggaaccggccacagaagaaccgaccgcacaggaggccacggccccagaggaagtcactaaatctcagcccgaaaagtgggatgaagaggcccaagatgctgcaggcgaggaagagaaagaacaagaaaaagagaaggatgcagaaaacaaggtgaagaactccaaagggacctagacgcagcagaggtgaagccaagaaaatccagatgcctgtgggaattgtaacacatatcattccaaagttcgttacatcaaaagtgatatccagtgacatctaactttcatggatgtatgtgacagtgttcaagttaaaaaataaaagtttgttttaaatgaataaactgaaa

SEQ ID NO: 113951 - DNA, 1298 bp, Homo sapiens
  Payload ID: 2265
  Gene Symbol: CT47A6
  Gene Name: cancer/testis antigen family 47, member A6
  Uniprot ID: Q5JQC4
  ENST ID: ENST00000419194
  CDS Start-End: 260-1126
gccaaccagaatctttcccaacttgtctaagtcctctcaggccagccttggtgggaggtttctaggattcgctccctgcccttcccatcttagggtgtcgtctgagacagactcttattccctcaataaagagagagactcttattccctcagcggccagctcctcgcctcccctcggccgtagccacctcagtggtcaccgtcttcaccgtggtcgcctcagcccgctcgccaccccagttgaggcgctgctggtgtcatgtctgccacaggggaccgacacccgacccaaggggaccaggaggccccggtaagccaggagggagcacaggccgaggcggccggagctggtaaccaggagggcggcgactccggccccgacagcagcgacgtggtgcctgcggccgaggtggtcggagtcgcagggcccgtggaaggcctcggggaggaggagggtgagcaggcggcaggcctggccgcagtcccccggggcgggagcgccgaggaggactcagatatcgggcccgcgacggaggaagaggaggaggaagaggggaacgaggcggccaacttcgacttggcggtggtcgcccgtcgctacccggcgtcgggcattcacttcgtgctcctggacatggtccactcccttctccaccgcctctctcacaacgaccacatcctcatagagaaccgtcaactcagccgcctgatggtggggccacacgctgctgcgcgcaacctctggggcaacctccccccgctgctgctgccccagaggctgggtgcaggggccgcagcccgggcgggcgagggcctgggcctgatccaggaggccgcatcggtcccagagcctgcagtgccagctgacctggccgagatggccagggagcccgcggaggaggccgcagaggagaagctctcagaggaggccacagaggaaccagacgcagaggaaccagccacagaagaaccgaccgcacaggaggccacggccccagaggaagtcactaaatctcagcccgaaaagtgggatgaagaggcccaagatgctgcaggcgaggaagagaaagaacaagaaaaagagaaggatgcagaaaacaaggtgaagaactccaaagggacctagacgcagcagaggtgaagccaagaaaatccagatgcctgtgggaattgtaacacatatcattccaaagttcgttacatcaaaagtgatatccagtgacatctaactttcatggatgtatgtgacagtgttcaagttaaaaaataaaagtttgttttaaatgaataaactgaaa

SEQ ID NO: 113952 - DNA, 1294 bp, Homo sapiens
  Payload ID: 2265
  Gene Symbol: CT47A6
  Gene Name: cancer/testis antigen family 47, member A6
  Uniprot ID: Q5JQC4
  ENST ID: ENST00000618867
  CDS Start-End: 256-1122
accagaatctttcccaacttgtctaagtcctctcaggccagccttggtgggaggtttctaggattcgctccctgcccttcccatcttagggtgtcgtctgagacagactcttattccctcaataaagagagagactcttattccctcagcggccagctcctcgcctcccctcggccgtagccacctcagtggtcaccgtcttcaccgtggtcgcctcagcccgctcgccaccccagttgaggcgctgctggtgtcatgtctgccacaggggaccgacacccgacccaaggggaccaggaggccccggtaagccaggagggagcacaggccgaggcggccggagctggtaaccaggagggcggcgactccggccccgacagcagcgacgtggtgcctgcggccgaggtggtcggagtcgcagggcccgtggaaggcctcggggaggaggagggtgagcaggcggcaggcctggccgcagtcccccggggcgggagcgccgaggaggactcagatatcgggcccgcgacggaggaagaggaggaggaagaggggaacgaggcggccaacttcgacttggcggtggtcgcccgtcgctacccggcgtcgggcattcacttcgtgctcctggacatggtccactcccttctccaccgcctctctcacaacgaccacatcctcatagagaaccgtcaactcagccgcctgatggtggggccacacgctgctgcgcgcaacctctggggcaacctccccccgctgctgctgccccagaggctgggtgcaggggccgcagcccgggcgggcgagggcctgggcctgatccaggaggccgcatcggtcccagagcctgcagtgccagctgacctggccgagatggccagggagcccgcggaggaggccgcagaggagaagctctcagaggaggccacagaggaaccagacgcagaggaaccagccacagaagaaccgaccgcacaggaggccacggccccagaggaagtcactaaatctcagcccgaaaagtgggatgaagaggcccaagatgctgcaggcgaggaagagaaagaacaagaaaaagagaaggatgcggaaaacaaggtgaagaactccaaagggacctagacgcagcagaggtgaagccaagaaaatccagatgcctgtgggaattgtaacacatatcattccaaagttcgttacatcaaaagtgatatccagtgacatctaactttcatggatgtatgtgacagtgttcaagttaaaaaataaaagtttgttttaaatgaataaactgaaa

SEQ ID NO: 113953 - DNA, 1288 bp, Homo sapiens
  Payload ID: 2266
  Gene Symbol: CT47A7
  Gene Name: cancer/testis antigen family 47, member A7
  Uniprot ID: Q5JQC4
  ENST ID: ENST00000434883
  CDS Start-End: 256-1122
accagaatctttcccgccttatctaagtcctctcaggccagacttggtgggaggttcctaggattcgctccctgcccttcccaccttagggtgtcctctgagacagactcttatttcctcaataaagagaaagactcttattccctcagcggccagctcctcgcctcccctcggccgtagccacctcagtggtcaccgtcttcaccgtggtcgcctcagcccgctcgccaccccagttgaggcgctgctggtgtcatgtctgccacaggggaccgacacccgacccaaggggaccaggaggccccggtaagccaggagggagcacaggccgaggcggccggagctggtaaccaggagggcggcgactccggccccgacagcagcgacgtggtgcctgcggccgaggtggtcggagtcgcagggcccgtggaaggcctcggggaggaggagggtgagcaggcggcaggcctggccgcagtcccccggggcgggagcgccgaggaggactcagatatcgggcccgcgacggaggaagaggaggaggaagaggggaacgaggcggccaacttcgacttggcggtggtcgcccgtcgctacccggcgtcgggcattcacttcgtgctcctggacatggtccactcccttctccaccgcctctctcacaacgaccacatcctcatagagaaccgtcaactcagccgcctgatggtggggccacacgctgctgcgcgcaacctctggggcaacctccccccgctgctgctgccccagaggctgggtgcaggggccgcagcccgggcgggcgagggcctgggcctgatccaggaggccgcatcggtcccagagcctgcagtgccagctgacctggccgagatggccagggagcccgcggaggaggccgcagaggagaagctctcagaggaggccacagaggaaccagacgcagaggaaccggccacagaagaaccgaccgcacaggaggccacggccccagaggaagtcactaaatctcagcccgaaaagtgggatgaagaggcccaagatgctgcaggcgaggaagagaaagaacaagaaaaagagaaggatgcggaaaacaaggtgaagaactccaaagggacctagacgcagcagaggtgaagccaagaaaatccagatgcctgtgggaattgtaacacatatcattccaaagttcgttacatcaaaagtgatatccagtgacatctaactttcatggatgtatgtgacagtgttcaagttaaaaaataaaagtttgttttaaatgaataaa

SEQ ID NO: 113954 - DNA, 1298 bp, Homo sapiens; identical to SEQ ID NO: 113943
  Payload ID: 2267
  Gene Symbol: CT47A8
  Gene Name: cancer/testis antigen family 47, member A8
  Uniprot ID: Q5JQC4
  ENST ID: ENST00000457977
  CDS Start-End: 260-1126

SEQ ID NO: 113955 - DNA, 1039 bp, Homo sapiens
  Payload ID: 2267
  Gene Symbol: CT47A8
  Gene Name: cancer/testis antigen family 47, member A8
  Uniprot ID: Q5JQC4
  ENST ID: ENST00000630126
  CDS Start-End: 1-867
atgtctgccacaggggaccgacacccgacccaaggggaccaggaggccccggtaagccaggagggagcacaggccgaggcggccggagctggtaaccaggagggcggcgactccggccccgacagcagcgacgtggtgcctgcggccgaggtggtcggagtcgcagggcccgtggaaggcctcggggaggaggagggtgagcaggcggcaggcctggccgcagtcccccggggcgggagcgccgaggaggactcagatatcgggcccgcgacggaggaagaggaggaggaagaggggaacgaggcggccaacttcgacttggcggtggtcgcccgtcgctacccggcgtcgggcattcacttcgtgctcctggacatggtccactcccttctccaccgcctctctcacaacgaccacatcctcatagagaaccgtcaactcagccgcctgatggtggggccacacgctgctgcgcgcaacctctggggcaacctccccccgctgctgctgccccagaggctgggtgcaggggccgcagcccgggcgggcgagggcctgggcctgatccaggaggccgcatcggtcccagagcctgcagtgccagctgacctggccgagatggccagggagcccgcggaggaggccgcagaggagaagctctcagaggaggccacagaggaaccagacgcagaggaaccggccacagaagaaccgaccgcacaggaggccacggccccagaggaagtcactaaatctcagcccgaaaagtgggatgaagaggcccaagatgctgcaggcgaggaagagaaagaacaagaaaaagagaaggatgcagaaaacaaggtgaagaactccaaagggacctagacgcagcagaggtgaagccaagaaaatccagatgcctgtgggaattgtaacacatatcattccaaagttcgttacatcaaaagtgatatccagtgacatctaactttcatggatgtatgtgacagtgttcaagttaaaaaataaaagtttgttttaaatgaataaactgaaa

SEQ ID NO: 113956 - DNA, 1298 bp, Homo sapiens; identical to SEQ ID NO: 113943
  Payload ID: 2268
  Gene Symbol: CT47A9
  Gene Name: cancer/testis antigen family 47, member A9
  Uniprot ID: Q5JQC4
  ENST ID: ENST00000417256
  CDS Start-End: 260-1126

SEQ ID NO: 113957 - DNA, 1328 bp, Homo sapiens
  Payload ID: 2269
  Gene Symbol: CT47B1
  Gene Name: cancer/testis antigen family 47, member B1
  Uniprot ID: P0C2W7
  ENST ID: ENST00000371311
  CDS Start-End: 260-1159
gccaaccagaatctttcccgccttatctaagtcctctcaggccagacttggtgggaggttcctaggattcgctccctgcccttcccaccttagggtgtcctctgagacagactcttatttcctcaataaagagaaagactcttattccctcagcggccagctcctcgcctcccctcggccgtagccacctcagtggtcaccgtcttcaccgtggtcgcctcagcccgctcgccaccccagttgaggcgctgctggtgtcatgtctgccacaggggaccgacacccgacccaaggggaccaggaggccccggtaagccaggagggagcacaggccgaggcggccggagctggtaaccaggagggcggcgactccggccccgacagcagcgacatggtgcctgcggccgaggtggtcggagtcgcagggcccgtggaaggcctcggggaggaggagggtgagcaggcggcaggcctggccgcagtcccccagggcgggagcgccgaggaggactcagatatcgggcccgcgacggaggaagaggaggaggaggaagaggggaacgaggcggccaacttcgacttggcggtggccacccgtcggtacccggcggcgggcattggcttcgtgttcctgtacctggtccactcccttctccgccgcctctatcacaacgaccacatccagatagcgaaccgtcacctcagccgcctgatggtggggccccacgctgctgtgcccaacctctgggacaaccctcccctgctgctgctgtcccagaggctgggtgcaggggctgcagccccagaaggcgagggcctcggcctgatccaggaggctgcgtcggtccaggaggccgcgtcggtcccagagcctgcagtgccagctgacctggccgagatggccagggagcccgcggaggaggccgcagatgagaaacccccagaggaggccgcagaggagaagctcacagaggaggccacagaggaaccggccgcagaggaaccgacctcagaggaggccgtggcccccgaggaagtcactaaatctcagcccgaaaagtgggatgaagaggcccaagatgctgcaggcgaggaagagaaagaacaagaaaaagagaaggatgtggaaaacaaggtgaagaactccaaagggacctagacgcagcagaggtgaagccaagaaaatccagatgcctgtgggaattgtaacacatatcattccaaagttcgttacatcaaaagtgatatccagtgacatctaactttcatggatgtatgtgacagtgtttgttcaagttaaaaataaaagtttgttttcaatgaataaa

SEQ ID NO: 113958 - DNA, 1252 bp, Homo sapiens
  Payload ID: 2270
  Gene Symbol: CNR1
  Gene Name: cannabinoid receptor 1 (brain)
  ENST ID: ENST00000362094
  CDS Start-End: 1-111
atgaagtcgatcctagatggccttgcagataccaccttccgcaccatcaccactgacctcctgtacgtgggctcaaatgacattcagtacgaagacatcaaaggagaatgaggagaacatccagtgtggggagaacttcatggacatagagtgtttcatggtcctgaaccccagccagcagctggccattgcagtcctgtccctcacgctgggcaccttcacggtcctggagaacctcctggtgctgtgcgtcatcctccactcccgcagcctccgctgcaggccttcctaccacttcatcggcagcctggcggtggcagacctcctggggagtgtcatttttgtctacagcttcattgacttccacgtgttccaccgcaaagatagccgcaacgtgtttctgttcaaactgggtggggtcacggcctccttcactgcctccgtgggcagcctgttcctcacagccatcgacaggtacatatccattcacaggcccctggcctataagaggattgtcaccaggcccaaggccgtggtggcgttttgcctgatgtggaccatagccattgtgatcgccgtgctgcctctcctgggctggaactgcgagaaactgcaatctgtttgctcagacattttcccacacattgatgaaacctacctgatgttctggatcggggtcaccagcgtactgcttctgttcatcgtgtatgcgtacatgtatattctctggaaggctcacagccacgccgtccgcatgattcagcgtggcacccagaagagcatcatcatccacacgtctgaggatgggaaggtacaggtgacccggccagaccaagcccgcatggacattaggttagccaagaccctggtcctgatcctggtggtgttgatcatctgctggggccctctgcttgcaatcatggtgtatgatgtctttgggaagatgaacaagctcattaagacggtgtttgcattctgcagtatgctctgcctgctgaactccaccgtgaaccccatcatctatgctctgaggagtaaggacctgcgacacgctttccggagcatgtttccctcttgtgaaggcactgcgcagcctctggataacagcatgggggactcggactgcctgcacaaacacgcaaacaatgcagccagtgttcacagggccgcagaaagctgcatcaagagcacggtcaagattgccaaggtaaccatgtctgtgtccacagacacgtctgccgaggctctgtga

SEQ ID NO: 113959 - DNA, 5549 bp, Homo sapiens
  Payload ID: 2270
  Gene Symbol: CNR1
  Gene Name: cannabinoid receptor 1 (brain)
  Uniprot ID: P21554
  ENST ID: ENST00000369499
  CDS Start-End: 151-1569
ttagcttatcaggagaacttactgtaaaccgactctttttgtttcaaagatgtctcccactccaggcgaggagcgctcttggctgaggattgccccctgtgggtcactttctcagtcattttgagctcagcctaatcaaagactgaggttatgaagtcgatcctagatggccttgcagataccaccttccgcaccatcaccactgacctcctgtacgtgggctcaaatgacattcagtacgaagacatcaaaggtgacatggcatccaaattagggtacttcccacagaaattccctttaacttcctttaggggaagtcccttccaagagaagatgactgcgggagacaacccccagctagtcccagcagaccaggtgaacattacagaattttacaacaagtctctctcgtccttcaaggagaatgaggagaacatccagtgtggggagaacttcatggacatagagtgtttcatggtcctgaaccccagccagcagctggccattgcagtcctgtccctcacgctgggcaccttcacggtcctggagaacctcctggtgctgtgcgtcatcctccactcccgcagcctccgctgcaggccttcctaccacttcatcggcagcctggcggtggcagacctcctggggagtgtcatttttgtctacagcttcattgacttccacgtgttccaccgcaaagatagccgcaacgtgtttctgttcaaactgggtggggtcacggcctccttcactgcctccgtgggcagcctgttcctcacagccatcgacaggtacatatccattcacaggcccctggcctataagaggattgtcaccaggcccaaggccgtggtggcgttttgcctgatgtggaccatagccattgtgatcgccgtgctgcctctcctgggctggaactgcgagaaactgcaatctgtttgctcagacattttcccacacattgatgaaacctacctgatgttctggatcggggtcaccagcgtactgcttctgttcatcgtgtatgcgtacatgtatattctctggaaggctcacagccacgccgtccgcatgattcagcgtggcacccagaagagcatcatcatccacacgtctgaggatgggaaggtacaggtgacccggccagaccaagcccgcatggacattaggttagccaagaccctggtcctgatcctggtggtgttgatcatctgctggggccctctgcttgcaatcatggtgtatgatgtctttgggaagatgaacaagctcattaagacggtgtttgcattctgcagtatgctctgcctgctgaactccaccgtgaaccccatcatctatgctctgaggagtaaggacctgcgacacgctttccggagcatgtttccctcttgtgaaggcactgcgcagcctctggataacagcatgggggactcggactgcctgcacaaacacgcaaacaatgcagccagtgttcacagggccgcagaaagctgcatcaagagcacggtcaagattgccaaggtaaccatgtctgtgtccacagacacgtctgccgaggctctgtgagcctgatgcctccctggcagcacaggaaaagaatttttttttttaagctcaaaatctagaagagtctattgtctccttggttatatttttttaactttaccatgctcaatgaaaaggtgattgtcaccatgatcacttatcagtttgctaatgtttccatagtttaggtactcaaactccattctccaggggtttacagtgaagaaagcctgttgtttaagtgactgaacgatccttcaaagtctcaatgaaataggagggaaacctttggctacacaattggaagtctaagaacccatggaaaaatgccatcaaatgaataatgcctttgtaaccacaactttcactataatgtgaaatgtaactgtccgtagtatcagagatgtccatttttacaagttatagtactagagatattttgtaaaatgtattatgtcctgtgagatgtgtatcagtgtttatgtgctattaatatttgtttagttcagcaaaactgaaaggtagacttttatgagaacaatggacaagcagtggatacgtgtcaatgtgtgcactttttttctatattattgcccatgatataactttagaaataaaccttaatatttcttcaaatatctctatttaattttgacactgaaataaccgtaaaggtttatttttctgttacctcaacaagaagaatttgaagacttcaaaatattgagcagaattcattcatacttaaaaatttattagccctgcattttcataggaagacacattatcttctggactatagctgttctaatggattataatcagaatggaagagagaaagcatattgactttttttgagcgacatctctgactttctttagtctttagctattactggatctcttaagacagcatgtgttaatcttaatgtatatcgttatcactgtgcagttgctgtttacttgaatagtattgtgttcctatattccaggtttaagtagatttcatgcctgggtggccaaacaacagtcttcattttttttaattgaaaagaagtagtgtctggatcagtaaaattatactgtgtgtgagtgtgaatataaatgtgtgtatgtgtgtttctgtcctgtaactgttacagtaatgtcataaagtgagaaaactgtgaccaagtataaacttttaccacttgctgcactcttgcacatggattcagtttctaaaattgagttcttcctgtaatcttgttgataaaaatactgactccaaccattcaaaaatttcaccccatccctccttaagagattggatcaagtattactaaattgacctttaggtattacacaagaccagtgcttagcaaaaaataatgacaggcatccaaggaagggatgtatttgtagtgttattgccaggaaaggagagtactttggtttctgagcaccgaatattgagcaatatgtcagtcactaaaaggaagacagttctacagaaaaacaatggtaacatttttcaatagcgtgtgtagatagtatgcactatatacatcacgttaaagtaggactatcacacccagcccatgtggctaaaaaagctgaatcagacagtggatgagacacacaacggcagtgaagaaccgatacacttggcattgacgtctagctatgctgtatctgtgctttgcccacatgcccttggtgacagctgagcacccagctctgtcttggtaggtttgggctaaggaacaaatctctcctttgctcgtggttagcaagatacactcaagcatgaagataaacacagctgctttcttcttacaccccggtctcatgctccttaatggcgccatgggtgcttgttgggcctttttccagtaaggaatgatattgctgaagaatctacttaaccctgacaaattttaattataatctcttcttatacagataaaacatgactcctacaaggccccaaggtttacatagtctgaagtgaagtacagagctggcatctatctggtgatttctagctctcgagatacccaagcagcctgatggggcagttccccttcttacggttcacgctctaaggcaggatgtggcttatgagatactttgcattgtctgtctgcacaccttgaatctgcctgctggctcccttactttacctctctgtcatgtgcagatgaaggctcagggtgctagaggattagtaagatctctttctaaagacaggagagattatttacaagaagaactcaccagggtttagtttgcatttaagaattgccagtcttttgtcctgcatcatcttgaacattaatccacatgtttcagagctcaccaggcagtaccaatgctcttttcacagctatgaagagctagagaaattcttgttatggtagaaaaatttcacgattcatttttgaaactgcatttgtgcgtatgcagtgtagattttatagtgtgttgtgctttcaagatctaaatcatatataataaattaagggacaatggggctgacagcactaaacttggtgcttattgatattctaagaaatatctgtgaaatatcatcacgtatgttatacaaccttcatttaaaaaggtttaaaactagttagattcactttgacacttttcatatcatttcttaacccaagtgacgaaaacattgtccccaatgaatatactcattagaattaccatttgttaatatcactcattaattaaccccataattagatccattaatttaaatgatttaaatttaagtaagttttataaggtctgacatcagaggtatcttactttcctctgaggatgatgtacttgccctgaccatgcattttaccatcacacatgttcagaaagggccaaattcccaacctgctcattttttttttatcagagtcatgatgaatcagtcctagaatgtttcatttgcacaagtagggctgcctccaagaggaacctctgatttattttgtatgaaatatatgtgaaaggatatgaatctgagagatgctgtagacatctgtcctacacttgagatgatttccaagcctctctggcactttgagttaagtctatctggtattaaatgccaaggaccttttgctgcctaaatccactctgcaggaaataggcccaaccaccagatgagaattaggccctggatgagtagcgctatagttactgtcctgttgattaatttctgccatttcatgtccataaaagagaccacccatatcatgcacacaattagatttctcacactctaactgtatatttgtatgatattttaaaatctcctaaatgctgggcaatggctattaacaattaattgtcttgcactggccttctgatgaaatgttaacaatgcctattgtaatatagaaaaaaacattctatctactgatttgggctgaatgtatgtaaataggtttctaaaaagtcagatgtttgagcagtggcctacaaatcagtaattttcggatgggagagtttctttacattgccgtggcatcttaaaagctatcttcatgtaaattgactgtactaggcctactggggatcagagttcccaagaaaggaaaccttttcttgtatctggattcaaatttatttccaatgtttcaagcgggaaacatgactctttattgtctgtaaatctaacattattacttttcctcttagaagaatattgtattgttagatgtttgttgagctggtaacatcgttgcaaccactgcaatatcttcgttagtaatctgtataatactttgtatacaagtactggtaagattgttattaaatgtagcttcagtcattaaattactatagcaaagtagtacttcttctgtaatatttacaatgtattaagcccacagtatattttatttcaatgtaattaaactgttaacttattcaaagagaaaacatctcatcatgtctattgtccaaagttacctggaatcaaataaaaattctagattaccatg

SEQ ID NO: 113960 - DNA, 6031 bp, Homo sapiens
  Payload ID: 2270
  Gene Symbol: CNR1
  Gene Name: cannabinoid receptor 1 (brain)
  Uniprot ID: P21554
  ENST ID: ENST00000369501
  CDS Start-End: 621-2039
cgagagggagccagagacagcgcgagcggagggagcggcagggactgcgcgagcgggacgaggcgacgggcgcccgggctggcggagacgggcggccccacgccgggccaggcggggctcgcgggaggacccagtgaagagcctgggaaggggcgaggctcgccggcggtcggagcagcggggcgccagtcccggtcgctgtcgcgggcgggcgctggagaccgggacgccggcgctcggacggactgacttgctgaccgcccgccggaggcacaccccactccaccccaccccgcctcgccagcagcccggcgccggcgccgcctcccgcacgctactccctctgccaccccttccttctccacttcttttccgcctccgcctcttcttgtctcccgcggcgccagcgccttcccttggcccgggcgggggcctcggctccctgcagagctctccgtagtcagtgggggatatttcgttctagcggacaaccagcccctgagctgggcgagaggtgccaagggagcttctgtcccgaggaccaggggatgcgaagggattgccccctgtgggtcactttctcagtcattttgagctcagcctaatcaaagactgaggttatgaagtcgatcctagatggccttgcagataccaccttccgcaccatcaccactgacctcctgtacgtgggctcaaatgacattcagtacgaagacatcaaaggtgacatggcatccaaattagggtacttcccacagaaattccctttaacttcctttaggggaagtcccttccaagagaagatgactgcgggagacaacccccagctagtcccagcagaccaggtgaacattacagaattttacaacaagtctctctcgtccttcaaggagaatgaggagaacatccagtgtggggagaacttcatggacatagagtgtttcatggtcctgaaccccagccagcagctggccattgcagtcctgtccctcacgctgggcaccttcacggtcctggagaacctcctggtgctgtgcgtcatcctccactcccgcagcctccgctgcaggccttcctaccacttcatcggcagcctggcggtggcagacctcctggggagtgtcatttttgtctacagcttcattgacttccacgtgttccaccgcaaagatagccgcaacgtgtttctgttcaaactgggtggggtcacggcctccttcactgcctccgtgggcagcctgttcctcacagccatcgacaggtacatatccattcacaggcccctggcctataagaggattgtcaccaggcccaaggccgtggtggcgttttgcctgatgtggaccatagccattgtgatcgccgtgctgcctctcctgggctggaactgcgagaaactgcaatctgtttgctcagacattttcccacacattgatgaaacctacctgatgttctggatcggggtcaccagcgtactgcttctgttcatcgtgtatgcgtacatgtatattctctggaaggctcacagccacgccgtccgcatgattcagcgtggcacccagaagagcatcatcatccacacgtctgaggatgggaaggtacaggtgacccggccagaccaagcccgcatggacattaggttagccaagaccctggtcctgatcctggtggtgttgatcatctgctggggccctctgcttgcaatcatggtgtatgatgtctttgggaagatgaacaagctcattaagacggtgtttgcattctgcagtatgctctgcctgctgaactccaccgtgaaccccatcatctatgctctgaggagtaaggacctgcgacacgctttccggagcatgtttccctcttgtgaaggcactgcgcagcctctggataacagcatgggggactcggactgcctgcacaaacacgcaaacaatgcagccagtgttcacagggccgcagaaagctgcatcaagagcacggtcaagattgccaaggtaaccatgtctgtgtccacagacacgtctgccgaggctctgtgagcctgatgcctccctggcagcacaggaaaagaatttttttttttaagctcaaaatctagaagagtctattgtctccttggttatatttttttaactttaccatgctcaatgaaaaggtgattgtcaccatgatcacttatcagtttgctaatgtttccatagtttaggtactcaaactccattctccaggggtttacagtgaagaaagcctgttgtttaagtgactgaacgatccttcaaagtctcaatgaaataggagggaaacctttggctacacaattggaagtctaagaacccatggaaaaatgccatcaaatgaataatgcctttgtaaccacaactttcactataatgtgaaatgtaactgtccgtagtatcagagatgtccatttttacaagttatagtactagagatattttgtaaaatgtattatgtcctgtgagatgtgtatcagtgtttatgtgctattaatatttgtttagttcagcaaaactgaaaggtagacttttatgagaacaatggacaagcagtggatacgtgtcaatgtgtgcactttttttctatattattgcccatgatataactttagaaataaaccttaatatttcttcaaatatctctatttaattttgacactgaaataaccgtaaaggtttatttttctgttacctcaacaagaagaatttgaagacttcaaaatattgagcagaattcattcatacttaaaaatttattagccctgcattttcataggaagacacattatcttctggactatagctgttctaatggattataatcagaatggaagagagaaagcatattgactttttttgagcgacatctctgactttctttagtctttagctattactggatctcttaagacagcatgtgttaatcttaatgtatatcgttatcactgtgcagttgctgtttacttgaatagtattgtgttcctatattccaggtttaagtagatttcatgcctgggtggccaaacaacagtcttcattttttttaattgaaaagaagtagtgtctggatcagtaaaattatactgtgtgtgagtgtgaatataaatgtgtgtatgtgtgtttctgtcctgtaactgttacagtaatgtcataaagtgagaaaactgtgaccaagtataaacttttaccacttgctgcactcttgcacatggattcagtttctaaaattgagttcttcctgtaatcttgttgataaaaatactgactccaaccattcaaaaatttcaccccatccctccttaagagattggatcaagtattactaaattgacctttaggtattacacaagaccagtgcttagcaaaaaataatgacaggcatccaaggaagggatgtatttgtagtgttattgccaggaaaggagagtactttggtttctgagcaccgaatattgagcaatatgtcagtcactaaaaggaagacagttctacagaaaaacaatggtaacatttttcaatagcgtgtgtagatagtatgcactatatacatcacgttaaagtaggactatcacacccagcccatgtggctaaaaaagctgaatcagacagtggatgagacacacaacggcagtgaagaaccgatacacttggcattgacgtctagctatgctgtatctgtgctttgcccacatgcccttggtgacagctgagcacccagctctgtcttggtaggtttgggctaaggaacaaatctctcctttgctcgtggttagcaagatacactcaagcatgaagataaacacagctgctttcttcttacaccccggtctcatgctccttaatggcgccatgggtgcttgttgggcctttttccagtaaggaatgatattgctgaagaatctacttaaccctgacaaattttaattataatctcttcttatacagataaaacatgactcctacaaggccccaaggtttacatagtctgaagtgaagtacagagctggcatctatctggtgatttctagctctcgagatacccaagcagcctgatggggcagttccccttcttacggttcacgctctaaggcaggatgtggcttatgagatactttgcattgtctgtctgcacaccttgaatctgcctgctggctcccttactttacctctctgtcatgtgcagatgaaggctcagggtgctagaggattagtaagatctctttctaaagacaggagagattatttacaagaagaactcaccagggtttagtttgcatttaagaattgccagtcttttgtcctgcatcatcttgaacattaatccacatgtttcagagctcaccaggcagtaccaatgctcttttcacagctatgaagagctagagaaattcttgttatggtagaaaaatttcacgattcatttttgaaactgcatttgtgcgtatgcagtgtagattttatagtgtgttgtgctttcaagatctaaatcatatataataaattaagggacaatggggctgacagcactaaacttggtgcttattgatattctaagaaatatctgtgaaatatcatcacgtatgttatacaaccttcatttaaaaaggtttaaaactagttagattcactttgacacttttcatatcatttcttaacccaagtgacgaaaacattgtccccaatgaatatactcattagaattaccatttgttaatatcactcattaattaaccccataattagatccattaatttaaatgatttaaatttaagtaagttttataaggtctgacatcagaggtatcttactttcctctgaggatgatgtacttgccctgaccatgcattttaccatcacacatgttcagaaagggccaaattcccaacctgctcattttttttttatcagagtcatgatgaatcagtcctagaatgtttcatttgcacaagtagggctgcctccaagaggaacctctgatttattttgtatgaaatatatgtgaaaggatatgaatctgagagatgctgtagacatctgtcctacacttgagatgatttccaagcctctctggcactttgagttaagtctatctggtattaaatgccaaggaccttttgctgcctaaatccactctgcaggaaataggcccaaccaccagatgagaattaggccctggatgagtagcgctatagttactgtcctgttgattaatttctgccatttcatgtccataaaagagaccacccatatcatgcacacaattagatttctcacactctaactgtatatttgtatgatattttaaaatctcctaaatgctgggcaatggctattaacaattaattgtcttgcactggccttctgatgaaatgttaacaatgcctattgtaatatagaaaaaaacattctatctactgatttgggctgaatgtatgtaaataggtttctaaaaagtcagatgtttgagcagtggcctacaaatcagtaattttcggatgggagagtttctttacattgccgtggcatcttaaaagctatcttcatgtaaattgactgtactaggcctactggggatcagagttcccaagaaaggaaaccttttcttgtatctggattcaaatttatttccaatgtttcaagcgggaaacatgactctttattgtctgtaaatctaacattattacttttcctcttagaagaatattgtattgttagatgtttgttgagctggtaacatcgttgcaaccactgcaatatcttcgttagtaatctgtataatactttgtatacaagtactggtaagattgttattaaatgtagcttcagtcattaaattactatagcaaagtagtacttcttctgtaatatttacaatgtattaagcccacagtatattttatttcaatgtaattaaactgttaacttattcaaagagaaaacatctcatcatgtctattgtccaaagttacctggaatcaaataaaaattctagattaccatgaagaacataaaa

SEQ ID NO: 113961 - DNA, 1550 bp, Homo sapiens
  Payload ID: 2270
  Gene Symbol: CNR1
  Gene Name: cannabinoid receptor 1 (brain)
  Uniprot ID: P21554
  ENST ID: ENST00000428600
  CDS Start-End: 132-1550
cagttgcataaagaacatagatgagagctttcattccctgctgaaaaggatgccatgcctccaccagtgattgccccctgtgggtcactttctcagtcattttgagctcagcctaatcaaagactgaggttatgaagtcgatcctagatggccttgcagataccaccttccgcaccatcaccactgacctcctgtacgtgggctcaaatgacattcagtacgaagacatcaaaggtgacatggcatccaaattagggtacttcccacagaaattccctttaacttcctttaggggaagtcccttccaagagaagatgactgcgggagacaacccccagctagtcccagcagaccaggtgaacattacagaattttacaacaagtctctctcgtccttcaaggagaatgaggagaacatccagtgtggggagaacttcatggacatagagtgtttcatggtcctgaaccccagccagcagctggccattgcagtcctgtccctcacgctgggcaccttcacggtcctggagaacctcctggtgctgtgcgtcatcctccactcccgcagcctccgctgcaggccttcctaccacttcatcggcagcctggcggtggcagacctcctggggagtgtcatttttgtctacagcttcattgacttccacgtgttccaccgcaaagatagccgcaacgtgtttctgttcaaactgggtggggtcacggcctccttcactgcctccgtgggcagcctgttcctcacagccatcgacaggtacatatccattcacaggcccctggcctataagaggattgtcaccaggcccaaggccgtggtggcgttttgcctgatgtggaccatagccattgtgatcgccgtgctgcctctcctgggctggaactgcgagaaactgcaatctgtttgctcagacattttcccacacattgatgaaacctacctgatgttctggatcggggtcaccagcgtactgcttctgttcatcgtgtatgcgtacatgtatattctctggaaggctcacagccacgccgtccgcatgattcagcgtggcacccagaagagcatcatcatccacacgtctgaggatgggaaggtacaggtgacccggccagaccaagcccgcatggacattaggttagccaagaccctggtcctgatcctggtggtgttgatcatctgctggggccctctgcttgcaatcatggtgtatgatgtctttgggaagatgaacaagctcattaagacggtgtttgcattctgcagtatgctctgcctgctgaactccaccgtgaaccccatcatctatgctctgaggagtaaggacctgcgacacgctttccggagcatgtttccctcttgtgaaggcactgcgcagcctctggataacagcatgggggactcggactgcctgcacaaacacgcaaacaatgcagccagtgttcacagggccgcagaaagctgcatcaagagcacggtcaagattgccaaggtaaccatgtctgtgtccacagacacgtctgccgaggctctgtga

SEQ ID NO: 113962 - DNA, 1320 bp, Homo sapiens
  Payload ID: 2270
  Gene Symbol: CNR1
  Gene Name: cannabinoid receptor 1 (brain)
  Uniprot ID: P21554
  ENST ID: ENST00000468898
  CDS Start-End: 1-1320
atgaagtcgatcctagatggccttgcagataccaccttccgcaccatcaccactgacctcctgggaagtcccttccaagagaagatgactgcgggagacaacccccagctagtcccagcagaccaggtgaacattacagaattttacaacaagtctctctcgtccttcaaggagaatgaggagaacatccagtgtggggagaacttcatggacatagagtgtttcatggtcctgaaccccagccagcagctggccattgcagtcctgtccctcacgctgggcaccttcacggtcctggagaacctcctggtgctgtgcgtcatcctccactcccgcagcctccgctgcaggccttcctaccacttcatcggcagcctggcggtggcagacctcctggggagtgtcatttttgtctacagcttcattgacttccacgtgttccaccgcaaagatagccgcaacgtgtttctgttcaaactgggtggggtcacggcctccttcactgcctccgtgggcagcctgttcctcacagccatcgacaggtacatatccattcacaggcccctggcctataagaggattgtcaccaggcccaaggccgtggtggcgttttgcctgatgtggaccatagccattgtgatcgccgtgctgcctctcctgggctggaactgcgagaaactgcaatctgtttgctcagacattttcccacacattgatgaaacctacctgatgttctggatcggggtcaccagcgtactgcttctgttcatcgtgtatgcgtacatgtatattctctggaaggctcacagccacgccgtccgcatgattcagcgtggcacccagaagagcatcatcatccacacgtctgaggatgggaaggtacaggtgacccggccagaccaagcccgcatggacattaggttagccaagaccctggtcctgatcctggtggtgttgatcatctgctggggccctctgcttgcaatcatggtgtatgatgtctttgggaagatgaacaagctcattaagacggtgtttgcattctgcagtatgctctgcctgctgaactccaccgtgaaccccatcatctatgctctgaggagtaaggacctgcgacacgctttccggagcatgtttccctcttgtgaaggcactgcgcagcctctggataacagcatgggggactcggactgcctgcacaaacacgcaaacaatgcagccagtgttcacagggccgcagaaagctgcatcaagagcacggtcaagattgccaaggtaaccatgtctgtgtccacagacacgtctgccgaggctctgtga

SEQ ID NO: 113963 - DNA, 591 bp, Homo sapiens
  Payload ID: 2270
  Gene Symbol: CNR1
  Gene Name: cannabinoid receptor 1 (brain)
  ENST ID: ENST00000551417
  CDS Start-End: 358-591
gcagagctctccgtagtcagtgggggatatttcgttctagcggacaaccagcccctgagctgggcgagaggtgccaagggagcttctgtcccgaggaccaggggatgcgaaggatgtctcccactccaggcgaggagcgctcttggctgagggcaaagagattgaaagaggggagtcacataatcagcatacgtttatgaagattacccccacagctgtgtggcaagtgatcaaaaaggaacaggaccagagaagagcaggaaaactggtcagaaagcaggcgccctaaccctggattgccccctgtgggtcactttctcagtcattttgagctcagcctaatcaaagactgaggttatgaagtcgatcctagatggccttgcagataccaccttccgcaccatcaccactgacctcctgtacgtgggctcaaatgacattcagtacgaagacatcaaaggtgacatggcatccaaattagggtacttcccacagaaattccctttaacttcctttaggggaagtcccttccaagagaagatgactgcgggagacaacccccagctagtcccagcagaccaggtgaacatt

SEQ ID NO: 113964 - DNA, 2122 bp, Homo sapiens
  Payload ID: 2270
  Gene Symbol: CNR1
  Gene Name: cannabinoid receptor 1 (brain)
  Uniprot ID: P21554
  ENST ID: ENST00000549890
  CDS Start-End: 92-1510
tcggcttatttgttttccctcctcttaggattgccccctgtgggtcactttctcagtcattttgagctcagcctaatcaaagactgaggttatgaagtcgatcctagatggccttgcagataccaccttccgcaccatcaccactgacctcctgtacgtgggctcaaatgacattcagtacgaagacatcaaaggtgacatggcatccaaattagggtacttcccacagaaattccctttaacttcctttaggggaagtcccttccaagagaagatgactgcgggagacaacccccagctagtcccagcagaccaggtgaacattacagaattttacaacaagtctctctcgtccttcaaggagaatgaggagaacatccagtgtggggagaacttcatggacatagagtgtttcatggtcctgaaccccagccagcagctggccattgcagtcctgtccctcacgctgggcaccttcacggtcctggagaacctcctggtgctgtgcgtcatcctccactcccgcagcctccgctgcaggccttcctaccacttcatcggcagcctggcggtggcagacctcctggggagtgtcatttttgtctacagcttcattgacttccacgtgttccaccgcaaagatagccgcaacgtgtttctgttcaaactgggtggggtcacggcctccttcactgcctccgtgggcagcctgttcctcacagccatcgacaggtacatatccattcacaggcccctggcctataagaggattgtcaccaggcccaaggccgtggtggcgttttgcctgatgtggaccatagccattgtgatcgccgtgctgcctctcctgggctggaactgcgagaaactgcaatctgtttgctcagacattttcccacacattgatgaaacctacctgatgttctggatcggggtcaccagcgtactgcttctgttcatcgtgtatgcgtacatgtatattctctggaaggctcacagccacgccgtccgcatgattcagcgtggcacccagaagagcatcatcatccacacgtctgaggatgggaaggtacaggtgacccggccagaccaagcccgcatggacattaggttagccaagaccctggtcctgatcctggtggtgttgatcatctgctggggccctctgcttgcaatcatggtgtatgatgtctttgggaagatgaacaagctcattaagacggtgtttgcattctgcagtatgctctgcctgctgaactccaccgtgaaccccatcatctatgctctgaggagtaaggacctgcgacacgctttccggagcatgtttccctcttgtgaaggcactgcgcagcctctggataacagcatgggggactcggactgcctgcacaaacacgcaaacaatgcagccagtgttcacagggccgcagaaagctgcatcaagagcacggtcaagattgccaaggtaaccatgtctgtgtccacagacacgtctgccgaggctctgtgagcctgatgcctccctggcagcacaggaaaagaatttttttttttaagctcaaaatctagaagagtctattgtctccttggttatatttttttaactttaccatgctcaatgaaaaggtgattgtcaccatgatcacttatcagtttgctaatgtttccatagtttaggtactcaaactccattctccaggggtttacagtgaagaaagcctgttgtttaagtgactgaacgatccttcaaagtctcaatgaaataggagggaaacctttggctacacaattggaagtctaagaacccatggaaaaatgccatcaaatgaataatgcctttgtaaccacaactttcactataatgtgaaatgtaactgtccgtagtatcagagatgtccatttttacaagttatagtactagagatattttgtaaaatgtattatgtcctgtgagatgtgtatcagtgtttatgtgctattaatatttgtttagttcagcaaaactgaaaggtagacttttatgagaacaatggacaagcagtggatacgtgtcaatgtgtgcactttttttctatattattgcccatgatataactttagaaataaaccttaatatttcttc

SEQ ID NO: 113965 - DNA, 5254 bp, Homo sapiens
  Payload ID: 2271
  Gene Symbol: CNR2
  Gene Name: cannabinoid receptor 2 (macrophage)
  Uniprot ID: P34972
  ENST ID: ENST00000374472
  CDS Start-End: 163-1245
ggcactcaacaggtgctctgagtggcacccacggccaggtcctgggagaggacagaaaacaactgggactcctcagcccccggcagctcccagtgcccagccacccacaacacaacccaaagccttctagacaagctcagtggaatctgaagggcccaccccatggaggaatgctgggtgacagagatagccaatggctccaaggatggcttggattccaaccctatgaaggattacatgatcctgagtggtccccagaagacagctgttgctgtgttgtgcactcttctgggcctgctaagtgccctggagaacgtggctgtgctctatctgatcctgtcctcccaccaactccgccggaagccctcatacctgttcattggcagcttggctggggctgacttcctggccagtgtggtctttgcatgcagctttgtgaatttccatgttttccatggtgtggattccaaggctgtcttcctgctgaagattggcagcgtgactatgaccttcacagcctctgtgggtagcctcctgctgaccgccattgaccgatacctctgcctgcgctatccaccttcctacaaagctctgctcacccgtggaagggcactggtgaccctgggcatcatgtgggtcctctcagcactagtctcctacctgcccctcatgggatggacttgctgtcccaggccctgctctgagcttttcccactgatccccaatgactacctgctgagctggctcctgttcatcgccttcctcttttccggaatcatctacacctatgggcatgttctctggaaggcccatcagcatgtggccagcttgtctggccaccaggacaggcaggtgccaggaatggcccgaatgaggctggatgtgaggttggccaagaccctagggctagtgttggctgtgctcctcatctgttggttcccagtgctggccctcatggcccacagcctggccactacgctcagtgaccaggtcaagaaggcctttgctttctgctccatgctgtgcctcatcaactccatggtcaaccctgtcatctatgctctacggagtggagagatccgctcctctgcccatcactgcctggctcactggaagaagtgtgtgaggggccttgggtcagaggcaaaagaagaagccccgagatcctcagtcaccgagacagaggctgatgggaaaatcactccgtggccagattccagagatctagacctctctgattgctgatgaggcctcttcccaatttaaacaactcaagtcagaaatcagttcactccctggaagagagagaggggtcttggcactctcttcttacttaaaccagtcccagacacctagacacggacccctttttgctgatgagtgttgggactgactcctggaagacagcctggccttgcccacctgcacacagtctgttggataggtagggccacgaggagtagccaggtaggcgagacacaaaaggcctgggacagggtcagtacaagtcaggtcaggcttcatgcctgcatcctccagagaccacaggagccaaagcgagcctccaggcccagcaatgagggacttgggagaaatctgagaagaatgggttgttctcttgggaagtcagggtatcagatgggatggacatccaggtcttctctctgcctaattgtcaaggcctccttggctctggagctatgaaaggccccactttcaagtcacccttgccactgaggaccgaggactatgctatgatgaggattaaggtgttgacttgcctctttcagagataaatgacaagccttcagtttggggcatcctgttgtttgggcgaggaccctctctgatattctgataatccccacctgtaacctcaggtccctggaaatacagaggaggctgggatcgcctgagacacaaaaatctttggagaattttcttgaccctctgaagtccttccagcagcagtcctggtggtgctgctggaagcaggcaatgtcctagtctaacctaactcgaagaaaaaaaggaagatattcacaaagattgtataaatctccaaactgttcccctatctgcccccaattcagctcccttgcctcctccacacccctattacatataataagcagagcaagtgggaggaggggaaatgtccttcctatatgccaggtatggggctgacatttcagtctattgaccccagctagaatatagctccatgattttaaagatctcaggggccaggcatggtagctcatgcctgtaatcccagcactttgggaggccaaggcaggtggatcacctgaggtcaggagtttgagaccagcctgaccaatatggtgaaaccctgtctctactaaaaatacaaaaattagcagggcatggtggcaggcacctgtagtcccagctactcgggaggctgagacaggagaattgcttgaaccctggaggcagaggttgcagtgagccgagattgcaccactgcactccagcctgggtgacagagcaagactgtctcaaaaaaataaaataaaatagatcccagggtactcatttttcatatgagggaggctgggttcctcccagaggagcctaaaacagccaacaagagaaattgttggcggcaggaagattgcagaggaattctaatgcaattatttgggacctcaaatggaataaaatgaaagatattggttaaacatgtcttcgtttaatactttcaagacaaaatatccactagctattcacttattcattcatctcataaacatgagccaggctctgtgcagggtcctgagtacccagccataaatgagactgtgcccctgtctcatggggcttacagtctatatcctgcttgcaagacagccaataagtcaataaagaagataattacaggcagtacaacaaaggaaatatgcaggttcatgtcatgtaatagggattaattgagttaactcaataaacggtaggatagacctaccatgtgccggctcacttttattgagcctttactatgtgccaggcagggggctaagtgtttttaaatgccttatttcacttcatgtttcccaacaacctaataagaaggtcttagttatcttcattttacagatgtggcaacctcaaagatgcaaagtcacttgtctaaggtcaccctgctaagtaccagagctgaggtctccaacctagttctgtttgacttcaaagcctgccctcttaaccactaaccttttgtcctagttcagtcaaattctgcttgattattgctcattagggataatattagctatctgtagcatcagattgctgcaaagttaactcatcgtagattctcaatatactccattttattaaatggccccgtattaatctcctgtaataaatttcacaaatccagtggcttatcaacagaaatttactgtctcataattctggaggccagaagtcaaaatcaagatgtggtagggccctgctccctccaaaagtttaaggggagaattattccttgactctttcaacttctggcagtccctgtcattccttggcttgtggaaacatcactcctacctctgactctgtcttcatatggcatttcctctgtgtctcttggtgtcttttttttttttttttttttttttgagacggaatctcattctgttgtccaggcaggagtgcagtgacatgatcttggctcactgcaacctccacctctcaggttcaagtgattctcctgcctcagcctcccaaatagctgggactacaggcacccgccaccacactcagctaatttttgtatttttagtagagatggggtttcaccatcttgcccaggctggtcttgaactcctgacctcaagtgatccgcccaccttggcctcctaaattgctgggattacagacgtgagccaccatacccggcctggtgtcttttttaaagaatatcagtcactggatttgggcccaccctaatcctaatagtatgacttcatcttaatttaaccaattatatctgtagagaccctgtttccaaataaggtcacattcacagattccaggtggacaagaagtttaggcggacactattcaactcagtacagacccaggaacaaagtccacccactgggctgtgttgagtggcagtcactagtttatcctccctcaacaagatgagctccaggttgacctctgcatccccagtgctcagtcaggacccagcagagcatctgaagggatctggtcaatatgtgtggaactgaactgtttctgaaaagctctgacgtatgttttggaaaatcaaatcttgttttaatccagacaccaatctttttgtaaggcaaacaagtagcataaatgtttaaaagtgaatttgcatgtttatatactgtcattccttaaagttgaagcatgcctttctttattcatcggtggaatcctttctcattttggcaaagaaaatgcccaagtgcctggcacaaacaagcactgagtaaatacttcttgaatgaataaaactagattctaaaaatcatttgatcaaacgcaactccacactttctacttctcttcttttagaaccacactgtatttctgctttttttttttttttttttttttttgacatagaatctcactctgtcacccaggttggagtgcagtggcatgcaatcttggctcactgcaacctctgcctcctgggttcaagcagttctcctgccttagcctcccatgtagctgggattacaggtacccgccaccatgcccagctaatttttgtattgttagtagagatggaatttcaccatattggccaggctggtcttgaactcctgacttcaagtgatccacccaccttagcctcccaaagtgctaggattacaggtgtgagccaccactcccagcccctatgtctgctttaagtggagaagcagagcttatgagggaggagaacaagggtgcaaaagggacctagatatcactgagaactgcccttgttgtttggttgaggaaatgggcccagacagtggacaagacttgctcagggagacaaacgagatggtgtccagtgcaacaaacctaggtttcctaacttccagttctgtccactctacatcagtgcctctcacctgtccctgcaggttcacattttggttatgtggataaggagaaataaattgaagatcacaatgtcccattttatcttccccaagacaagctctgtaacattaaagaccactatgcaaaccga

SEQ ID NO: 113966 - DNA, 1953 bp, Homo sapiens
  Payload ID: 2272
  Gene Symbol: CNRIP1
  Gene Name: cannabinoid receptor interacting protein 1
  Uniprot ID: Q96F85
  ENST ID: ENST00000263655
  CDS Start-End: 607-1101
tccctttaccccccctcagcctcctcccgcctggctggcgccggatccgcgagcagcagtgtccacctcacgtagctggccgaggcggtatccagattccgggggtctcgctccttggcatagtggtcgcttaactccagcgccttcccagtgcctcccaaacctctcctcctcctgcccggggctgttctaggaggagcctaaatgtccgcttccccagctgaaggggattgtggtgcgtaaacaggattaactccctcgcccccagctgcgcggatctgcgcggcggcctgcgggccagagcgagccttcgggtgcgtggagggcgcagcactggagcgggggatggggaagcgcgcggccttggagccgtctcttgggcccgcttcctcgccgagtggggaggggggccacagcctaaggagctgctcctcaaaagcccgggcggacggcggcgacggcgcgggttcctagcggcagcctcagctccaccacctccctcaccctccccgcgcttcctctccgcccctcgcgctccagccactcggccgcagccggcgctgtcctccgccccccggagccgccgcgccagaccctcgcccagacatgggggacctgccgggcctcgtgcgcctctccatcgcgctgcgcatccagcctaatgacggcccggtcttttacaaggtggacgggcagcgcttcggccagaaccgcaccatcaagctgctcaccggctcctcctacaaggttgaggtgaagattaaacccagcacgctgcaggtcgagaatatttccattggtggtgtgcttgtcccactggaactgaagtctaaagagcctgatggggacagagttgtttatacgggtacatatgacacagaaggtgtgaccccaacgaagagtggagaacggcaacccatccagatcaccatgccgttcacagacattgggaccttcgagacagtgtggcaagtcaagttctacaattaccacaagcgggatcactgccagtggggaagccccttctctgtcattgagtatgaatgcaagcccaacgagacacgcagtctgatgtgggtgaacaaggagtccttcctctgaaagtggctctttctgatgctactggacaatcttttcagaaatctacttttagataaaccagcgcaggccttaaacaaggcatgccacaccattgctgttccccatctggtactaatgacctactagccctggttattttgaaagtgtaattcccctctgacacaatatccctcacatacaagatggtgatgtaccactcccgagaatattcccatctgtattttgtgctgatgttcctgcatccagttgttctcggtcatacttttgaccacttgtgactggagttcagtggccctggcaggcttgtcctgctcttgaccattccactgactaactttggtgttttgtttccaagttaagtgattcctccttttttttgttcaatgttaaatttaaaaataacaatgtgtatgggtcctcccatgtgtaatatggtaacatgtaacttgcagtgtttgccagctttcaaagcaggctttgtgaaaatgtaatacaaacagcagtgaatgggactcaaatgttgtgcttcctataaacagctccgctctttcagggaaggatggtaacaaactagaaggacaaatatgtacgtatttataacgtattaaaactcttttaagtagcttaaggtattgtgcaatggcctagcctagtagaaatgggggaaaagcattgctgtggaccattgttaaagtgacaggagttgtagggttacccctttgacaagcttccatagtcttcagacacgcacattgatggcatccctacagtcttcttcacttgaactttgtaaaactgcatatggacctgtaatcaacttttgatatttcttaataaaggcgttgaaaatca

SEQ ID NO: 113967 - DNA, 1748 bp, Homo sapiens
  Payload ID: 2272
  Gene Symbol: CNRIP1
  Gene Name: cannabinoid receptor interacting protein 1
  ENST ID: ENST00000409862
  CDS Start-End: 183-596
atagtggtcgcttaactccagcgccttcccagtgcctcccaaacctctcctcctcctgcccggggctgttctaggaggagcctaaatgtccgcttccccagctgaaggggattgtgccactcggccgcagccggcgctgtcctccgccccccggagccgccgcgccagaccctcgcccagacatgggggacctgccgggcctcgtgcgcctctccatcgcgctgcgcatccagcctaatgacggcccggtcttttacaaggtggacgggcagcgcttcggccagaaccgcaccatcaagctgctcaccggctcctcctacaaggttgaggtgaagattaaacccagcacgctgcaggtcgagaatatttccattggtggtgtgcttgtcccactggaactgaagtctaaagagcctgatggggacagagttgtttatacgggtacatatgacacagaaggtgtgaccccaacgaagagtggagaacggcaacccatccagatcaccatgccggtaaggcttgcttgcgggtataggagtatggtgccatggaaaatggaaaccacagaaaagaaaacaatcactatctctctgtaagaaaaggtgtgttgggagccaattactgtggaaattgagttgtggatttccttcaagcatctgctggagagagaactacttaattaatgctcttttgcatgacagactgaccctgtagatgctgaaaagacaccataagcagaagcagatggttctggaagagacagaacctacattgccattttcccagttatagtctacttcagaactggtttagataattggctgtgaaaagtttctgattccaagtaggccacaatattctggttaagagaaagctgatttgaatgacactttgctacttaaagctaaatggaggagccaaaaaaagtgtcatgggaaaaatacacctcttatataatatcctataatacacctattttatataatatatacctattatatatacacctatataatatatatatacctatattatatatacctattatatataatatctggtaatcctatcagatatcatatataataaaatgatataccctggtaatatggccccaagtaagaaaaaacaaattggtagaaaggatagagtcaagacatagatttaactatatgtgcaaacataataaataggtgatgaagcaagcttgctaaagcacaggaaaaggaagcttcacctaaactgctgcttgcaaactgggcagccttttccctctgcaagaacaaccttcaactgtctgccctctagctttataggaagtatcacaagggttctcaaatatcggtatgcgtgagaatctctttgggagtttgtttaaaattccagtcctaggttccctctccagtgatcttagctcagtagagctagggtggggacagagaaactcttagcaagcataccagatcctgaagaggatggtgtgggaatgcactttgagaaatgcctatctaacctttggaaacttaaagtgttcccagtccccattatactttttaaaaccacaatagtcacataaggaaataatctagcagctcatccctttgcatccaatgtttgaactatttttagaaagtgctcttgttctgtcaaagaaccttcaacacagaaaaatacaaaaatgagggaaatgtataattcctgcaagagagaagtgttgttaacatgtcaataaatgttcttagaaagtt

SEQ ID NO: 113968 - DNA, 644 bp, Homo sapiens
  Payload ID: 2272
  Gene Symbol: CNRIP1
  Gene Name: cannabinoid receptor interacting protein 1
  Uniprot ID: Q96F85
  ENST ID: ENST00000409559
  CDS Start-End: 1-387
atgggggacctgccgggcctcgtgcgcctctccatcgcgctgcgcatccagcctaatgacggcccggtcttttacaaggtggacgggcagcgcttcggccagaaccgcaccatcaagctgctcaccggctcctcctacaaggttgaggtgaagattaaacccagcacgctgcaggtcgagaatatttccattggtggtgtgcttgtcccactggaactgaagtctaaagagcctgatggggacagagttgtttatacgggtacatatgacacagaaggtgtgaccccaacgaagagtggagaacggcaacccatccagatcaccatgccggagtgcctggaacaacgaccccaagagatctctcttacatatgaatgtgaagaataagcacattcttcaatgtgtgccatcatgaggaacaaatgttcttttttttttttccaaattatttgctttgcattctaggggagggcttctcacaggccatcagaattatcggggatgcttgttaaaatgtagattcctaaactctacctttttagacctcttaaattgagcaaactctctgagagtaaatccaaagcatctgcattttattaagcactttaggtgattcttatcatattaaagtttggaaaacacta

SEQ ID NO: 113969 - DNA, 2378 bp, Homo sapiens
  Payload ID: 2273
  Gene Symbol: CNPY1
  Gene Name: canopy FGF signaling regulator 1
  Uniprot ID: Q3B7I2
  ENST ID: ENST00000321736
  CDS Start-End: 164-442
aatcctcttggtgggtgctgaaacaatgccgggagagcaaagccgctgagagtttgtcccgttagatccaggcgtgaaggacggactgtactacagggagcagatccccctagctcagtcggaggcgttcctaacggatcttttggagaaagtctgtgagcgaatgaacgactacaagcttgaggaagaccctgtgacgaaggagagaactttcaagagattcgctcctaggaaaggagacaaaatataccaagaatttaaaaaattgtatttttattctgatgcttacagacctttgaaatttgcgtgtgaaactataatagaagagtatgaagatgaaatatcctcacttatcgcccaggagacacactatctagctgacaagctgtgcagtgaaaaatcagatctgtgtgaaacttctgctaatcatactgagctctaggagtgccgttctgctggtcgtagagaggagtaaagtcacacccaaaggtcaatgtctgcattttatgtttgcatgttgtctttcatgataagaaaaattttgtctcttgtttataccgtgtttgtctccgtttatgattcattttgaaaatctgttggttgacatcatgacaaaccctgcgtttttttataggtgaagctgaggagtacatgaaacttaaattaacctttgcagattttgataaatcaagcttgacaatagaggatttaattctgtattgaggaaaaaagcgaagacatttcataaacaaaatagggatttcataatgtatgctgcttattttataacagtgtatgtgcacatatgcaagcgcagtggctgtctgataagaactggatttgaatcctcaaatacttgattgcctataaatttaaggaaatacatggcaacaaattcaaaatgtggccttctgggtgagatatggctattagtgaaagaaacccactttttatcaggaatgaaattaaaatttttagaaaccacaagtttaaaaacccatctctaaaatttagtggaatgtgtaaaaactaatgaatgctttaatttatagtaaacaataattatattggcctctcaaacaccattctgagtttaagtggcttagaaagttgatttattattgcatcaggtgttaaaagatgacactagtgattgcgttttgtttcgctccaaactcttctggcttgtttgtttttcttctaaacgttttttttttggctcacatttagtgtgttgagtttactactaaataatctaccattcttctacaggaatggaaaaagagttgggacctggtgggaaattatcttttggccacacttaatatacaaagtctagtaacaatcactcccggaaatttctttatctctgttacatttgcattcaatggaatctgactttaatgattaaaaatgtcagggtatggtctacaccagtttctaaaaagagattctcattgtctttggtgacaatcaagtgggtaggatgctacaaatcccccccccaacccccccgacccaaaactctttgccatattgttacttagttgcttaaaaagcacattatgtgtttaaatcattctcctgactcttcagcaggaaacaattcttaaatttaggaaaatttaccaaagctaaggggaagggctttccatgccccctccccacctaaactctgattaaaagttagtgagttaatgtcacttaattacttgggtgcttcttttttgtcttgtctgtggctgcttaagtctgatggctcctacataacccagcgaactcgcacccgagctgacacacgatggaaatagaactgaataataattaacactattttccagtagggtaggacaattgttatttaaaacatagtccctatagctttatttaaacgtatctagttaaggttaatttggcatttaaagtagtaaatcaggaacattctcctaacttggattttcttgggaaatgcactaaacaggacaattattcctgaaaacctagtgaccttcacaggaacatggcgggacctgtgacactaagtaagcttcagtgaaaactgttcacggtcgtaaccgtagaagtgttgccaaatctgtttccatactctctttgatcatcatcaaacattctcaaatgtaggcaatgctaacactaattatagaaattaagaaaatgtgggctcctgtttgtaactaaacggacgtggggaggtgcacctcctgtcactgaggggtgcctttcatggacagtgatgctttgctttgaatggagagggcgaggaaccttgacttacagtgactatctaaggttgtgataaatatggcatttcaggtttttttcttggatttcccattaaaaatagtcttgtatcttgc

SEQ ID NO: 113970 - DNA, 560 bp, Homo sapiens
  Payload ID: 2273
  Gene Symbol: CNPY1
  Gene Name: canopy FGF signaling regulator 1
  Uniprot ID: Q3B7I2
  ENST ID: ENST00000406197
  CDS Start-End: 140-418
aatgccgggagagcaaagccgctgagagtttgtcccgttagatccaggcgtgaaggacggactgtactacagggagcagatccccctagctcagtcggaggcgttcctaacggatcttttggagaaagtctgtgagcgaatgaacgactacaagcttgaggaagaccctgtgacgaaggagagaactttcaagagattcgctcctaggaaaggagacaaaatataccaagaatttaaaaaattgtatttttattctgatgcttacagacctttgaaatttgcgtgtgaaactataatagaagagtatgaagatgaaatatcctcacttatcgcccaggagacacactatctagctgacaagctgtgcagtgaaaaatcagatctgtgtgaaacttctgctaatcatactgagctctaggagtgccgttctgctggtcgtagagaggagtaaagtcacacccaaaggtttcagatgaggaaaccaaggcccagagaggaaaaggcacagcaggcatgacaccagtgccatcggtgtttgcttcacccttgcagattacgag

SEQ ID NO: 113971 - DNA, 1214 bp, Homo sapiens
  Payload ID: 2274
  Gene Symbol: CNPY2
  Gene Name: canopy FGF signaling regulator 2
  Uniprot ID: Q9Y2B0
  ENST ID: ENST00000273308
  CDS Start-End: 542-1090
ctggactgctcgctggccggcagcgcaccgttttgaaggtcctagcccacctgggctggctcacgcgcacgactagccgctcccatacagcacgcccggactctgtcgtcgcttaaggccactcctattctacggctgacccctggtggtcacgtggatctgttcgccacgcaagtctgggtccttcggcgattgaccggggtccttgctgttcgggagcctctcctaagctgcctgttcgcgcgagagtttggaggggcgggtttggggtcggtgtctgattggggctcgcaccgcagcacgctggagtcccgcttaggtaccagttagcgtcaggggagctgggtcaggcggtcgccgggacaccccgtgtgtggcaggcggcgaagcgctctggagaatcccggacagccctgctccctgcagccaggtgtagtttcgggagccactggggccaaagtgagagtccagcggtcttccagcgcttgggccacggcggcggccctgggagcagaggtggagcgaccccattacgctaaagatgaaaggctggggttggctggccctgcttctgggggccctgctgggaaccgcctgggctcggaggagccaggatctccactgtggagcatgcagggctctggtggatgaactagaatgggaaattgcccaggtggaccccaagaagaccattcagatgggatctttccggatcaatccagatggcagccagtcagtggtggaggtgccttatgcccgctcagaggcccacctcacagagctgctggaggagatatgtgaccggatgaaggagtatggggaacagattgatccttccacccatcgcaagaactacgtacgtgtagtgggccggaatggagaatccagtgaactggacctacaaggcatccgaatcgactcagatattagcggcaccctcaagtttgcgtgtgagagcattgtggaggaatacgaggatgaactcattgaattcttttcccgagaggctgacaatgttaaagacaaactttgcagtaagcgaacagatctttgtgaccatgccctgcacatatcgcatgatgagctatgaaccactggagcagcccacactggcttgatggatcacccccaggaggggaaaatggtggcaatgccttttatatattatgtttttactgaaattaactgaaaaaatatgaaaccaaaagtacaaa

SEQ ID NO: 113972 - DNA, 484 bp, Homo sapiens
  Payload ID: 2274
  Gene Symbol: CNPY2
  Gene Name: canopy FGF signaling regulator 2
  ENST ID: ENST00000551286
  CDS Start-End: 179-484
gacagccctgctccctgcagccaggtgtagtttcgggagccactggggccaaagtgagagtccagcggtcttccagcgcttgggccacggcggcggccctgggagcagagcatgcagggctctggtggatgaactagaatgggaaattgcccaggtggaccccaagaagaccattcagatgggatctttccggatcaatccagatggcagccagtcagtggtggaggtgccttatgcccgctcagaggcccacctcacagagctgctggaggagatatgtgaccggatgaaggagtatggggaacagattgatccttccacccatcgcaagaactacgtacgtgtagtgggccggaatggagaatccagtgaactggacctacaaggcatccgaatcgactcagatattagcggcaccctcaagtttgcgtgtgagagcattgtggaggaatacgaggatgaactcattgaattcttttcccga

SEQ ID NO: 113973 - DNA, 673 bp, Homo sapiens
  Payload ID: 2274
  Gene Symbol: CNPY2
  Gene Name: canopy FGF signaling regulator 2
  ENST ID: ENST00000546466
  CDS Start-End: 1-243
aagaactacgtacgtgtagtgggccggaatggagaatccagtgaactggacctacaaggcatccgaatcgactcagatattagcggcaccctcaagtttgcgtgtgagagcattgtggaggaatacgaggatgaactcattgaattcttttcccgagaggctgacaatgttaaagacaaactttgcagtaagcgaacagatctttgtgaccatgccctgcacatatcgcatgatgagctatgaaccactggagcagcccacactggcttgatggatcacccccaggaggggaaaatggtggcaatgccttttatatattatgtttttactgaaattaactgaaaaaatatgaaaccaaaagtacaaactgtgttgtcttttcatgcctggaattgcccttacattaagcttgaagataaggagttatatagacaggaaagataatggaggagaaagaagagttttgggattgatacaggataaagatggagggaccagcaagaacagagacaggaaggggaaaatggatgtgaccaactcagctgaaaagtaagggctttatcggatagggacagacgaggtaaggaaggttgtttaatgagaggccttgcttgccagcctaagcttttaaatttgatgccagtggcaacaataaagtgtatctatcactagc

SEQ ID NO: 113974 - DNA, 674 bp, Homo sapiens
  Payload ID: 2274
  Gene Symbol: CNPY2
  Gene Name: canopy FGF signaling regulator 2
  ENST ID: ENST00000551475
  CDS Start-End: 170-674
gctcgcaccgcagcacgctggagtcccgcttaggtaccagttagcgtcaggggagctgggtcaggcggtcgccgggacaccccgtgtgtggcaggcggcgaagcgctctggagaatcccggacagccctgctccctgcagccaggtggagcgaccccattacgctaaagatgaaaggctggggttggctggccctgcttctgggggccctgctgggaaccgcctgggctcggaggagccaggatctccactgtggagcatgcagggctctggtggatgaactagaatgggaaattgcccaggtggaccccaagaagaccattcagatgggatctttccggatcaatccagatggcagccagtcagtggtggaggtgccttatgcccgctcagaggcccacctcacagagctgctggaggagatatgtgaccggatgaaggagtatggggaacagattgatccttccacccatcgcaagaactacgtacgtgtagtgggccggaatggagaatccagtgaactggacctacaaggcatccgaatcgactcagatattagcggcaccctcaagtttgcgtgtgagagcattgtggaggaatacgaggatgaactcattgaattcttttcccgagaggctgacaatgttaaagacaaactttgcagtaagcgaacag

SEQ ID NO: 113975 - DNA, 621 bp, Homo sapiens
  Payload ID: 2274
  Gene Symbol: CNPY2
  Gene Name: canopy FGF signaling regulator 2
  ENST ID: ENST00000553191
  CDS Start-End: 1-124
agcatgcagggctctggtggatgaactagaatgggaaattgcccaggtggaccccaagaagaccattcagatgggatctttccggatcaatccagatggcagccagtcagtggtggagaggtagaagagagtgacccaaggctgaggacatttctaggtgccttatgcccgctcagaggcccacctcacagagctgctggaggagatatgtgaccggatgaaggagtatggggaacagattgatccttccacccatcgcaagaactacgtacgtgtagtgggccggaatggagaatccagtgaactggacctacaaggcatccgaatcgactcagatattagcggcaccctcaagtttgcgtgtgagagcattgtggaggaatacgaggatgaactcattgaattcttttcccgagaggctgacaatgttaaagacaaactttgcagtaagcgaacagatctttgtgaccatgccctgcacatatcgcatgatgagctatgaaccactggagcagcccacactggcttgatggatcacccccaggaggggaaaatggtggcaatgccttttatatattatgtttttactgaaattaactgaaaaaatatgaaaccaaaagt

SEQ ID NO: 113976 - DNA, 1704 bp, Homo sapiens
  Payload ID: 2275
  Gene Symbol: CNPY3
  Gene Name: canopy FGF signaling regulator 3
  Uniprot ID: Q9BT09
  ENST ID: ENST00000372836
  CDS Start-End: 372-1208
gcaggcttcttctcgggtcttggtcctgcatcctctctctcccagagcctccgttagggggtgggaaaggactttgccataggtcgctgaggccaccatctgctctcttactggccaagggcgtaaaaagatagtcttcccattagctagagagcaaaccccagaaagcctattggctgcgccgtccgcgggccttggtccgctttgaaggcgggctgcggctgcgagaggagggcgggcgggaggctagctgttgtcgtggttgctcggaggcacgtgtgcagtcccggaagcggcgaggggaaactgctccgcgcgcgccgcgggaggaggaaccgcccggtcctttagggtccgggcccggccgggccatggattcaatgcctgagcccgcgtcccgctgtcttctgcttcttcccttgctgctgctgctgctgctgctgctgccggccccggagctgggcccgagccaggccggagctgaggagaacgactgggttcgcctgcccagcaaatgcgaagtgtgtaaatatgttgctgtggagctgaagtcagcctttgaggaaaccggcaagaccaaggaggtgattggcacgggctatggcatcctggaccagaaggcctctggagtcaaatacaccaagtcggacttgcggttaatcgaagtcactgagaccatttgcaagaggctcctggattatagcctgcacaaggagaggaccggcagcaatcgatttgccaagggcatgtcagagacctttgagacattacacaacctggtacacaaaggggtcaaggtggtgatggacatcccctatgagctgtggaacgagacttctgcagaggtggctgacctcaagaagcagtgtgatgtgctggtggaagagtttgaggaggtgatcgaggactggtacaggaaccaccaggaggaagacctgactgaattcctctgcgccaaccacgtgctgaagggaaaagacaccagttgcctggcagagcagtggtccggcaagaagggagacacagctgccctgggagggaagaagtccaagaagaagagcagcagggccaaggcagcaggcggcaggagtagcagcagcaaacaaaggaaggagctgggtggccttgagggagaccccagccccgaggaggatgagggcatccagaaggcatcccctctcacacacagcccccctgatgagctctgagcccacccagcatcctctgtcctgagacccctgattttgaagctgaggagtcaggggcatggctctggcaggccgggatggccccgcagccttcagcccctccttgccttggctgtgccctcttctgccaaggaaagacacaagccccaggaagaactcagagccgtcatgggtagcccacgccgtcctttcccctccccaagtgtttctctcctgacccagggttcaggcaggccttgtggtttcaggactgcaaggactccagtgtgaactcaggaggggcaggtgtcagaactgggcaccaggactggagccccctccggagaccaaactcaccatccctcagtcctccccaacagggtactaggactgcagccccctgtagctcctctctgcttacccctcctgtggacaccttgcactctgcctggcccttcccagagcccaaagagtaaaaatgttctggttctgatttctgagtcctctgcagccctca

SEQ ID NO: 113977 - DNA, 954 bp, Homo sapiens
  Payload ID: 2275
  Gene Symbol: CNPY3
  Gene Name: canopy FGF signaling regulator 3
  ENST ID: ENST00000394142
  CDS Start-End: 380-811
gcccagacgcaggcttcttctcgggtcttggtcctgcatcctctctctcccagagcctccgttagggggtgggaaaggactttgccataggtcgctgaggccaccatctgctctcttactggccaagggcgtaaaaagatagtcttcccattagctagagagcaaaccccagaaagcctattggctgcgccgtccgcgggccttggtccgctttgaaggcgggctgcggctgcgagaggagggcgggcgggaggctagctgttgtcgtggttgctcggaggcacgtgtgcagtcccggaagcggcgaggggaaactgctccgcgcgcgccgcgggaggaggaaccgcccggtcctttagggtccgggcccggccgggccatggattcaatgcctgagcccgcgtcccgctgtcttctgcttcttcccttgctgctgctgctgctgctgctgctgccggccccggagctgggcccgagccaggccggagctgaggagaacgactgggttcgcctgcccagcaaatgcgaagtgtgtaaatatgttgctgtggagctgaagtcagcctttgaggaaaccggcaagaccaaggaggtgattggcacgggctatggcatcctggaccagaaggcctctggagtcaaatacaccaagtcggacttgcggttaatcgaagtcactgagaccatttgcaagaggctcctgattatagcctgcacaaggagaggaccggcagcaatcgatttgccaagggcatgtcagagacctttgagacattacacaacctggtacacaaaggggtcaaggtggtgatggacatcccctatgagctgtggaacgagacttctgcagaggtggctgacctcaagaagcagtgtgatgtgctggtggaagagtttgaggaggtgatcgaggactggtacaggaaccaccaggaggaagacctgactgaattc

SEQ ID NO: 113978 - DNA, 1502 bp, Homo sapiens
  Payload ID: 2276
  Gene Symbol: CNPY4
  Gene Name: canopy FGF signaling regulator 4
  Uniprot ID: Q8N129
  ENST ID: ENST00000262932
  CDS Start-End: 133-879
tgatcctgcgcatgcgccgaccttcctcggctggatttaaggttgccgctagccgcctgggaatttaagggacccacactaccttcccgaagttgaaggcaagcggtgattgtttgtagacggcgctttgtcatgggacctgtgcggttgggaatattgcttttcctttttttggccgtgcacgaggcttgggctgggatgttgaaggaggaggacgatgacacagaacgcttgcccagcaaatgcgaagtgtgtaagctgctgagcacagagctacaggcggaactgagtcgcaccggtcgatctcgagaggtgctggagctggggcaggtgctggatacaggcaagaggaagagacacgtgccttacagcgtttcagagacaaggctggaagaggccttagagaatttatgtgagcggatcctggactatagtgttcacgctgagcgcaagggctcactgagatatgccaagggtcagagtcagaccatggcaacactgaaaggcctagtgcagaagggggtgaaggtggatctggggatccctctggagctttgggatgagcccagcgtggaggtcacatacctcaagaagcagtgtgagaccatgttggaggagtttgaagacattgtgggagactggtacttccaccatcaggagcagcccctacaaaattttctctgtgaaggtcatgtgctcccagctgctgaaactgcatgtctacaggaaacttggactggaaaggagatcacagatggggaagagaaaacagaaggggaggaagagcaggaggaggaggaggaagaggaggaagaggaagggggagacaagatgaccaagacaggaagccaccccaaacttgaccgagaagatctttgacccttgcctttgagcccccaggaggggaagggatcatggagagccctctaaagcctgcactctccctgctccacagctttcagggtgtgtttatgagtgactccacccaagcttgtagctgttctctcccatctaacctcaggcaagatcctggtgaaacagcatgacatggcttctggggtggagggtgggggtggaggtcctgctcctagagatgaactctatccagccccttaattggcaggtgtatgtgctgacagtactgaaagctttcctctttaactgatcccacccccacccaaaagtcagcagtggcactggagctgtgggctttggggaagtcacttagctccttaaggtctgtttttagacccttccaaggaagaggccagaacggacattctctgcgatctatatacattgcctgtatccaggaggctacacaccagcaaaccgtgaaggagaatgggacactgggtcatggcctggagttgctgataatttaggtgggatagatacttggtctacttaagctcaatgtaacccagagcccaccatatagttttataggtgctcaattttctatatcgctattaaacttttttctttttttctaaaaacta

SEQ ID NO: 113979 - DNA, 721 bp, Homo sapiens
  Payload ID: 2276
  Gene Symbol: CNPY4
  Gene Name: canopy FGF signaling regulator 4
  ENST ID: ENST00000483756
  CDS Start-End: 614-721
tgtagtgccacctcaaactgcatccagagagagcctgcatttttttggctggcttggaaccccccgcccgccaatggattgtgggaattgtagttcagggaccatcggcccgggactgccaacttttagagcatcttcagtgagtgtttacctcatgtcaccagaccttaatctgcagaggctgcaggagccgggtgtgaggctcaggccttgtggacatccgctgccctaccctagcatagacgctcccaaattacaggccccacaccccgctgagggggtttgagggtgagtaattcagcctttgaagctcataaacaaaaggaagccacacaactaggagagtgtccccatccggtgagactttgcagacgtgtgtaagctgctgagcacagagctacaggcggaactgagtcgcaccggtcgatctcgagaggtgctggagctggggcaggtgctggatacaggcaagaggaagagacacgtgccttacagcgtttcagagacaaggctggaagaggccttagagaatttatgtgagcggatcctggactatagtgttcacgctgagcgcaagggctcactgagatatgccaagggtcagagtcagaccatggcaacactgaaaggcctagtgcagaagggggtgaaggtggatctggggatccctctggagctttgggatgagcccagcgtggaggtcacatacctcaagaagcag

SEQ ID NO: 113980 - DNA, 1003 bp, Homo sapiens
  Payload ID: 2276
  Gene Symbol: CNPY4
  Gene Name: canopy FGF signaling regulator 4
  ENST ID: ENST00000462193
  CDS Start-End: 1-356
tgtgtaagctgctgagcacagagctacaggcggaactgagtcgcaccggtcgatctcgagaggtgctggagctggggcaggtgctggatacaggcaagaggaagagacacgtgccttacagcgtttcagagacaaggctggaagaggccttagagaatttatgtgagcggatcctggactatagtgttcacgctgagcgcaagggctcactgagatatgccaagggtcagagtcagaccatggcaacactgaaaggcctagtgcagaagggggtgaaggtggatctggggatccctctggagctttgggatgagcccagcgtggaggtcacatacctcaagaagcagtcaggttgagcagggagagaagacaggcgggatcccaaatccctccagagcagatactcttctggcccttctacttgaccagtgtgagaccatgttggaggagtttgaagacattgtgggagactggtacttccaccatcaggagcagcccctacaaaattttctctgtgaaggtcatgtgctcccagctgctgaaactgcatgtctacaggaaacttggactggaaaggagatcacagatggggaagagaaaacagaaggggaggaagagcaggaggaggaggaggaagaggaggaagaggaagggggagacaagatgaccaagacaggaagccaccccaaacttgaccgagaagatctttgacccttgcctttgagcccccaggaggggaagggatcatggagagccctctaaagcctgcactctccctgctccacagctttcagggtgtgtttatgagtgactccacccaagcttgtagctgttctctcccatctaacctcaggcaagatcctggtgaaacagcatgacatggcttctggggtggagggtgggggtggaggtcctgctcctagagatgaactctatccagccccttaattggcaggtgtatgtgctgacagtactgaaagctttcctctttaactgatcccac

SEQ ID NO: 113981 - DNA, 4033 bp, Homo sapiens
  Payload ID: 2277
  Gene Symbol: CMTR1
  Gene Name: cap methyltransferase 1
  Uniprot ID: Q8N1G2
  ENST ID: ENST00000373451
  CDS Start-End: 165-2672
cgcagtactggacccgagcgcgacggtgcggctggcggacccgggctggcttgtggggaaacgaaactgagggaggaggcggcggctctggcagcggcggcgacagtgtcggcctgaccccccctccgctccccggcagctcgctctctcccctcagcttaacgatgaagaggagaactgacccagaatgcactgcccccatcaagaaacagaaaaaaagagttgcagagcttgccctgagcctcagctccacgtccgatgatgaacctccctcctctgtcagtcatggagcaaaagcatctactacaagccttagtgggtctgatagtgagaccgaggggaaacaacacagctctgactcttttgacgatgcattcaaagcagactctcttgtggaaggaacttcttctcgctattccatgtataatagcgtctcccagaagcttatggccaagatgggcttcagggaaggtgaaggattgggtaaatacagccagggtcggaaggacatcgttgaggcttccagtcagaaaggtcgaagaggcttgggtctgacactccggggctttgaccaggagctgaacgtggactggcgagatgagccagagcccagtgcttgtgagcaggtgtcatggtttccagaatgtaccactgaaattcctgacactcaggaaatgagcgattggatggtggtgggaaagagaaagatgattattgaagatgaaacagagttttgtggggaagagctgcttcacagtgtgttgcagtgtaagagcgtgtttgatgtcttggatggggaagagatgcggcgagctcggactcgggccaatccctatgagatgatccgaggagtcttctttctaaacagggcagcaatgaagatggctaacatggattttgtatttgatcgcatgttcacaaatccgcgggactcttatgggaagccactggtgaaggaccgggaagctgagcttctgtactttgctgatgtctgcgcaggcccaggtggcttctcagagtatgtgctgtggaggaagaagtggcatgcaaagggctttggaatgactttgaagggccctaatgacttcaagctggaggacttctactctgcttccagtgaactcttcgaaccctactatggtgagggtgggattgatggagatggagatatcacccgcccagagaacatctctgcttttcggaattttgtcctggataacacagatcgcaagggtgtccattttctgatggctgatgggggtttctcggtggaggggcaggagaacctgcaggagatcctcagcaagcagctgcttctgtgtcagttcctcatggcgctgtccattgtccggacaggaggccacttcatctgtaaaacctttgacctgttcacaccgtttagtgtggggcttgtctacctgctgtactgctgctttgaacgagtttgtctcttcaagcctattaccagccgtcctgccaactcagagaggtatgtggtgtgcaagggcctgaaggtgggcatagatgatgttcgggattacctcttcgcagtgaatattaaactcaatcagctgcggaacacggattccgacgtcaacttggtggtccccctggaggtgatcaagggagaccatgaatttactgactacatgatacggtccaatgagagccactgtagtctgcagatcaaagctctggcgaaaatccatgcctttgttcaagacacgacactgagtgagcctcgacaggcagagatacggaaggagtgcctccgactctgggggatcccagaccaggctcgtgtggctccttcttcctccgaccctaaatcgaagttctttgagctaatccagggcactgagattgacatcttcagctacaagcccacactgctcacctctaaaaccctggagaagatccgccctgtgtttgactaccgctgcatggtatctggcagtgagcagaagttcctcatcggcctggggaaatcccagatctacacatgggatggccgccagtcagaccgctggatcaagctagacctgaagacagagctgccccgggacactctgctatctgtggaaattgtgcatgagctgaaaggggaggggaaggcccagaggaagatcagtgccatccacatcctcgatgtccttgtgctgaatggcaccgacgttcgggagcagcactttaaccagcgaattcagcttgccgagaaatttgtgaaagccgtttccaagcctagtcggcccgacatgaatcccatcagggtgaaggaggtgtacagactggaagagatggagaagatttttgtcaggttggagatgaagatcatcaagggctccagtggcaccccaaagctcagctacacagggcgtgatgaccggcactttgtacccatgggcctctacatcgtcaggacagtgaatgagccctggactatgggattcagcaaaagcttcaagaagaagttcttctacaacaagaaaaccaaggactctacttttgacctccctgcagactccattgccccatttcacatttgctactatggccggctcttctgggagtggggggatggcattcgtgtgcatgactcccagaagccccaggaccaggacaagctgtccaaggaggacgtcctctccttcatccagatgcacagggcctaagagcctcagaatgtgccacccctgcagaatgccctgtcattcctgagatggggccacctggggcccacagtgctggcttcttccccctcttgaaaagggactggggagcattgcacctggcatgaggagtgggtggcctcctctccatcccctgaagagctcaggcagggccctgcagagaacactcatgttccttctgggacacctgcctgggaactttcccctgccaggactcagcctgaaggaagctgctcctgaggcaggtatgaggtcagtgcctagggcacgtgggactgatggaggacatatcagagtggcagagctgtgggctctgctgttctctcctgcatcctgtagactcacttttctgagttccatgcactgccctgagggtagccatgcccttgctttgcccaactttttattgggccatccctgagtgggtggagacctgctgtcatgagctggccaggagaacctgctataaaaaaatcaaggttttgtttctttgaacttactctgttttgatgccaaattggagaccattttcttgtctccttcccccactcatcctggccttccctggagttcttcctagcccagagctctgacagtccagcagggtgggaaggagggagtttgggcaaactctcatccctgataccacattgagatcctgggagccctcttttcgtactgagtatggagttgtagagccatcctaggtgccatccccttttggtccaaacattgggcagcgctagatggcaggaagcagccttgaagacccgtctttcccccacagcagcaggggccccagcagtaacaaagggtacctccaggggtttgggtagcgctgccctctggcagtcatgcaccgctgtctgccatagccgctctagggtcttggcagaattctgagcttgaagtgcagctcccttactaccctttcccttcctttttcttccctaataggaggtacaatctgcttttgtttgtcgttaagtggtcactcccatttcctttatcttggccgacaacacagagaggagggggagctgggcagtagcttggggtgggggtgggcacctgtggttgtttttaatgggaaatacctctcagagatgttcatgcaggctccctagggccccatcccagtgccaggctggtttccatggagatagggcactgaggctcccgtgaggttggaatcgacttcaccatgggggtccttcagccagcatccagctccccacccccaggctggcagtagcactgctgagatgctgtatttccacccaattctgggtatatcagtgtgtcttgcagaatcttggatcattaaagataaacatattttt

SEQ ID NO: 113982 - DNA, 769 bp, Homo sapiens
  Payload ID: 2277
  Gene Symbol: CMTR1
  Gene Name: cap methyltransferase 1
  ENST ID: ENST00000457419
  CDS Start-End: 1-470
aggggaaggcccagaggaagatcagtgccatccacatcctcgatgtccttgtgctgaatggcaccgacgttcgggagcagcactttaaccagcgaattcagcttgccgagaaatttgtgaaagccgtttccaagcctagtcggcccgacatgaatcccatcagggtgaaggaggtgtacagactggaagagatggagaagatttttgtcaggttggagatgaagatcatcaagggctccagtggcaccccaaagctcagctacacagggcgtgatgaccggcactttgtacccatgggcctctacatcgtcaggacagtgaatgagccctggactatgggattcagcaaaagcttcaagaagaagttcttctacaacaagaaaaccaaggactctacttttgacctccctgcagactccattgccccatttcacctccccagccttgcctgcctgtcgaagatggattaactccgcactcccctgggatcgccacatgaccacttcaagtccccaagccgcccttcgctgcacagactgcatttttttctgccataattacaagcaatggcactgactggagggcatgacagtgtgtggtggggggatggacaggtggcacaatgtctgctgctcaaccccagcagtgcccgagccctggaagtaactcccactatttggcttggaaagtgcttcccactgtctccttcccactcgagctgggggccttctcctctattctgaattgtaatccagagctttcccttgaa

SEQ ID NO: 113983 - DNA, 1280 bp, Homo sapiens
  Payload ID: 2277
  Gene Symbol: CMTR1
  Gene Name: cap methyltransferase 1
  ENST ID: ENST00000455891
  CDS Start-End: 165-1280
cgcagtactggacccgagcgcgacggtgcggctggcggacccgggctggcttgtggggaaacgaaactgagggaggaggcggcggctctggcagcggcggcgacagtgtcggcctgaccccccctccgctccccggcagctcgctctctcccctcagcttaacgatgaagaggagaactgacccagaatgcactgcccccatcaagaaacagaaaaaaagagttgcagagcttgccctgagcctcagctccacgtccgatgatgaacctccctcctctgtcagtcatggagcaaaagcatctactacaagccttagtgggtctgatagtgagaccgaggggaaacaacacagctctgactcttttgacgatgcattcaaagcagactctcttgtggaaggaacttcttctcgctattccatgtataatagcgtctcccagaagcttatggccaagatgggcttcagggaaggtgaaggattgggtaaatacagccagggtcggaaggacatcgttgaggcttccagtcagaaaggtcgaagaggcttgggtctgacactccggggctttgaccaggagctgaacgtggactggcgagatgagccagagcccagtgcttgtgagcaggtgtcatggtttccagaatgtaccactgaaattcctgacactcaggaaatgagcgattggatggtggtgggaaagagaaagatgattattgaagatgaaacagagttttgtggggaagagctgcttcacagtgtgttgcagtgtaagaagccactggtgaaggaccgggaagctgagcttctgtactttgctgatgtctgcgcaggcccaggtggcttctcagagtatgtgctgtggaggaagaagtggcatgcaaagggctttggaatgactttgaagggccctaatgacttcaagctggaggacttctactctgcttccagtgaactcttcgaaccctactatggtgagggtgggattgatggagatggagatatcacccgcccagagaacatctctgcttttcggaattttgtcctggataacacagatcgcaagggtgtccattttctgatggctgatgggggtttctcggtggaggggcaggagaacctgcaggagatcctcagcaagcagctgcttctgtgtcagttcctcatggcgctgtccattgtccggacaggaggccacttcatctgtaaaacctttgacctgttcacaccgtttagtgtggggcttgtctacctgctgtactgctgctttgaacgagtttgt

SEQ ID NO: 113984 - DNA, 1032 bp, Homo sapiens
  Payload ID: 2277
  Gene Symbol: CMTR1
  Gene Name: cap methyltransferase 1
  ENST ID: ENST00000475364
  CDS Start-End: 1-340
tggcagtgagcagaagttcctcatcggcctggggaaatcccagatctacacatgggatggccgccagtcagaccgctggatcaagctagacctgaagacagagctgccccgggacactctgctatctgtggaaattgtgcatgagctgaaaggggaggggaaggcccagaggaagatcagtgccatccacatcctcgatgtccttgtgctgaatggcaccgacgttcgggagcagcactttaaccagcggtctgacctgggccccagggtagggagggtgggggtaggccagggcagcttgggaggacagcggcctcccgaggtgtggccccttatctaggccttctctgcttgttgacatcctgagagtttccccctcccacccactgactggtcccaaagtcagggtgagaattggagttgccacttcagagtttgctagggcttgggccctggttatcagagataccagcacactccattttgccacagctgctcaggttgaggtatttatgttaaggttgagcaagagggtgaccttgcgggtagagggggtactccttggaagaaatatcctgtgcttgagtggtcccatttaagttgctcatctgagtgggtgcactgtagtttccatgctttggggtgacagggcagacacatacaataaagatgatacttgaagttctagtggaggtgactgagcacagctgaaggcacacttcaggaaaaccaaccgacatagtgaaattagagaattcagcttgccgagaaatttgtgaaagccgtttccaagcctagtcggcccgacatgaatcccatcagggtgaaggaggtgtacagactggaagagatggagaagatttttgtcaggttggagatgaagatcatcaagggctccagtggcaccccaaagctcagctacacagggcgtgatgaccggcactttgtacccatgggcctctacatcgtcaggacagtgaatgagccctggactatgggattcagcaaaagcttcaagaagaagttcttcta

SEQ ID NO: 113985 - DNA, 4869 bp, Homo sapiens
  Payload ID: 2278
  Gene Symbol: CMTR2
  Gene Name: cap methyltransferase 2
  Uniprot ID: Q8IYT2
  ENST ID: ENST00000338099
  CDS Start-End: 338-2650
ggacggagccaaagaatgctccgcctgcgcgcgccgcttccgttgccatagtggccgggggcgggaggctggcgcctcccagcttctgtactccgcgaagcaaaacctagggagctgaggcctaggcgaggcgagagtcgccggcgtgcgtaacgttggcgcacgtgactccggcccggcctacagggcgcgtgcgcagtgggacttgagtgcctcctggtccctgtctgccggcattcgcggctgcggggcccggagttgctggtaggaggagttggcggaagcacttggaactcctttataagtgtcagctgtgagattttaatttgatttgaaaatgagtaagtgcagaaagacaccagttcagcagctagcaagtcccgcgtcattcagcccagatattcttgctgacatttttgaactctttgccaagaacttttcttatggcaagccacttaataatgagtggcagttaccagatcccagtgagattttcacctgtgaccacactgaacttaatgcatttcttgatttgaagaactccctaaatgaagtaaaaaacctactgagtgataagaaactggatgagtggcatgagcacactgctttcactaataaagcggggaaaatcatttctcatgttagaaaatctgtgaatgctgaactttgtactcaagcatggtgtaagttccatgagattttgtgcagctttccacttattccacaggaagcttttcagaatggaaaactgaattctctacacctttgtgaagctccaggagcttttatagctagtctcaaccactacttaaaatcccatcggtttccttgtcattggagttgggtagcgaatactctgaatccataccatgaagcaaatgacgacctcatgatgattatggatgaccggcttattgcaaataccttgcactggtggtactttggtccagataacactggtgatatcatgaccctgaaattcttgactggacttcagaatttcataagcagcatggctactgttcacttggtcactgcagatgggagttttgattgccaaggaaacccaggtgaacaagaagctttagtttcttctttgcattactgtgaagttgtcactgctctgaccactcttggaaacggtggctcttttgttctaaagatgtttactatgtttgaacattgttccataaacttgatgtacctgctaaactgttgttttgaccaagtccatgttttcaaacctgctactagcaaggcaggaaactccgaagtctatgtggtttgcctccactataaggggagagaggccatccatcctctgttatctaagatgaccttgaattttgggactgaaatgaaaaggaaagccctttttccccatcatgtgattcctgattcttttcttaagagacatgaagaatgttgtgtgttctttcataaatatcagctagagactatttctgaaaacattcgtctatttgagtgcatgggaaaggcggaacaagaaaagctgaataatttaagggattgtgctatacaatattttatgcaaaaatttcaactgaaacatctttccagaaataattggctagtaaaaaaatctagtattggttgtagtacaaatacaaaatggtttgggcagaggaacaaatattttaaaacttataatgaaaggaagatgctagaagccctttcatggaaagataaagtagccaaaggatactttaatagttgggctgaagaacatggtgtatatcatcctgggcagagttctattttagaaggaacagcttccaatcttgagtgtcacttatggcatattttggagggaaagaaactgccaaaggtaaaatgttctcctttttgcaatggtgaaattttaaaaactcttaatgaagcaattgaaaagtcattaggaggagcttttaatttggattccaagtttaggccaaaacagcagtattcttgttcttgtcatgttttttctgaagaactgatattttccgagttgtgtagccttactgagtgccttcaggatgagcaggttgtagtacccagcaatcaaataaagtgcctgctggtgggcttttcgactctccgtaatatcaaaatgcatataccgttggaagttcgactcctagaatcagctgaactcacaacttttagctgttcattgcttcatgatggagatccaacttaccagcgtttatttttggactgccttctacattcattgcgggagcttcatacaggagatgttatgattttgcctgtactttcttgcttcacaagatttatggctggtttgatctttgtactccacagttgttttagattcatcacttttgtttgtcccacatcctctgatcccctgaggacctgcgcagtcctgctatgtgttggttatcaggaccttccaaatccagttttccgatatttgcagagtgtgaatgaattgttgagcactttgctcaactctgactcaccccagcaggttttacagtttgtgccaatggaggtactccttaagggggccctgcttgattttttgtgggatttgaatgctgccattgctaaaaggcatttgcatttcattattcaaagagagagagaagaaattatcaacagccttcagttacaaaactgaacatatgctttctgagattcaactttatgatttcttataatttgcccagtatttgcatcctgttgctctattaatttaaaaaccttttattttggggaaaggccaacatttgcatcattcaaagtctcattaattctggaaaaccatccattctgatctctagggtatatacacccacaggcatagagctcttccacgtggtggaatctatgcaatgatagatattcacactctaaatatgaggtgtgtgtatgtgtatgggtggccacagccatgcttacctatgccatttagttggtcttacttaatctgcttaagatttgcatctgtgtacctttgttcagattagttttttttttccagccgatttcctcttagtggctaatgctgttagtgaattttccaactaatttcctctcattggttaatgttgttaatgaattgagagaggtaattgaggaaaggaaatgagtaaatcactgttcagcaacactgatttccgttaacacatcagttatgaatttcagggaattcatctcgccagattcttgataacatgccattcattgcccttaggtgattgaccctattttcttacatggctcaaataaaactagtatgctgttgtatgaatcttttactgaccacaccatccaactataaaaatataacgggacagctttaaaccaaagatcatgtttagaacaatgaaaaattatttgttgtatctaatacacgcctgtattgtgaaaagcttcatttagcaatgatgtaataatttttaacttccaggaaataatctgtgaatggaaagattttttaagattttgagatagtgtttagtctcatgttgggaacacatgaatgtgatgaacatagtgaatactaaagaaaacgcttcagactttcagaatgatggttcagaatttaaaatttttaatcttttctaatttctttttttcagtgtgaaaatagcactttaccaaaagattagccatgaaatggttattttgccagttacatttgatttcttttgtatctgcaatgtaatgagttattttatttcttctgtatttgcagtgtaatgagtttttgtggcaaagtgtattaagcaatttttcattatcttgaagttccacaaagtggagaatatttatattctcacatgcattttaggcacttttgatatgtgaaaatagatgtattttctgatgcatttggttaataaatattaatctgaacattttcatgttctttgctattttgaattccattatagattcatgaataaagtcattactagagagattttgtgttcatcttttttaaatggaattatgggagaagttaaaaatataagttggaaacagacatttttaaagggagttttgaatgatagttaatgttctttcattttctctgatttgcattcattaaaatttagtccttaatattgtaatacttatggaaggcctacttcaggaaagaaattgaatacttaagggggattggaagaggagtgtgtggaggcctggaagtagatttttgaaagaaatctgatttcctactggtgactctatggaagcaattccagttgtatgacgatggaagtctgacagaaggttgattaccaggaggaaaaaaaaaaacactcttggaaaaccattttgcacttaatagtctttatgccttgctaagtgggattcaatatactaataatgcagcttattttttacttattttaactatttgataagaatgaagttgaaggcatgggtccagattctagcattattactgtctttaagcccttcaaataagtattgaatgcttagtgttttgttgacactaatctgtactggaatatataacactgaagtattctcaaatgtattttgctttttaacgtgggttttggaatcaattgctcatctgattcattggattcaaattgctttagaggttagacatgacttgaggaaggttcagattgaactggatatattaatagatgacaggtactaatgatttatatgagtttctctttaagagaaaggagaggaaaaatgctattcaaaagatgaatggaaaagtagaagaagacaggaagaggtgagagtatgcatgttttaccaaggtagactgttcttaaaaacttttttccacaggttttgagatttttaatttgtaatatctattaaaaaacaaacatcaaattg

SEQ ID NO: 113986 - DNA, 4104 bp, Homo sapiens
  Payload ID: 2278
  Gene Symbol: CMTR2
  Gene Name: cap methyltransferase 2
  Uniprot ID: Q8IYT2
  ENST ID: ENST00000434935
  CDS Start-End: 484-2796
ggcgcctcccagcttctgtactccgcgaagcaaaacctagggagctgaggcctaggcgaggcgagagtcgccggcgtgcgtaacgttggcgcacgtgactccggcccggcctacagggcgcgtgcgcagtgggacttgagtgcctcctggtccctgtctgccggcattcgcggctgcggggcccggaggtgggactggcttcccggtgccgcgagggcgggtccggacagccttccccccagtccggcgcaccatctccctgccttgtggctggaggcgccgcggacccaaagggagggaccatcccgggaagcagccccgagagcggaagtgcagaatggcttcctcgagagagtaaagtgcagcctctccagacactggggccccagtgggcgtgggcgaagttgctggtaggaggagttggcggaagcacttggaactcctttataagtgtcagctgtgagattttaatttgatttgaaaatgagtaagtgcagaaagacaccagttcagcagctagcaagtcccgcgtcattcagcccagatattcttgctgacatttttgaactctttgccaagaacttttcttatggcaagccacttaataatgagtggcagttaccagatcccagtgagattttcacctgtgaccacactgaacttaatgcatttcttgatttgaagaactccctaaatgaagtaaaaaacctactgagtgataagaaactggatgagtggcatgagcacactgctttcactaataaagcggggaaaatcatttctcatgttagaaaatctgtgaatgctgaactttgtactcaagcatggtgtaagttccatgagattttgtgcagctttccacttattccacaggaagcttttcagaatggaaaactgaattctctacacctttgtgaagctccaggagcttttatagctagtctcaaccactacttaaaatcccatcggtttccttgtcattggagttgggtagcgaatactctgaatccataccatgaagcaaatgacgacctcatgatgattatggatgaccggcttattgcaaataccttgcactggtggtactttggtccagataacactggtgatatcatgaccctgaaattcttgactggacttcagaatttcataagcagcatggctactgttcacttggtcactgcagatgggagttttgattgccaaggaaacccaggtgaacaagaagctttagtttcttctttgcattactgtgaagttgtcactgctctgaccactcttggaaacggtggctcttttgttctaaagatgtttactatgtttgaacattgttccataaacttgatgtacctgctaaactgttgttttgaccaagtccatgttttcaaacctgctactagcaaggcaggaaactccgaagtctatgtggtttgcctccactataaggggagagaggccatccatcctctgttatctaagatgaccttgaattttgggactgaaatgaaaaggaaagccctttttccccatcatgtgattcctgattcttttcttaagagacatgaagaatgttgtgtgttctttcataaatatcagctagagactatttctgaaaacattcgtctatttgagtgcatgggaaaggcggaacaagaaaagctgaataatttaagggattgtgctatacaatattttatgcaaaaatttcaactgaaacatctttccagaaataattggctagtaaaaaaatctagtattggttgtagtacaaatacaaaatggtttgggcagaggaacaaatattttaaaacttataatgaaaggaagatgctagaagccctttcatggaaagataaagtagccaaaggatactttaatagttgggctgaagaacatggtgtatatcatcctgggcagagttctattttagaaggaacagcttccaatcttgagtgtcacttatggcatattttggagggaaagaaactgccaaaggtaaaatgttctcctttttgcaatggtgaaattttaaaaactcttaatgaagcaattgaaaagtcattaggaggagcttttaatttggattccaagtttaggccaaaacagcagtattcttgttcttgtcatgttttttctgaagaactgatattttccgagttgtgtagccttactgagtgccttcaggatgagcaggttgtagtacccagcaatcaaataaagtgcctgctggtgggcttttcgactctccgtaatatcaaaatgcatataccgttggaagttcgactcctagaatcagctgaactcacaacttttagctgttcattgcttcatgatggagatccaacttaccagcgtttatttttggactgccttctacattcattgcgggagcttcatacaggagatgttatgattttgcctgtactttcttgcttcacaagatttatggctggtttgatctttgtactccacagttgttttagattcatcacttttgtttgtcccacatcctctgatcccctgaggacctgcgcagtcctgctatgtgttggttatcaggaccttccaaatccagttttccgatatttgcagagtgtgaatgaattgttgagcactttgctcaactctgactcaccccagcaggttttacagtttgtgccaatggaggtactccttaagggggccctgcttgattttttgtgggatttgaatgctgccattgctaaaaggcatttgcatttcattattcaaagagagagagaagaaattatcaacagccttcagttacaaaactgaacatatgctttctgagattcaactttatgatttcttataatttgcccagtatttgcatcctgttgctctattaatttaaaaaccttttattttggggaaaggccaacatttgcatcattcaaagtctcattaattctggaaaaccatccattctgatctctagggtatatacacccacaggcatagagctcttccacgtggtggaatctatgcaatgatagatattcacactctaaatatgaggtgtgtgtatgtgtatgggtggccacagccatgcttacctatgccatttagttggtcttacttaatctgcttaagatttgcatctgtgtacctttgttcagattagttttttttttccagccgatttcctcttagtggctaatgctgttagtgaattttccaactaatttcctctcattggttaatgttgttaatgaattgagagaggtaattgaggaaaggaaatgagtaaatcactgttcagcaacactgatttccgttaacacatcagttatgaatttcagggaattcatctcgccagattcttgataacatgccattcattgcccttaggtgattgaccctattttcttacatggctcaaataaaactagtatgctgttgtatgaatcttttactgaccacaccatccaactataaaaatataacgggacagctttaaaccaaagatcatgtttagaacaatgaaaaattatttgttgtatctaatacacgcctgtattgtgaaaagcttcatttagcaatgatgtaataatttttaacttccaggaaataatctgtgaatggaaagattttttaagattttgagatagtgtttagtctcatgttgggaacacatgaatgtgatgaacatagtgaatactaaagaaaacgcttcagactttcagaatgatggttcagaatttaaaatttttaatcttttctaatttctttttttcagtgtgaaaatagcactttaccaaaagattagccatgaaatggttattttgccagttacatttgatttcttttgtatctgcaatgtaatgagttattttatttcttctgtatttgcagtgtaatgagtttttgtggcaaagtgtattaagcaatttttcattatcttgaagttccacaaagtggagaatatttatattctcacatgcattttaggcacttttgatatgtgaaaatagatgtattttctgatgcatttggttaataaatattaatctgaacattttcatgttctttgctattttgaattccattatagattcatgaataaagtcattactagagaga

SEQ ID NO: 113987 - DNA, 476 bp, Homo sapiens
  Payload ID: 2278
  Gene Symbol: CMTR2
  Gene Name: cap methyltransferase 2
  ENST ID: ENST00000567610
  CDS Start-End: 161-476
gaaaatttttccacacacgctgtaagccacatgcttttttttttttttttaagtcatgcatttaagtgctggagtgaagttgaggtgcactattaatgactcatattcagaacctgaagagagagatcccttttgtgctaaattttaatttgatttgaaaatgagtaagtgcagaaagacaccagttcagcagctagcaagtcccgcgtcattcagcccagatattcttgctgacatttttgaactctttgccaagaacttttcttatggcaagccacttaataatgagtggcagttaccagatcccagtgagattttcacctgtgaccacactgaacttaatgcatttcttgatttgaagaactccctaaatgaagtaaaaaacctactgagtgataagaaactggatgagtggcatgagcacactgctttcactaataaagcggggaaaatcatttctcatgttagaaaatctg

SEQ ID NO: 113988 - DNA, 565 bp, Homo sapiens
  Payload ID: 2278
  Gene Symbol: CMTR2
  Gene Name: cap methyltransferase 2
  ENST ID: ENST00000564183
  CDS Start-End: 90-565
acaaagctcaaaggactgtttaatgaaaggctcagaggatcatatactggaaaatttttccacacacgctattttaatttgatttgaaaatgagtaagtgcagaaagacaccagttcagcagctagcaagtcccgcgtcattcagcccagatattcttgctgacatttttgaactctttgccaagaacttttcttatggcaagccacttaataatgagtggcagttaccagatcccagtgagattttcacctgtgaccacactgaacttaatgcatttcttgatttgaagaactccctaaatgaagtaaaaaacctactgagtgataagaaactggatgagtggcatgagcacactgctttcactaataaagcggggaaaatcatttctcatgttagaaaatctgtgaatgctgaactttgtactcaagcatggtgtaagttccatgagattttgtgcagctttccacttattccacaggaagcttttcagaatggaaaactgaattctctacacctttgtgaagctccaggagcttttatagctagtctcaaccactacttaaa

SEQ ID NO: 113989 - DNA, 695 bp, Homo sapiens
  Payload ID: 2278
  Gene Symbol: CMTR2
  Gene Name: cap methyltransferase 2
  ENST ID: ENST00000565850
  CDS Start-End: 299-695
gcagtgggacttgagtgcctcctggtccctgtctgccggcattcgcggctgcggggcccggaggtgggactggcttcccggtgccgcgagggcgggtccggacagccttccccccagtccggcgcaccatctccctgccttgtggctggaggcgccgcggacccaaagggagggaccatcccgggaagcagccccgagagcggaagtgcagaatggcttcctcgagagagtaaagtgcagcctctccagacactggggccccagtgggcgtgggcgaagattttaatttgatttgaaaatgagtaagtgcagaaagacaccagttcagcagctagcaagtcccgcgtcattcagcccagatattcttgctgacatttttgaactctttgccaagaacttttcttatggcaagccacttaataatgagtggcagttaccagatcccagtgagattttcacctgtgaccacactgaacttaatgcatttcttgatttgaagaactccctaaatgaagtaaaaaacctactgagtgataagaaactggatgagtggcatgagcacactgctttcactaataaagcggggaaaatcatttctcatgttagaaaatctgtgaatgctgaactttgtactcaagcatggtgtaagttccatgagattttgtgcagctttccacttattccacaggaagctt

SEQ ID NO: 113990 - DNA, 587 bp, Homo sapiens
  Payload ID: 2278
  Gene Symbol: CMTR2
  Gene Name: cap methyltransferase 2
  ENST ID: ENST00000563876
  CDS Start-End: 109-587
gagcggaaccagcacgtcctgacagacagttgctggtaggaggagttggcggaagcacttggaactcctttataagtgtcagctgtgagattttaatttgatttgaaaatgagtaagtgcagaaagacaccagttcagcagctagcaagtcccgcgtcattcagcccagatattcttgctgacatttttgaactctttgccaagaacttttcttatggcaagccacttaataatgagtggcagttaccagatcccagtgagattttcacctgtgaccacactgaacttaatgcatttcttgatttgaagaactccctaaatgaagtaaaaaacctactgagtgataagaaactggatgagtggcatgagcacactgctttcactaataaagcggggaaaatcatttctcatgttagaaaatctgtgaatgctgaactttgtactcaagcatggtgtaagttccatgagattttgtgcagctttccacttattccacaggaagcttttcagaatggaaaactgaattctctacacctttgtgaagctccaggagcttttatagctagtctcaaccactacttaaaatc

SEQ ID NO: 113991 - DNA, 632 bp, Homo sapiens
  Payload ID: 2278
  Gene Symbol: CMTR2
  Gene Name: cap methyltransferase 2
  ENST ID: ENST00000568910
  CDS Start-End: 362-632
acagggcgcgtgcgcagtgggacttgagtgcctcctggtccctgtctgccggcattcgcggctgcggggcccggaggtgggactggcttcccggtgccgcgagggcgggtccggacagccttccccccagtccggcgcaccatctccctgccttgtggctggaggcgccgcggacccaaagggagggaccatcccgggaagcagccccgagagcggaagtgcagaatggcttcctcgagagagtaaagtgcagcctctccagacactggggccccagtgggcgtgggcgaaggtaatccaggcctgggtacgattccgggccctccttcgacttcccagcggattttaatttgatttgaaaatgagtaagtgcagaaagacaccagttcagcagctagcaagtcccgcgtcattcagcccagatattcttgctgacatttttgaactctttgccaagaacttttcttatggcaagccacttaataatgagtggcagttaccagatcccagtgagattttcacctgtgaccacactgaacttaatgcatttcttgatttgaagaactccctaaatgaagtaaaaaacctactgagtgataagaaactggatgagtggcatgagcacactgctt

SEQ ID NO: 113992 - DNA, 1475 bp, Homo sapiens
  Payload ID: 2278
  Gene Symbol: CMTR2
  Gene Name: cap methyltransferase 2
  ENST ID: ENST00000614452
  CDS Start-End: 446-1468
agggagctgaggcctaggcgaggcgagagtcgccggcgtgcgtaacgttggcgcacgtgactccggcccggcctacagggcgcgtgcgcagtgggacttgagtgcctcctggtccctgtctgccggcattcgcggctgcggggcccggaggtgggactggcttcccggtgccgcgagggcgggtccggacagccttccccccagtccggcgcaccatctccctgccttgtggctggaggcgccgcggacccaaagggagggaccatcccgggaagcagccccgagagcggaagtgcagaatggcttcctcgagagagtaaagtgcagcctctccagacactggggccccagtgggcgtgggcgaagttgctggtaggaggagttggcggaagcacttggaactcctttataagtgtcagctgtgagattttaatttgatttgaaaatgagtaagtgcagaaagacaccagttcagcagctagcaagtcccgcgtcattcagcccagatattcttgctgacatttttgaactctttgccaagaacttttcttatggcaagccacttaataatgagtggcagttaccagatcccagtgagattttcacctgtgaccacactgaacttaatgcatttcttgatttgaagaactccctaaatgaagtaaaaaacctactgagtgataagaaactggatgagtggcatgagcacactgctttcactaataaagcggggaaaatcatttctcatgttagaaaatctgtgaatgctgaactttgtactcaagcatggtgtaagttccatgagattttgtgcagctttccacttattccacaggaagcttttcagaatggaaaactgaattctctacacctttgtgaagctccaggagcttttatagctagtctcaaccactacttaaaatcccatcggtttccttgtcattggagttgggtagcgaatactctgaatccataccatgaagcaaatgacgacctcatgatgattatggatgaccggcttattgcaaataccttgcactggtggtactttggtccagataacactggtgatatcatgaccctgaaattcttgactggacttcagaatttcataagcagcatggctactgttcacttggtcactgcagatgggagttttgattgccaaggaaacccaggtgaacaagaagctttagtttcttctttgcattactgtgaagttgtcactgctctgaccactcttggaaacggtggctcttttgttctaaagatgtttactatgtttgaacattgttccataaacttgatgtacctgctaaactgttgttttgaccaagtccatgttttcaaacctgctactagcaaggcaggaaactccgaagtctatgtggtttgcctccactataaggggagagaggccatccatcctctgttatctaagatgaccttgaatttgggactgaaatgaaaaggaa

SEQ ID NO: 113993 - DNA, 4168 bp, Homo sapiens
  Payload ID: 2278
  Gene Symbol: CMTR2
  Gene Name: Cap methyltransferase 2
  ENST ID: ENST00000634752
  CDS Start-End: 551-2863
cggagccaaagaatgctccgcctgcgcgcgccgcttccgttgccgtagtggccgggggcgggaggctggcgcctcccagcttctgtactccgcgaagcaaaacctagggagctgaggcctaggcgaggcgagagtcgccggcgtgcgtaacgttggcgcacgtgactccggcccggcctacagggcgcgtgcgcagtgggacttgagtgcctcctggtccctgtctgccggcattcgcggctgcggggcccggaggtgggactggcttcccggtgccgcgagggcgggtccggacagccttccccccagtccggcgcaccatctccctgccttgtggctggaggcgccgcggacccaaagggagggaccatcccgggaagcagccccgagagcggaagtgcagaatggcttcctcgagagagtaaagtgcagcctctccagacactggggccccagtgggcgtgggcgaagttgctggtaggaggagttggcggaagcacttggaactcctttataagtgtcagctgtgagattttaatttgatttgaaaatgagtaagtgcagaaagacaccagttcagcagctagcaagtcccgcgtcattcagcccagatattcttgctgacatttttgaactctttgccaagaacttttcttatggcaagccacttaataatgagtggcagttaccagatcccagtgagattttcacctgtgaccacactgaatttaatgcatttcttgatttgaagaactccctaaatgaagtaaaaaacctactgagtgataagaaactggatgagtggcatgagcacactgctttcactaataaagcggggaaaatcatttctcatgttagaaaatctgtgaatgctgaactttgtactcaagcatggtgtaagttccatgagattttgtgcagctttccacttattccacaggaagcttttcagaatggaaaactgaattctctacacctttgtgaagctccaggagcttttatagctagtctcaaccactacttaaaatcccatcggtttccttgtcattggagttgggtagcgaatactctgaatccataccatgaagcaaatgacgacctcatgatgattatggatgaccggcttattgcaaataccttgcactggtggtactttggtccagataacactggtgatatcatgaccctgaaattcttgactggacttcagaatttcataagcagcatggctactgttcacttggtcactgcagatgggagttttgattgccaaggaaacccaggtgaacaagaagctttagtttcttctttgcattactgtgaagttgtcactgctctgaccactcttggaaacggtggctcttttgttctaaagatgtttactatgtttgaacattgttccataaacttgatgtacctgctaaactgttgttttgaccaagtccatgttttcaaacctgctactagcaaggcaggaaactccgaagtctatgtggtttgcctccactataaggggagagaggccatccatcctctgttatctaagatgaccttgaattttgggactgaaatgaaaaggaaagccctttttccccatcatgtgattcctgattcttttcttaagagacatgaagaatgttgtgtgttctttcataaatatcagctagagactatttctgaaaacattcgtctatttgagtgcatgggaaaggcggaacaagaaaagctgaataatttaagggattgtgctatacaatattttatgcaaaaatttcaactgaaacatctttccagaaataattggctagtaaaaaaatctagtattggttgtagtacaaatacaaaatggtttgggcagaggaacaaatattttaaaacttataatgaaaggaagatgctagaagccctttcatggaaagataaagtagccaaaggatactttaatagttgggctgaagaacatggtgtatatcatcctgggcagagttctattttagaaggaacagcttccaatcttgagtgtcacttatggcatattttggagggaaagaaactgccaaaggtaaaatgttctcctttttgcaatggtgaaattttaaaaactcttaatgaagcaattgaaaagtcattaggaggagcttttaatttggattccaagtttaggccaaaacagcagtattcttgttcttgtcatgttttttctgaagaactgatattttccgagttgtgtagccttactgagtgccttcaggatgagcaggttgtagtacccagcaatcaaataaagtgcctgctggtgggcttttcgactctccgtaatatcaaaatgcatataccgttggaagttcgactcctagaatcagctgaactcaaaacttttagctgttcattgcttcatgatggagatccaacttaccagcgtttatttttggactgccttctacattcattgcgggagcttcatacaggagatgttatgattttgcctgtactttcttgcttcacaagatttatggctggtttgatctttgtactccacagttgttttagattcatcacttttgtttgtcccacatcctctgatcccctgaggacctgcgcagtcctgctatgtgttggttatcaggaccttccaaatccagttttccgatatttgcagagtgtgaatgaattgttgagcactttgctcaactctgactcaccccagcaggttttacagtttgtgccaatggaggtactccttaagggggccctgcttgattttttgtgggatttgaatgctgccattgctaaaaggcatttgcatttcattattcaaagagagagagaagaaattatcaacagccttcagttacaaaactgaacatatgctttctgagattcaactttatgatttcttataatttgcccagtatttgcatcctgttgctctattaatttaaaaaccttttattttggggaaaggccaacatttgcatcattcaaagtctcattaattctggaaaaccatccattctgatctctagggtatatacacccacaggcatagagctcttccacgtggtggaatctatgcaatgatagatattcacactctaaatatgaggtgtgtgtatgtgtatgggtggccacagccatgcttacctatgccatttagttggtcttacttaatctgcttaagatttgcatctgtgtacctttgttcagattagttttttttttccagccgatttcctcttagtggctaatgctgttagtgaattttccaactaatttcctctcattggttaatgttgttaatgaattgagagaggtaattgaggaaaggaaatgagtaaatcactgttcagcaacactgatttccgttaacacatcagttatgaatttcagggaattcatctcgccagattcttgataacatgccattcattgcccttaggtgattgaccctattttcttacatggctcaaataaaactagtatgctgttgtatgaatcttttactgaccacaccatccaactataaaaatataacgggacagctttaaaccaaagatcatgtttagaacaatgaaaaattatttgttgtatctaatacacgcctgtattgtgaaaagcttcatttagcaatgatgtaataatttttaacttccaggaaataatctgtgaatggaaagattttttaagattttgagatagtgtttagtctcatgttgggaacacatgaatgtgatgaacatagtgaatactaaagaaaacgcttcagactttcagaatgatggttcagaatttaaaatttttaatcttttctaatttctttttttcagtgtgaaaatagcactttaccaaaagattagccatgaaatggttattttgccagttacatttgatttcttttgtatctgcaatgtaatgagttattttatttcttctgtatttgcagtgtaatgagtttttgtggcaaagtgtattaagcaatttttcattatcttgaagttccacaaagtggagaatatttatattctcacatgcattttaggcacttttgatatgtgaaaatagatgtattttctgatgcatttggttaataaatattaatctgaacattttcatgttctttgctattttgaattccattatagattcatgaataaagtcattactagag

SEQ ID NO: 113994 - DNA, 2592 bp, Homo sapiens
  Payload ID: 2279
  Gene Symbol: CAP1
  Gene Name: CAP, adenylate cyclase-associated protein 1 (yeast)
  Uniprot ID: Q01518
  ENST ID: ENST00000340450
  CDS Start-End: 60-1484
gaagcggagagcggctgatcgcagtccggaggtgaggcggaactctgaggtggtccattatggctgacatgcaaaatctggtagaaagattggagagggcagtgggccgcctggaggcagtatctcatacctctgacatgcaccgtgggtatgcagacagtccttcaaaaggagcagctccatatgtgcaggcatttgactcgctgcttgctggtcctgtggcagagtacttgaagatcagtaaagagattgggggagacgtgcagaaacatgcggagatggtccacacaggtttgaagttggagcgagctctgttggttacagcttctcagtgtcaacagccagcagaaaataagctttccgatttgttggcacccatctcagagcagatcaaagaagtgataacctttcgggagaagaaccgaggcagcaagttgtttaatcacctgtcagctgtcagcgaaagtatccaggccctgggctgggtggctatggctcccaagcctggcccttatgtgaaagaaatgaatgatgccgccatgttttatacaaaccgagtcctcaaagagtacaaagatgtggataagaagcatgtagactgggtcaaagcttatttaagtatatggacagagctgcaggcttacattaaggagttccataccaccggactggcctggagcaaaacggggcctgtggcaaaagaactgagcggactgccatctggaccctctgccggatcatgtcctcctccccctccaccatgcccccctcctcccccagtctctaccatttcatgctcatatgagtctgcttcccgctcatcactgttcgcgcagattaatcagggggagagcattacacatgccctgaaacatgtatctgatgacatgaagactcacaagaaccctgccctgaaggctcagagtggtccagtacgcagtggccccaaaccattctctgcacctaaaccccaaaccagcccatcccccaaacgagccacaaagaaggagccagctgtacttgaactggagggcaagaagtggagagtggaaaatcaggaaaatgtttccaacctggtgattgaggacacagagctgaaacaggtggcttacatatacaagtgtgtcaacacgacattgcaaatcaagggcaaaattaactccattacagtagataactgtaagaaacttggcctggtattcgatgacgtggtgggcattgtggagataatcaacagtaaggatgtcaaagttcaggtaatgggtaaagtgccaaccatatccatcaacaaaacagatggctgccatgcttacctgagcaagaattccctggattgtgaaatagtcagtgccaaatcttccgagatgaatgtcctcattcctacagaaggcggtgactttaatgaattcccagttcctgagcagttcaagaccctatggaacgggcagaagttggtcaccacagtgacagaaattgctggataagcgaagtgccactgggttctttgccctcccttcacaccatgggataaatctgtatcaagacggttcttttctagatttcctctacctttttgctcttaaaactgcttctctgctctgagaagcacagctacctgccttcactgaaatatacctcaggctgaaatttggggtgggatagcaggtcagttgatcttctgcaggaaggtgcagcttttccatatcagctcaaccacgccgccagtccattcttaaggaactgccgactaggactgatgatgcattttagctttgagcttttgggggttattctaccaacaaacagtccattggaaagaaaacagtccctggaattaacagatcagaatgttcacactggttaatctttttttaacaatgagcatgaaggtagcagaagctggtgtgtttccagatggttcttctaaccaaactaatttttcactgttgacaagcgaggcaagggttgcactggaccaaaggctgaggcttggccatctagcattccatacaaaattgtttcctataagcattccttttattctctattctatcctgggtctgcctcaaccgtgagataggagagtctctggtactagctgctgtagcagtgcccttcatccagggcagttaatggagtcttggaccctttctttctctgggatccctgcccagcaccttcctatagagatgactttaaaaggaaaaaaaaaaaaaaaaaaacccacatgatttcaaggagtctggcattcctgaatccttcttccctgccaggtgcctgtcacctgtcttcactgcctccttttccctgtcatgctcatcagcttatggcttctgtctaagcacctgaacagaggactgaaacctccactgcaggctggttttaggtcttgaattatgtaagaatcttgcacagcactgctaatgtaaatttcagttgtttttccctctaggacaaacacttaccaaaatatgcaacttttttttggtgggaagagagattgtcctgtgatttctacccatttcctgaggcctgtggaaataaacctttatgtacttaaagttatacagaaaatagaataaagttaatacc

SEQ ID NO: 113995 - DNA, 1496 bp, Homo sapiens
  Payload ID: 2279
  Gene Symbol: CAP1
  Gene Name: CAP, adenylate cyclase-associated protein 1 (yeast)
  Uniprot ID: Q01518
  ENST ID: ENST00000372792
  CDS Start-End: 67-1494
gccggaagcggagagcggctgatcgcagtccggaggtgaggcggaactctgagcaggtggtccattatggctgacatgcaaaatctggtagaaagattggagagggcagtgggccgcctggaggcagtatctcatacctctgacatgcaccgtgggtatgcagacagtccttcaaaagcaggagcagctccatatgtgcaggcatttgactcgctgcttgctggtcctgtggcagagtacttgaagatcagtaaagagattgggggagacgtgcagaaacatgcggagatggtccacacaggtttgaagttggagcgagctctgttggttacagcttctcagtgtcaacagccagcagaaaataagctttccgatttgttggcacccatctcagagcagatcaaagaagtgataacctttcgggagaagaaccgaggcagcaagttgtttaatcacctgtcagctgtcagcgaaagtatccaggccctgggctgggtggctatggctcccaagcctggcccttatgtgaaagaaatgaatgatgccgccatgttttatacaaaccgagtcctcaaagagtacaaagatgtggataagaagcatgtagactgggtcaaagcttatttaagtatatggacagagctgcaggcttacattaaggagttccataccaccggactggcctggagcaaaacggggcctgtggcaaaagaactgagcggactgccatctggaccctctgccggatcatgtcctcctccccctccaccatgcccccctcctcccccagtctctaccatttcatgctcatatgagtctgcttcccgctcatcactgttcgcgcagattaatcagggggagagcattacacatgccctgaaacatgtatctgatgacatgaagactcacaagaaccctgccctgaaggctcagagtggtccagtacgcagtggccccaaaccattctctgcacctaaaccccaaaccagcccatcccccaaacgagccacaaagaaggagccagctgtacttgaactggagggcaagaagtggagagtggaaaatcaggaaaatgtttccaacctggtgattgaggacacagagctgaaacaggtggcttacatatacaagtgtgtcaacacgacattgcaaatcaagggcaaaattaactccattacagtagataactgtaagaaacttggcctggtattcgatgacgtggtgggcattgtggagataatcaacagtaaggatgtcaaagttcaggtaatgggtaaagtgccaaccatatccatcaacaaaacagatggctgccatgcttacctgagcaagaattccctggattgtgaaatagtcagtgccaaatcttccgagatgaatgtcctcattcctacagaaggcggtgactttaatgaattcccagttcctgagcagttcaagaccctatggaacgggcagaagttggtcaccacagtgacagaaattgctggataagc

SEQ ID NO: 113996 - DNA, 3105 bp, Homo sapiens
  Payload ID: 2279
  Gene Symbol: CAP1
  Gene Name: CAP, adenylate cyclase-associated protein 1 (yeast)
  Uniprot ID: Q01518
  ENST ID: ENST00000372797
  CDS Start-End: 562-1989
gcggagcgtggcctcgatcaccaccgagagctgacggccgcccggattcccgccctcagagaatcctggcccccagtcgttccaagaccctttacggactgcagcttaaaggaaccggcctctgccattgagaccaaactgacagaggaactggtcactcttctgttctttccagagaggagcttagccagggacttctgcccttcctgggcccgggcctcgggggcgattccgggtaggtaaagcggaacgagggcgtggcctctcttgtgagcccgccctccccgtgtcgctcccgccttgagggcggggctctttcccaagtgccctctgtgagagccgggccgctctctccggggcgtggcgaagaggggcggagtcacgagcggggcggtgagacttcctgcccagtcgcgggccagcctagcgcttcagccggcggctcatttccggtgggggcgccgcgcccagtgagggcccggaagtgggtcgcgcggagattgctgggcggttcttgccggaagcggagagcggctgatcgcagtccggaggtggtccattatggctgacatgcaaaatctggtagaaagattggagagggcagtgggccgcctggaggcagtatctcatacctctgacatgcaccgtgggtatgcagacagtccttcaaaagcaggagcagctccatatgtgcaggcatttgactcgctgcttgctggtcctgtggcagagtacttgaagatcagtaaagagattgggggagacgtgcagaaacatgcggagatggtccacacaggtttgaagttggagcgagctctgttggttacagcttctcagtgtcaacagccagcagaaaataagctttccgatttgttggcacccatctcagagcagatcaaagaagtgataacctttcgggagaagaaccgaggcagcaagttgtttaatcacctgtcagctgtcagcgaaagtatccaggccctgggctgggtggctatggctcccaagcctggcccttatgtgaaagaaatgaatgatgccgccatgttttatacaaaccgagtcctcaaagagtacaaagatgtggataagaagcatgtagactgggtcaaagcttatttaagtatatggacagagctgcaggcttacattaaggagttccataccaccggactggcctggagcaaaacggggcctgtggcaaaagaactgagcggactgccatctggaccctctgccggatcatgtcctcctccccctccaccatgcccccctcctcccccagtctctaccatttcatgctcatatgagtctgcttcccgctcatcactgttcgcgcagattaatcagggggagagcattacacatgccctgaaacatgtatctgatgacatgaagactcacaagaaccctgccctgaaggctcagagtggtccagtacgcagtggccccaaaccattctctgcacctaaaccccaaaccagcccatcccccaaacgagccacaaagaaggagccagctgtacttgaactggagggcaagaagtggagagtggaaaatcaggaaaatgtttccaacctggtgattgaggacacagagctgaaacaggtggcttacatatacaagtgtgtcaacacgacattgcaaatcaagggcaaaattaactccattacagtagataactgtaagaaacttggcctggtattcgatgacgtggtgggcattgtggagataatcaacagtaaggatgtcaaagttcaggtaatgggtaaagtgccaaccatatccatcaacaaaacagatggctgccatgcttacctgagcaagaattccctggattgtgaaatagtcagtgccaaatcttccgagatgaatgtcctcattcctacagaaggcggtgactttaatgaattcccagttcctgagcagttcaagaccctatggaacgggcagaagttggtcaccacagtgacagaaattgctggataagcgaagtgccactgggttctttgccctcccttcacaccatgggataaatctgtatcaagacggttcttttctagatttcctctacctttttgctcttaaaactgcttctctgctctgagaagcacagctacctgccttcactgaaatatacctcaggctgaaatttggggtgggatagcaggtcagttgatcttctgcaggaaggtgcagcttttccatatcagctcaaccacgccgccagtccattcttaaggaactgccgactaggactgatgatgcattttagctttgagcttttgggggttattctaccaacaaacagtccattggaaagaaaacagtccctggaattaacagatcagaatgttcacactggttaatctttttttaacaatgagcatgaaggtagcagaagctggtgtgtttccagatggttcttctaaccaaactaatttttcactgttgacaagcgaggcaagggttgcactggaccaaaggctgaggcttggccatctagcattccatacaaaattgtttcctataagcattccttttattctctattctatcctgggtctgcctcaaccgtgagataggagagtctctggtactagctgctgtagcagtgcccttcatccagggcagttaatggagtcttggaccctttctttctctgggatccctgcccagcaccttcctatagagatgactttaaaaggaaaaaaaaaaaaaaaaaaacccacatgatttcaaggagtctggcattcctgaatccttcttccctgccaggtgcctgtcacctgtcttcactgcctccttttccctgtcatgctcatcagcttatggcttctgtctaagcacctgaacagaggactgaaacctccactgcaggctggttttaggtcttgaattatgtaagaatcttgcacagcactgctaatgtaaatttcagttgtttttccctctaggacaaacacttaccaaaatatgcaacttttttttggtgggaagagagattgtcctgtgatttctacccatttcctgaggcctgtggaaataaacctttatgtacttaaagttatacagaaaatagaataaagttaataccaaacttgc

SEQ ID NO: 113997 - DNA, 1563 bp, Homo sapiens
  Payload ID: 2279
  Gene Symbol: CAP1
  Gene Name: CAP, adenylate cyclase-associated protein 1 (yeast)
  Uniprot ID: Q01518
  ENST ID: ENST00000372798
  CDS Start-End: 64-1488
ggaagcggagagcggctgatcgcagtccggaggtgaggcggaactctgagcaggtggtccattatggctgacatgcaaaatctggtagaaagattggagagggcagtgggccgcctggaggcagtatctcatacctctgacatgcaccgtgggtatgcagacagtccttcaaaaggagcagctccatatgtgcaggcatttgactcgctgcttgctggtcctgtggcagagtacttgaagatcagtaaagagattgggggagacgtgcagaaacatgcggagatggtccacacaggtttgaagttggagcgagctctgttggttacagcttctcagtgtcaacagccagcagaaaataagctttccgatttgttggcacccatctcagagcagatcaaagaagtgataacctttcgggagaagaaccgaggcagcaagttgtttaatcacctgtcagctgtcagcgaaagtatccaggccctgggctgggtggctatggctcccaagcctggcccttatgtgaaagaaatgaatgatgccgccatgttttatacaaaccgagtcctcaaagagtacaaagatgtggataagaagcatgtagactgggtcaaagcttatttaagtatatggacagagctgcaggcttacattaaggagttccataccaccggactggcctggagcaaaacggggcctgtggcaaaagaactgagcggactgccatctggaccctctgccggatcatgtcctcctccccctccaccatgcccccctcctcccccagtctctaccatttcatgctcatatgagtctgcttcccgctcatcactgttcgcgcagattaatcagggggagagcattacacatgccctgaaacatgtatctgatgacatgaagactcacaagaaccctgccctgaaggctcagagtggtccagtacgcagtggccccaaaccattctctgcacctaaaccccaaaccagcccatcccccaaacgagccacaaagaaggagccagctgtacttgaactggagggcaagaagtggagagtggaaaatcaggaaaatgtttccaacctggtgattgaggacacagagctgaaacaggtggcttacatatacaagtgtgtcaacacgacattgcaaatcaagggcaaaattaactccattacagtagataactgtaagaaacttggcctggtattcgatgacgtggtgggcattgtggagataatcaacagtaaggatgtcaaagttcaggtaatgggtaaagtgccaaccatatccatcaacaaaacagatggctgccatgcttacctgagcaagaattccctggattgtgaaatagtcagtgccaaatcttccgagatgaatgtcctcattcctacagaaggcggtgactttaatgaattcccagttcctgagcagttcaagaccctatggaacgggcagaagttggtcaccacagtgacagaaattgctggataagcgaagtgccactgggttctttgccctcccttcacaccatgggataaatctgtatcaagacggttcttttctaga

SEQ ID NO: 113998 - DNA, 2964 bp, Homo sapiens
  Payload ID: 2279
  Gene Symbol: CAP1
  Gene Name: CAP, adenylate cyclase-associated protein 1 (yeast)
  Uniprot ID: Q01518
  ENST ID: ENST00000372802
  CDS Start-End: 558-1982
gtggcctcgatcaccaccgagagctgacggccgcccggattcccgccctcagagaatcctggcccccagtcgttccaagaccctttacggactgcagcttaaaggaaccggcctctgccattgagaccaaactgacagaggaactggtcactcttctgttctttccagagaggagcttagccagggacttctgcccttcctgggcccgggcctcgggggcgattccgggtaggtaaagcggaacgagggcgtggcctctcttgtgagcccgccctccccgtgtcgctcccgccttgagggcggggctctttcccaagtgccctctgtgagagccgggccgctctctccggggcgtggcgaagaggggcggagtcacgagcggggcggtgagacttcctgcccagtcgcgggccagcctagcgcttcagccggcggctcatttccggtgggggcgccgcgcccagtgagggcccggaagtgggtcgcgcggagattgctgggcggttcttgccggaagcggagagcggctgatcgcagtccggagcaggtggtccattatggctgacatgcaaaatctggtagaaagattggagagggcagtgggccgcctggaggcagtatctcatacctctgacatgcaccgtgggtatgcagacagtccttcaaaaggagcagctccatatgtgcaggcatttgactcgctgcttgctggtcctgtggcagagtacttgaagatcagtaaagagattgggggagacgtgcagaaacatgcggagatggtccacacaggtttgaagttggagcgagctctgttggttacagcttctcagtgtcaacagccagcagaaaataagctttccgatttgttggcacccatctcagagcagatcaaagaagtgataacctttcgggagaagaaccgaggcagcaagttgtttaatcacctgtcagctgtcagcgaaagtatccaggccctgggctgggtggctatggctcccaagcctggcccttatgtgaaagaaatgaatgatgccgccatgttttatacaaaccgagtcctcaaagagtacaaagatgtggataagaagcatgtagactgggtcaaagcttatttaagtatatggacagagctgcaggcttacattaaggagttccataccaccggactggcctggagcaaaacggggcctgtggcaaaagaactgagcggactgccatctggaccctctgccggatcatgtcctcctccccctccaccatgcccccctcctcccccagtctctaccatttcatgctcatatgagtctgcttcccgctcatcactgttcgcgcagattaatcagggggagagcattacacatgccctgaaacatgtatctgatgacatgaagactcacaagaaccctgccctgaaggctcagagtggtccagtacgcagtggccccaaaccattctctgcacctaaaccccaaaccagcccatcccccaaacgagccacaaagaaggagccagctgtacttgaactggagggcaagaagtggagagtggaaaatcaggaaaatgtttccaacctggtgattgaggacacagagctgaaacaggtggcttacatatacaagtgtgtcaacacgacattgcaaatcaagggcaaaattaactccattacagtagataactgtaagaaacttggcctggtattcgatgacgtggtgggcattgtggagataatcaacagtaaggatgtcaaagttcaggtaatgggtaaagtgccaaccatatccatcaacaaaacagatggctgccatgcttacctgagcaagaattccctggattgtgaaatagtcagtgccaaatcttccgagatgaatgtcctcattcctacagaaggcggtgactttaatgaattcccagttcctgagcagttcaagaccctatggaacgggcagaagttggtcaccacagtgacagaaattgctggataagcgaagtgccactgggttctttgccctcccttcacaccatgggataaatctgtatcaagacggttcttttctagatttcctctacctttttgctcttaaaactgcttctctgctctgagaagcacagctacctgccttcactgaaatatacctcaggctgaaatttggggtgggatagcaggtcagttgatcttctgcaggaaggtgcagcttttccatatcagctcaaccacgccgccagtccattcttaaggaactgccgactaggactgatgatgcattttagctttgagcttttgggggttattctaccaacaaacagtccattggaaagaaaacagtccctggaattaacagatcagaatgttcacactggttaatctttttttaacaatgagcatgaaggtagcagaagctggtgtgtttccagatggttcttctaaccaaactaatttttcactgttgacaagcgaggcaagggttgcactggaccaaaggctgaggcttggccatctagcattccatacaaaattgtttcctataagcattccttttattctctattctatcctgggtctgcctcaaccgtgagataggagagtctctggtactagctgctgtagcagtgcccttcatccagggcagttaatggagtcttggaccctttctttctctgggatccctgcccagcaccttcctatagagatgactttaaaaggaaaaaaaaaaaaaaaaaaacccacatgatttcaaggagtctggcattcctgaatccttcttccctgccaggtgcctgtcacctgtcttcactgcctccttttccctgtcatgctcatcagcttatggcttctgtctaagcacctgaacagaggactgaaacctccactgcaggctggttttaggtcttgaattatgtaagaatcttgcacagcactgctaatgtaaatttcagttgtttttccctctaggacaaacacttacc

SEQ ID NO: 113999 - DNA, 2217 bp, Homo sapiens
  Payload ID: 2279
  Gene Symbol: CAP1
  Gene Name: CAP, adenylate cyclase-associated protein 1 (yeast)
  Uniprot ID: Q01518
  ENST ID: ENST00000372805
  CDS Start-End: 52-1479
gagcggctgatcgcagtccggaggtgaggcggaactctgaggtggtccattatggctgacatgcaaaatctggtagaaagattggagagggcagtgggccgcctggaggcagtatctcatacctctgacatgcaccgtgggtatgcagacagtccttcaaaagcaggagcagctccatatgtgcaggcatttgactcgctgcttgctggtcctgtggcagagtacttgaagatcagtaaagagattgggggagacgtgcagaaacatgcggagatggtccacacaggtttgaagttggagcgagctctgttggttacagcttctcagtgtcaacagccagcagaaaataagctttccgatttgttggcacccatctcagagcagatcaaagaagtgataacctttcgggagaagaaccgaggcagcaagttgtttaatcacctgtcagctgtcagcgaaagtatccaggccctgggctgggtggctatggctcccaagcctggcccttatgtgaaagaaatgaatgatgccgccatgttttatacaaaccgagtcctcaaagagtacaaagatgtggataagaagcatgtagactgggtcaaagcttatttaagtatatggacagagctgcaggcttacattaaggagttccataccaccggactggcctggagcaaaacggggcctgtggcaaaagaactgagcggactgccatctggaccctctgccggatcatgtcctcctccccctccaccatgcccccctcctcccccagtctctaccatttcatgctcatatgagtctgcttcccgctcatcactgttcgcgcagattaatcagggggagagcattacacatgccctgaaacatgtatctgatgacatgaagactcacaagaaccctgccctgaaggctcagagtggtccagtacgcagtggccccaaaccattctctgcacctaaaccccaaaccagcccatcccccaaacgagccacaaagaaggagccagctgtacttgaactggagggcaagaagtggagagtggaaaatcaggaaaatgtttccaacctggtgattgaggacacagagctgaaacaggtggcttacatatacaagtgtgtcaacacgacattgcaaatcaagggcaaaattaactccattacagtagataactgtaagaaacttggcctggtattcgatgacgtggtgggcattgtggagataatcaacagtaaggatgtcaaagttcaggtaatgggtaaagtgccaaccatatccatcaacaaaacagatggctgccatgcttacctgagcaagaattccctggattgtgaaatagtcagtgccaaatcttccgagatgaatgtcctcattcctacagaaggcggtgactttaatgaattcccagttcctgagcagttcaagaccctatggaacgggcagaagttggtcaccacagtgacagaaattgctggataagcgaagtgccactgggttctttgccctcccttcacaccatgggataaatctgtatcaagacggttcttttctagatttcctctacctttttgctcttaaaactgcttctctgctctgagaagcacagctacctgccttcactgaaatatacctcaggctgaaatttggggtgggatagcaggtcagttgatcttctgcaggaaggtgcagcttttccatatcagctcaaccacgccgccagtccattcttaaggaactgccgactaggactgatgatgcattttagctttgagcttttgggggttattctaccaacaaacagtccattggaaagaaaacagtccctggaattaacagatcagaatgttcacactggttaatctttttttaacaatgagcatgaaggtagcagaagctggtgtgtttccagatggttcttctaaccaaactaatttttcactgttgacaagcgaggcaagggttgcactggaccaaaggctgaggcttggccatctagcattccatacaaaattgtttcctataagcattccttttattctctattctatcctgggtctgcctcaaccgtgagataggagagtctctggtactagctgctgtagcagtgcccttcatccagggcagttaatggagtcttggaccctttctttctctgggatccctgcccagcaccttcctatagagatgactttaaaaggaaaaaaaaaaaaaaaaaaa

SEQ ID NO: 114000 - DNA, 273 bp, Homo sapiens
  Payload ID: 2279
  Gene Symbol: CAP1
  Gene Name: CAP, adenylate cyclase-associated protein 1 (yeast)
  ENST ID: ENST00000446031
  CDS Start-End: 98-273
ctacgcgcgtgtcatgaaccctgccgagagggccggggctgaggccctcaggccgacccggactcttgggcgcggtctcttgagcaggtggtccattatggctgacatgcaaaatctggtagaaagattggagagggcagtgggccgcctggaggcagtatctcatacctctgacatgcaccgtgggtatgcagacagtccttcaaaagcaggagcagctccatatgtgcaggcatttgactcgctgcttgctggtcctgtggcagagtactt

SEQ ID NO: 114001 - DNA, 681 bp, Homo sapiens
  Payload ID: 2279
  Gene Symbol: CAP1
  Gene Name: CAP, adenylate cyclase-associated protein 1 (yeast)
  ENST ID: ENST00000449311
  CDS Start-End: 159-681
tttacggactgcagcttaaaggaaccggcctctgccattgagaccaaactgacagaggaactggtcactcttctgttctttccagagaggagcttagccagggacttctgcccttcctgggcccgggcctcgggggcgattccggcaggtggtccattatggctgacatgcaaaatctggtagaaagattggagagggcagtgggccgcctggaggcagtatctcatacctctgacatgcaccgtgggtatgcagacagtccttcaaaagcaggagcagctccatatgtgcaggcatttgactcgctgcttgctggtcctgtggcagagtacttgaagatcagtaaagagattgggggagacgtgcagaaacatgcggagatggtccacacaggtttgaagttggagcgagctctgttggttacagcttctcagtgtcaacagccagcagaaaataagctttccgatttgttggcacccatctcagagcagatcaaagaagtgataacctttcgggagaagaaccgaggcagcaagttgtttaatcacctgtcagctgtcagcgaaagtatccaggccctgggctgggtggctatggctcccaagcctggcccttatgtgaaagaaatgaatgatgccgccatgttttatacaaaccgagtcctcaaagagtacaaagatg

SEQ ID NO: 114002 - DNA, 528 bp, Homo sapiens
  Payload ID: 2279
  Gene Symbol: CAP1
  Gene Name: CAP, adenylate cyclase-associated protein 1 (yeast)
  ENST ID: ENST00000414893
  CDS Start-End: 93-528
ggtcgcgcggagattgctgggcggttcttgccggaagcggagagcggctgatcgcagtccggaggtgaggcggaactctgaggtggtccattatggctgacatgcaaaatctggtagaaagattggagagggcagtgggccgcctggaggcagtatctcatacctctgacatgcaccgtgggtatgcagacagtccttcaaaagcaggagcagctccatatgtgcaggcttacattaaggagttccataccaccggactggcctggagcaaaacggggcctgtggcaaaagaactgagcggactgccatctggaccctctgccggatcatgtcctcctccccctccaccatgcccccctcctcccccagtctctaccatttcatgctcatatgagtctgcttcccgctcatcactgttcgcgcagattaatcagggggagagcattacacatgccctgaaacatgtatctgatgacatgaagactcacaagaaccctgccctgaaggctcagagtggtccagtacgca

SEQ ID NO: 114003 - DNA, 610 bp, Homo sapiens
  Payload ID: 2279
  Gene Symbol: CAP1
  Gene Name: CAP, adenylate cyclase-associated protein 1 (yeast)
  ENST ID: ENST00000417287
  CDS Start-End: 83-610
ggaggtgaggcggaactctgaggacatagacctggaggcttctgctgctgctgcaggccaaggaatggaaaggtggtccattatggctgacatgcaaaatctggtagaaagattggagagggcagtgggccgcctggaggcagtatctcatacctctgacatgcaccgtgggtatgcagacagtccttcaaaagcaggagcagctccatatgtgcaggcatttgactcgctgcttgctggtcctgtggcagagtacttgaagatcagtaaagagattgggggagacgtgcagaaacatgcggagatggtccacacaggtttgaagttggagcgagctctgttggttacagcttctcagtgtcaacagccagcagaaaataagctttccgatttgttggcacccatctcagagcagatcaaagaagtgataacctttcgggagaagaaccgaggcagcaagttgtttaatcacctgtcagctgtcagcgaaagtatccaggccctgggctgggtggctatggctcccaagcctggcccttatgtgaaagaaatgaatgatgccgccatgttttatacaaaccgagtcctcaaagagtacaaagatgtggat

SEQ ID NO: 114004 - DNA, 824 bp, Homo sapiens
  Payload ID: 2279
  Gene Symbol: CAP1
  Gene Name: CAP, adenylate cyclase-associated protein 1 (yeast)
  ENST ID: ENST00000421589
  CDS Start-End: 215-824
tctccggggcgtggcgaagaggggcggagtcacgagcggggcggtgagacttcctgcccagtcgcgggccagcctagcgcttcagccggcggctcatttccggtgggggcgccgcgcccagtgagggcccggaagtgggtcgcgcggagattgctgggcggttcttgccggaagcggagagcggctgatcgcagtccggagcaggtggtccattatggctgacatgcaaaatctggtagaaagattggagagggcagtgggccgcctggaggcagtatctcatacctctgacatgcaccgtgggtatgcagacagtccttcaaaagcaggagcagctccatatgtgcaggcatttgactcgctgcttgctggtcctgtggcagagtacttgaagatcagtaaagagattgggggagacgtgcagaaacatgcggagatggtccacacaggtttgaagttggagcgagctctgttggttacagcttctcagtgtcaacagccagcagaaaataagctttccgatttgttggcacccatctcagagcagatcaaagaagtgataacctttcgggagaagaaccgaggcagcaagttgtttaatcacctgtcagctgtcagcgaaagtatccaggccctgggctgggtggctatggctcccaagcctggcccttatgtgaaagaaatgaatgatgccgccatgttttatacaaaccgagtcctcaaagagtacaaagatgtggataagaagcatgtagactgggtcaaagcttatttaagtatatggacagagctgcaggcttacattaaggagttccataccaccg

SEQ ID NO: 114005 - DNA, 772 bp, Homo sapiens
  Payload ID: 2279
  Gene Symbol: CAP1
  Gene Name: CAP, adenylate cyclase-associated protein 1 (yeast)
  ENST ID: ENST00000414281
  CDS Start-End: 149-772
attgctgggcggttcttgccggaagcggagagcggctgatcgcagtccggaggtgaggcggaactctgaggcagatatcctccctttcctcctcggctgctgctcttactttgacaagccaggctaacattgaagcaggtggtccattatggctgacatgcaaaatctggtagaaagattggagagggcagtgggccgcctggaggcagtatctcatacctctgacatgcaccgtgggtatgcagacagtccttcaaaagcaggagcagctccatatgtgcaggcatttgactcgctgcttgctggtcctgtggcagagtacttgaagatcagtaaagagattgggggagacgtgcagaaacatgcggagatggtccacacaggtttgaagttggagcgagctctgttggttacagcttctcagtgtcaacagccagcagaaaataagctttccgatttgttggcacccatctcagagcagatcaaagaagtgataacctttcgggagaagaaccgaggcagcaagttgtttaatcacctgtcagctgtcagcgaaagtatccaggccctgggctgggtggctatggctcccaagcctggcccttatgtgaaagaaatgaatgatgccgccatgttttatacaaaccgagtcctcaaagagtacaaagatgtggataagaagcatgtagactgggtcaaagcttatttaagtatatggacagagctgcaggcttacattaaggagttccataccaccggactggcctggagc

SEQ ID NO: 114006 - DNA, 668 bp, Homo sapiens
  Payload ID: 2279
  Gene Symbol: CAP1
  Gene Name: CAP, adenylate cyclase-associated protein 1 (yeast)
  ENST ID: ENST00000420216
  CDS Start-End: 130-668
ttgctgggcggttcttgccggaagcggagagcggctgatcgcagtccggaggcagatatcctccctttcctcctcggctgctgctcttactttgacaagccaggctaacattgaagcaggtggtccattatggctgacatgcaaaatctggtagaaagattggagagggcagtgggccgcctggaggcagtatctcatacctctgacatgcaccgtgggtatgcagacagtccttcaaaagcaggagcagctccatatgtgcaggcatttgactcgctgcttgctggtcctgtggcagagtacttgaagatcagtaaagagattgggggagacgtgcagaaacatgcggagatggtccacacaggtttgaagttggagcgagctctgttggttacagcttctcagtgtcaacagccagcagaaaataagctttccgatttgttggcacccatctcagagcagatcaaagaagtgataacctttcgggagaagaaccgaggcagcaagttgtttaatcacctgtcagctgtcagcgaaagtatccaggccctgggctgggtggctatggctcccaagcctggcccttatgtgaaagaaatgaatgatgccgccatgttttatacaaaccgagtcctcaaagagtacaaagatgtggataagaagcatgt

SEQ ID NO: 114007 - DNA, 817 bp, Homo sapiens
  Payload ID: 2279
  Gene Symbol: CAP1
  Gene Name: CAP, adenylate cyclase-associated protein 1 (yeast)
  ENST ID: ENST00000435719
  CDS Start-End: 30-817
ggctgatcgcagtccggaggtggtccattatggctgacatgcaaaatctggtagaaagattggagagggcagtgggccgcctggaggcagtatctcatacctctgacatgcaccgtgggtatgcagacagtccttcaaaaggagcagctccatatgtgcaggcatttgactcgctgcttgctggtcctgtggcagagtacttgaagatcagtaaagagattgggggagacgtgcagaaacatgcggagatggtccacacaggtttgaagttggagcgagctctgttggttacagcttctcagtgtcaacagccagcagaaaataagctttccgatttgttggcacccatctcagagcagatcaaagaagtgataacctttcgggagaagaaccgaggcagcaagttgtttaatcacctgtcagctgtcagcgaaagtatccaggccctgggctgggtggctatggctcccaagcctggcccttatgtgaaagaaatgaatgatgccgccatgttttatacaaaccgagtcctcaaagagtacaaagatgtggataagaagcatgtagactgggtcaaagcttatttaagtatatggacagagctgcaggcttacattaaggagttccataccaccggactggcctggagcaaaacggggcctgtggcaaaagaactgagcggactgccatctggaccctctgccggatcatgtcctcctccccctccaccatgcccccctcctcccccagtctctaccatttcatgctcatatgagtctgcttcccgctcatcactgttcgcgcagattaatcaggg

SEQ ID NO: 114008 - DNA, 702 bp, Homo sapiens
  Payload ID: 2279
  Gene Symbol: CAP1
  Gene Name: CAP, adenylate cyclase-associated protein 1 (yeast)
  ENST ID: ENST00000424977
  CDS Start-End: 98-702
ggaggtgaggcggaactctgaggcagatatcctccctttcctcctcggctgctgctcttactttgacaagccaggctaacattgaaggtggtccattatggctgacatgcaaaatctggtagaaagattggagagggcagtgggccgcctggaggcagtatctcatacctctgacatgcaccgtgggtatgcagacagtccttcaaaagcaggagcagctccatatgtgcaggcatttgactcgctgcttgctggtcctgtggcagagtacttgaagatcagtaaagagattgggggagacgtgcagaaacatgcggagatggtccacacaggtttgaagttggagcgagctctgttggttacagcttctcagtgtcaacagccagcagaaaataagctttccgatttgttggcacccatctcagagcagatcaaagaagtgataacctttcgggagaagaaccgaggcagcaagttgtttaatcacctgtcagctgtcagcgaaagtatccaggccctgggctgggtggctatggctcccaagcctggcccttatgtgaaagaaatgaatgatgccgccatgttttatacaaaccgagtcctcaaagagtacaaagatgtggataagaagcatgtagactgggtcaaagcttatttaagtatatggacagagctgcaggcttacattaaggagttccatac

SEQ ID NO: 114009 - DNA, 739 bp, Homo sapiens
  Payload ID: 2279
  Gene Symbol: CAP1
  Gene Name: CAP, adenylate cyclase-associated protein 1 (yeast)
  ENST ID: ENST00000427843
  CDS Start-End: 93-739
ctgatcgcagtccggaggcagatatcctccctttcctcctcggctgctgctcttactttgacaagccaggctaacattgaaggtggtccattatggctgacatgcaaaatctggtagaaagattggagagggcagtgggccgcctggaggcagtatctcatacctctgacatgcaccgtgggtatgcagacagtccttcaaaagcaggagcagctccatatgtgcaggcatttgactcgctgcttgctggtcctgtggcagagtacttgaagatcagtaaagagattgggggagacgtgcagaaacatgcggagatggtccacacaggtttgaagttggagcgagctctgttggttacagcttctcagtgtcaacagccagcagaaaataagctttccgatttgttggcacccatctcagagcagatcaaagaagtgataacctttcgggagaagaaccgaggcagcaagttgtttaatcacctgtcagctgtcagcgaaagtatccaggccctgggctgggtggctatggctcccaagcctggcccttatgtgaaagaaatgaatgatgccgccatgttttatacaaaccgagtcctcaaagagtacaaagatgtggataagaagcatgtagactgggtcaaagcttatttaagtatatggacagagctgcaggcttacattaaggagttccataccaccggactggcctggagcaaaacggggcctgtggcaaaaga

SEQ ID NO: 114010 - DNA, 3316 bp, Homo sapiens
  Payload ID: 2280
  Gene Symbol: CAP2
  Gene Name: CAP, adenylate cyclase-associated protein, 2 (yeast)
  Uniprot ID: P40123
  ENST ID: ENST00000229922
  CDS Start-End: 533-1966
atattgggtctggggacacacatgccgtctcttgattcctaaggatccattacccatttctctgcacagatcttcgggtatccaacctatctgtgcctccttcagccaggagcctccggatctttccagacttctttgcaatactgcctcatgcactgaatccatttctcgcatagcctggcgcttggcaggcaggctggcgttccctggctctgccttccccatctccctgtcttttctcccacggcccatctgcccctcctttcctccacccccttctcctctctgctcccctttatttccactccccacccgcgtggctttgctctccctctcccccctcagctcgtctgtatttggagctccggaagctgccggcgactctcccctggagcagcgtgactgacaccggctcctattcagctgggaggagggagaggggaggagaaggggagggccgcgggaggagggtacgagtggccgaccacggatttgcattgccgaggacgggaccccagggcagcgaagcagaatggccaacatgcagggactggtggaaagactggaacgagctgtcagccgcctggagtcgctgtctgcagagtcccacaggccccctgggaactgcggggaagtcaatggtgtcattgcaggtgtggcaccctccgtggaagcctttgacaagctgatggacagtatggtggccgagtttttaaagaacagtaggatccttgctggggacgtggagacccatgcagaaatggtgcacagtgctttccaggcccagcgggctttccttctgatggcctctcagtaccaacaaccccacgagaatgacgtggccgcacttctgaaacccatatcggaaaagattcaggaaatccaaactttcagagagagaaaccgggggagtaacatgtttaatcatctttcggccgtcagcgaaagcatccctgcccttggatggatagctgtgtctcccaaacctggtccttatgtcaaggagatgaatgacgctgccaccttttacactaacagggtcttaaaggactacaaacacagtgatttgcgtcatgtggattgggtgaagtcatatttgaacatttggagtgaacttcaagcatacatcaaggaacaccacaccacgggcctcacatggagcaaaacaggtcctgtagcatccacagtatcagcgttttctgtcctctcctctgggcctggccttcctccaccccctcctcctctgcctcctccagggccacctccacttttcgagaatgaaggcaaaaaagaggaatcttctccttcacgctcagctttatttgcccaacttaaccagggagaagcaattacaaaagggctccgccatgtcacagatgaccagaagacatacaaaaatcccagcctgcgggctcaaggagggcaaactcaatctcccaccaaaagtcacactccaagtcccacatctcctaaatcttatccttctcaaaaacatgccccagtgttggagttggaaggaaagaaatggagagtggagtaccaagaggacaggaatgaccttgtgatttcagagactgagctgaaacaagtggcttacattttcaaatgcgaaaaatcaactattcagataaaagggaaagtaaactccattataattgacaactgtaaaaaactcggcctggtgtttgacaatgtggtgggcattgtggaagtgatcaactcccaggacattcaaatccaggtaatggggagagtgccaacaatttccattaataagacagaaggttgccacatatacctcagtgaagatgcattagactgtgagatcgtgagcgccaagtcatctgaaatgaacatacttatccctcaggatggtgattatagagaatttcccattcctgaacagttcaagacagcatgggatggatccaagttaatcactgaacctgcagaaattatggcctaacttcctgagagaccgaaccccctcacctgaatccccctctatcaaacaaacaaaaaagcagcagtaaagagctagaagttgcagtagcccctactgctttagctttggcctccaacgattctgtgctatagatacagcactgtttctggcacgcctcgtgggcattttgaaatatttaacgtttcctcatgatttgcctttgtgtgtgattttagttccacatgatgacttgtgaacattagggatttaaaggaaaaaaaaaaagaattctgttcccctcatatcatgaacacagtaactgataggtaaaaagactgcatgattcacttttacacttatatttcattgctagttaaaaaataaaacctttgagaatctaagatgtacatttttaccttttaggcaatttcaatataatgtagaagtagtagtgtgccctgaaaaatgtacacgttttttcttattgttaccacatgttcacctttatcagcgtggatactgtcagcatgagtacatatttcaacccacgcttgtaaaagacataagagtttataaaggaccaaattcagttccttggtccttggaagacctatattctctgtagttactgaaaaccgaaagtcaattctaattattcatcttacatatttttccaccatgtcatttgaaaacttgcttttcttctgcataagagattcttatgccaaaaacattaaacagaagaaatcattttttttgctatgtaatacctcgcaactttgctctaaaatcaagctcagttattattttccaagtttgaacatgttaaatatcagatgccttgtaaattatgtctttaacgttttcttatagactaatttcctcttttccacctgccagacttgctaaccaagctcgaaaatgaacatgaaaaagccatacatgtattatttctcctaaaacctaaggcattatctgttggtttggcttgctgctcctattttgtagtcttgatagtagatgcttcttcagcgtaagagtagctatgatattcctttttatcttttcagtacatagtgctgaaaaatctgcaacttcttggatcatatttaatgaattatagtataatgcttgcaggcccagtacaagcatatatattgtgcctcttacagcctttggaatacattgtttccattttttaaatatcttctatatccatatagtattcaaattattaatgctcatgtaccaaggttttgctataaaagttttgtctgtatgaataatgtggctttagtaaataatcatttttcaactgtaaacttattctgaaataaagtaaaattctaattgtttaaatactgtgatgaa

SEQ ID NO: 114011 - DNA, 1812 bp, Homo sapiens
  Payload ID: 2280
  Gene Symbol: CAP2
  Gene Name: CAP, adenylate cyclase-associated protein, 2 (yeast)
  ENST ID: ENST00000378990
  CDS Start-End: 104-1459
ggagggagaggggaggagaaggggagggccgcgggaggagggtacgagtggccgaccacggatttgcattgccgaggacgggaccccagggcagcgaagcagaatggccaacatgcagggactggtggaaagactggaacgagctgtcagccgcctggagtcgctgtctgcagagtcccacaggccccctgggaactgcggggaagtcaatggtgtcattgcaggtgtggcaccctccgtggaagcctttgacaagctgatggacagtatggtggccgagtttttaaagaacagtaggatccttgctggggacgtggagacccataatgacgtggccgcacttctgaaacccatatcggaaaagattcaggaaatccaaactttcagagagagaaaccgggggagtaacatgtttaatcatctttcggccgtcagcgaaagcatccctgcccttggatggatagctgtgtctcccaaacctggtccttatgtcaaggagatgaatgacgctgccaccttttacactaacagggtcttaaaggactacaaacacagtgatttgcgtcatgtggattgggtgaagtcatatttgaacatttggagtgaacttcaagcatacatcaaggaacaccacaccacgggcctcacatggagcaaaacaggtcctgtagcatccacagtatcagcgttttctgtcctctcctctgggcctggccttcctccaccccctcctcctctgcctcctccagggccacctccacttttcgagaatgaaggcaaaaaagaggaatcttctccttcacgctcagctttatttgcccaacttaaccagggagaagcaattacaaaagggctccgccatgtcacagatgaccagaagacatacaaaaatcccagcctgcgggctcaaggagggcaaactcaatctcccaccaaaagtcacactccaagtcccacatctcctaaatcttatccttctcaaaaacatgccccagtgttggagttggaaggaaagaaatggagagtggagtaccaagaggacaggaatgaccttgtgatttcagagactgagctgaaacaagtggcttacattttcaaatgcgaaaaatcaactattcagataaaagggaaagtaaactccattataattgacaactgtaaaaaactcggcctggtgtttgacaatgtggtgggcattgtggaagtgatcaactcccaggacattcaaatccaggtaatggggagagtgccaacaatttccattaataagacagaaggttgccacatatacctcagtgaagatgcattagactgtgagatcgtgagcgccaagtcatctgaaatgaacatacttatccctcaggatggtgattatagagaatttcccattcctgaacagttcaagacagcatgggatggatccaagttaatcactgaacctgcagaaattatggcctaacttcctgagagaccgaaccccctcacctgaatccccctctatcaaacaaacaaaaaagcagcagtaaagagctagaagttgcagtagcccctactgctttagctttggcctccaacgattctgtgctatagatacagcactgtttctggcacgcctcgtgggcattttgaaatatttaacgtttcctcatgatttgcctttgtgtgtgattttagttccacatgatgacttgtgaacattagggatttaaaggaaaaaaaaaaagaattctgttcccctcatatcatgaacacagtaactgataggtaaaaagactgcatgattcacttttacacttatatttcattgctagt

SEQ ID NO: 114012 - DNA, 861 bp, Homo sapiens
  Payload ID: 2280
  Gene Symbol: CAP2
  Gene Name: CAP, adenylate cyclase-associated protein, 2 (yeast)
  Uniprot ID: P40123
  ENST ID: ENST00000493172
  CDS Start-End: 86-739
aaggggagggccgcgggaggagggtacgagtggccgaccacggatttgcattgccgaggacgggaccccagggcagcgaagcagaatggccaacatgcagggactggtggaaagactggaacgagctgtcagccgcctggagtcgctgtctgcagagtcccacaggccccctgggaactgcggggaagtcaatggtgtcattgcaggtgtggcaccctccgtggaagcctttgacaagctgatggacagtatggtggccgagtttttaaagaacagtaggatccttgctggggacgtggagacccatgagtaccaagaggacaggaatgaccttgtgatttcagagactgagctgaaacaagtggcttacattttcaaatgcgaaaaatcaactattcagataaaagggaaagtaaactccattataattgacaactgtaaaaaactcggcctggtgtttgacaatgtggtgggcattgtggaagtgatcaactcccaggacattcaaatccaggtaatggggagagtgccaacaatttccattaataagacagaaggttgccacatatacctcagtgaagatgcattagactgtgagatcgtgagcgccaagtcatctgaaatgaacatacttatccctcaggatggtgattatagagaatttcccattcctgaacagttcaagacagcatgggatggatccaagttaatcactgaacctgcagaaattatggcctaacttcctgagagaccgaaccccctcacctgaatccccctctatcaaacaaacaaaaaagcagcagtaaagagctagaagttgcagtagcccctactgctttagctttggcctccaacgattct

SEQ ID NO: 114013 - DNA, 1430 bp, Homo sapiens
  Payload ID: 2280
  Gene Symbol: CAP2
  Gene Name: CAP, adenylate cyclase-associated protein, 2 (yeast)
  ENST ID: ENST00000489374
  CDS Start-End: 116-1213
attcagctgggaggagggagaggggaggagaaggggagggccgcgggaggagggtacgagtggccgaccacggatttgcattgccgaggacgggaccccagggcagcgaagcagaatggccaacatgcagggactggtggaaagactggaacgagctgtcagccgcctggagtcgctgtctgcagagtcccacaggccccctgggaactgcggggaagtcaatggtgtcattgcaggtgtggcaccctccgtggaagcctttgacaagctgatggacagtatggtggccgagtttttaaagaacagtaggatccttgctggggacgtggagacccatgcagaaatggtgcacagtgctttccaggcccagcgggctttccttctgatggcctctcagtaccaacaaccccacgagggtcctgtagcatccacagtatcagcgttttctgtcctctcctctgggcctggccttcctccaccccctcctcctctgcctcctccagggccacctccacttttcgagaatgaaggcaaaaaagaggaatcttctccttcacgctcagctttatttgcccaacttaaccagggagaagcaattacaaaagggctccgccatgtcacagatgaccagaagacatacaaaaatcccagcctgcgggctcaaggagggcaaactcaatctcccaccaaaagtcacactccaagtcccacatctcctaaatcttatccttctcaaaaacatgccccagtgttggagttggaaggaaagaaatggagagtggagtaccaagaggacaggaatgaccttgtgatttcagagactgagctgaaacaagtggcttacattttcaaatgcgaaaaatcaactattcagataaaagggaaagtaaactccattataattgacaactgtaaaaaactcggcctggtgtttgacaatgtggtgggcattgtggaagtgatcaactcccaggacattcaaatccaggtaatggggagagtgccaacaatttccattaataagacagaaggttgccacatatacctcagtgaagatgcattagactgtgagatcgtgagcgccaagtcatctgaaatgaacatacttatccctcaggatggtgattatagagaatttcccattcctgaacagttcaagacagcatgggatggatccaagttaatcactgaacctgcagaaattatggcctaacttcctgagagaccgaaccccctcacctgaatccccctctatcaaacaaacaaaaaagcagcagtaaagagctagaagttgcagtagcccctactgctttagctttggcctccaacgattctgtgctatagatacagcactgtttctggcacgcctcgtgggcattttgaaatatttaacgtttcctcatgatttgcctttgtgtgtgattttagtt

SEQ ID NO: 114014 - DNA, 1404 bp, Homo sapiens
  Payload ID: 2280
  Gene Symbol: CAP2
  Gene Name: CAP, adenylate cyclase-associated protein, 2 (yeast)
  Uniprot ID: P40123
  ENST ID: ENST00000465994
  CDS Start-End: 37-1278
attgccgaggacgggaccccagggcagcgaagcagaatggccaacatgcagggactggtggaaagactggaacgagctgtcagccgcctggagtcgctgtctgcagagtcccacaggccccctgggaactgcggggaagtcaatggtgtcattgcaggtgtggcaccctccgtggaagcctttgacaagctgatggacagtatggtggccgagtttttaaagaacagtaggatccttgctggggacgtggagacccatgcagaaatggtgcacagtgctttccaggcccagcgggctttccttctgatggcctctcagtaccaacaaccccacgagaatgacgtggccgcacttctgaaacccatatcggaaaagattcaggaaatccaaactttcagagagagaaaccgggggagtaacatgtttaatcatctttcggccgtcagcgaaagcatccctgcccttggatggatagctgtgggtcctgtagcatccacagtatcagcgttttctgtcctctcctctgggcctggccttcctccaccccctcctcctctgcctcctccagggccacctccacttttcgagaatgaaggcaaaaaagaggaatcttctccttcacgctcagctttatttgcccaacttaaccagggagaagcaattacaaaagggctccgccatgtcacagatgaccagaagacatacaaaaatcccagcctgcgggctcaaggagggcaaactcaatctcccaccaaaagtcacactccaagtcccacatctcctaaatcttatccttctcaaaaacatgccccagtgttggagttggaaggaaagaaatggagagtggagtaccaagaggacaggaatgaccttgtgatttcagagactgagctgaaacaagtggcttacattttcaaatgcgaaaaatcaactattcagataaaagggaaagtaaactccattataattgacaactgtaaaaaactcggcctggtgtttgacaatgtggtgggcattgtggaagtgatcaactcccaggacattcaaatccaggtaatggggagagtgccaacaatttccattaataagacagaaggttgccacatatacctcagtgaagatgcattagactgtgagatcgtgagcgccaagtcatctgaaatgaacatacttatccctcaggatggtgattatagagaatttcccattcctgaacagttcaagacagcatgggatggatccaagttaatcactgaacctgcagaaattatggcctaacttcctgagagaccgaaccccctcacctgaatccccctctatcaaacaaacaaaaaagcagcagtaaagagctagaagttgcagtagcccctactgctttagctttggcctccaacgattctgtgc

SEQ ID NO: 114015 - DNA, 891 bp, Homo sapiens
  Payload ID: 2280
  Gene Symbol: CAP2
  Gene Name: CAP, adenylate cyclase-associated protein, 2 (yeast)
  ENST ID: ENST00000476263
  CDS Start-End: 17-331
agggcagcgaagcagaatggccaacatgcagggactggtggaaagactggaacgagctgtcagccgcctggagtcgctgtctgcagagtcccacaggccccctgggaactgcggggaagtcaatggtgtcattgcaggtgtggcaccctccgtggaagcctttgacaagctgatggacagtatggtggccgagtttttaaagaacagtaggatccttgctggggacgtggagacccatgcagaaatggtgcacagtgctttccaggcccagcgggctttccttctgatggcctctcagtaccaacaaccccacgaggccaacaagttttaggatataatgagtaattgacctgggaaattaaacaaaaataatttcaccgccaaccacagactgtacccataatggaggctggctgtctcacagacttttgctgctggccagagtgaatgactcagcacaagtcaaccccaggagagaaacaatacagagctcacccctggctgattgagggccagaagcgccattcttgtagaatgacgtggccgcacttctgaaacccatatcggaaaagattcaggaaatccaaactttcagagagagaaaccgggggagtaacatgtttaatcatctttcggccgtcagcgaaagcatccctgcccttggatggatagctgtgtctcccaaacctggtccttatgtcaaggagatgaatgacgctgccaccttttacactaacagggtcttaaaggactacaaacacagtgatttgcgtcatgtggattgggtgaagtcatatttgaacatttggagtgaacttcaagcatacatcaaggaacaccacaccacgggcctcacatggagcaaaacaggtcctgtagcatccacagtat

SEQ ID NO: 114016 - DNA, 1378 bp, Homo sapiens
  Payload ID: 2280
  Gene Symbol: CAP2
  Gene Name: CAP, adenylate cyclase-associated protein, 2 (yeast)
  ENST ID: ENST00000479291
  CDS Start-End: 37-621
attgccgaggacgggaccccagggcagcgaagcagaatggccaacatgcagggactggtggaaagactggaacgagctgtcagccgcctggagtcgctgtctgcagagtcccacaggccccctgggaactgcggggaagtcaatggtgtcattgcaggtgtggcaccctccgtggaagcctttgacaagctgatggacagtatggtggccgagtttttaaagaacagtaggatccttgctggggacgtggagacccataatgacgtggccgcacttctgaaacccatatcggaaaagattcaggaaatccaaactttcagagagagaaaccgggggagtaacatgtttaatcatctttcggccgtcagcgaaagcatccctgcccttggatggatagctgtgtctcccaaacctggtccttatgtcaaggagatgaatgacgctgccaccttttacactaacagggtcttaaaggactacaaacacagtgatttgcgtcatgtggattgggtgaagtcatatttgaacatttggagtgaacttcaagcatacatcaaggaacaccacaccacgggcctcacatggagcaaaacaaatgagaagagacggaggcaaagataagtgactttgcaaggggcagctcacggagatccagtgaagggaacatctaatcagtttgatttcgagtccactgtacgggtcctgtagcatccacagtatcagcgttttctgtcctctcctctgggcctggccttcctccaccccctcctcctctgcctcctccagggccacctccacttttcgagaatgaaggcaaaaaagaggaatcttctccttcacgctcagctttatttgcccaacttaaccagggagaagcaattacaaaagggctccgccatgtcacagatgaccagaagacatacaaaaatcccagcctgcgggctcaaggagggcaaactcaatctcccaccaaaagtcacactccaagtcccacatctcctaaatcttatccttctcaaaaacatgccccagtgttggagttggaaggaaagaaatggagagtggagtaccaagaggacaggaatgaccttgtgatttcagagactgagctgaaacaagtggcttacattttcaaatgcgaaaaatcaactattcagataaaagggaaagtaaactccattataattgacaactgtaaaaaactcggcctggtgtttgacaatgtggtgggcattgtggaagtgatcaactcccaggacattcaaatccaggtaatggggagagtgccaacaatttccattaataagacagaaggttgccacatatacctcagtgaagatgcattagactgtgagatcgtgagcgccaagtcatctga

SEQ ID NO: 114017 - DNA, 2686 bp, Homo sapiens
  Payload ID: 2280
  Gene Symbol: CAP2
  Gene Name: CAP, adenylate cyclase-associated protein, 2 (yeast)
  ENST ID: ENST00000611958
  CDS Start-End: 154-1338
gactctcccctggagcagcgtgactgacaccggctcctattcagctgggaggagggagaggggaggagaaggggagggccgcgggaggagggtacgagtggccgaccacggatttgcattgccgaggacgggaccccagggcagcgaagcagaatggccaacatgcagggactggtggaaagactggaacgagctgtcagccgcctggagtcgctgtctgcagagtcccacaggccccctgggaactgcggggaagtcaatggtgtcattgcaggtgtggcaccctccgtggaagcctttgacaagctgatggacagtatggtggccgagtttttaaagaacagtaggatccttgctggggacgtggagacccatgcagaaatggtgcacagtgctttccaggcccagcgggctttccttctgatggcctctcagtaccaacaaccccacgagaatgacgtggccgcacttctgaaacccatatcggaaaagattcaggaaatccaaactttcagagagagaaaccgggggagtaacatgtttaatcatctttcggccgtcagcgaaagcatccctgcccttggatggatagctgtgtctcccaaacctcctcctctgcctcctccagggccacctccacttttcgagaatgaaggcaaaaaagaggaatcttctccttcacgctcagctttatttgcccaacttaaccagggagaagcaattacaaaagggctccgccatgtcacagatgaccagaagacatacaaaaatcccagcctgcgggctcaaggagggcaaactcaatctcccaccaaaagtcacactccaagtcccacatctcctaaatcttatccttctcaaaaacatgccccagtgttggagttggaaggaaagaaatggagagtggagtaccaagaggacaggaatgaccttgtgatttcagagactgagctgaaacaagtggcttacattttcaaatgcgaaaaatcaactattcagataaaagggaaagtaaactccattataattgacaactgtaaaaaactcggcctggtgtttgacaatgtggtgggcattgtggaagtgatcaactcccaggacattcaaatccaggtaatggggagagtgccaacaatttccattaataagacagaaggttgccacatatacctcagtgaagatgcattagactgtgagatcgtgagcgccaagtcatctgaaatgaacatacttatccctcaggatggtgattatagagaatttcccattcctgaacagttcaagacagcatgggatggatccaagttaatcactgaacctgcagaaattatggcctaacttcctgagagaccgaaccccctcacctgaatccccctctatcaaacaaacaaaaaagcagcagtaaagagctagaagttgcagtagcccctactgctttagctttggcctccaacgattctgtgctatagatacagcactgtttctggcacgcctcgtgggcattttgaaatatttaacgtttcctcatgatttgcctttgtgtgtgattttagttccacatgatgacttgtgaacattagggatttaaaggaaaaaaaaaaagaattctgttcccctcatatcatgaacacagtaactgataggtaaaaagactgcatgattcacttttacacttatatttcattgctagttaaaaaataaaacctttgagaatctaagatgtacatttttaccttttaggcaatttcaatataatgtagaagtagtagtgtgccctgaaaaatgtacacgttttttcttattgttaccacatgttcacctttatcagcgtggatactgtcagcatgagtacatatttcaacccacgcttgtaaaagacataagagtttataaaggaccaaattcagttccttggtccttggaagacctatattctctgtagttactgaaaaccgaaagtcaattctaattattcatcttacatatttttccaccatgtcatttgaaaacttgcttttcttctgcataagagattcttatgccaaaaacattaaacagaagaaatcattttttttgctatgtaatacctcgcaactttgctctaaaatcaagctcagttattattttccaagtttgaacatgttaaatatcagatgccttgtaaattatgtctttaacgttttcttatagactaatttcctcttttccacctgccagacttgctaaccaagctcgaaaatgaacatgaaaaagccatacatgtattatttctcctaaaacctaaggcattatctgttggtttggcttgctgctcctattttgtagtcttgatagtagatgcttcttcagcgtaagagtagctatgatattcctttttatcttttcagtacatagtgctgaaaaatctgcaacttcttggatcatatttaatgaattatagtataatgcttgcaggcccagtacaagcatatatattgtgcctcttacagcctttggaatacattgtttccattttttaaatatcttctatatccatatagtattcaaattattaatgctcatgtaccaaggttttgctataaaagttttgtctgtatgaataatgtggctttagtaaataatcatttttcaactgtaaacttattctgaaataaagtaaaattctaattgtttaaatactgtgatg

SEQ ID NO: 114018 - DNA, 2776 bp, Homo sapiens
  Payload ID: 2280
  Gene Symbol: CAP2
  Gene Name: CAP, adenylate cyclase-associated protein, 2 (yeast)
  ENST ID: ENST00000616440
  CDS Start-End: 244-1428
tcccctttatttccactccccacccgcgtggctttgctctccctctcccccctcagctcgtctgtatttggagctccggaagctgccggcgactctcccctggagcagcgtgactgacaccggctcctattcagctgggaggagggagaggggaggagaaggggagggccgcgggaggagggtacgagtggccgaccacggatttgcattgccgaggacgggaccccagggcagcgaagcagaatggccaacatgcagggactggtggaaagactggaacgagctgtcagccgcctggagtcgctgtctgcagagtcccacaggccccctgggaactgcggggaagtcaatggtgtcattgcaggtgtggcaccctccgtggaagcctttgacaagctgatggacagtatggtggccgagtttttaaagaacagtaggatccttgctggggacgtggagacccatgcagaaatggtgcacagtgctttccaggcccagcgggctttccttctgatggcctctcagtaccaacaaccccacgagaatgacgtggccgcacttctgaaacccatatcggaaaagattcaggaaatccaaactttcagagagagaaaccgggggagtaacatgtttaatcatctttcggccgtcagcgaaagcatccctgcccttggatggatagctgtgcctccaccccctcctcctctgcctcctccagggccacctccacttttcgagaatgaaggcaaaaaagaggaatcttctccttcacgctcagctttatttgcccaacttaaccagggagaagcaattacaaaagggctccgccatgtcacagatgaccagaagacatacaaaaatcccagcctgcgggctcaaggagggcaaactcaatctcccaccaaaagtcacactccaagtcccacatctcctaaatcttatccttctcaaaaacatgccccagtgttggagttggaaggaaagaaatggagagtggagtaccaagaggacaggaatgaccttgtgatttcagagactgagctgaaacaagtggcttacattttcaaatgcgaaaaatcaactattcagataaaagggaaagtaaactccattataattgacaactgtaaaaaactcggcctggtgtttgacaatgtggtgggcattgtggaagtgatcaactcccaggacattcaaatccaggtaatggggagagtgccaacaatttccattaataagacagaaggttgccacatatacctcagtgaagatgcattagactgtgagatcgtgagcgccaagtcatctgaaatgaacatacttatccctcaggatggtgattatagagaatttcccattcctgaacagttcaagacagcatgggatggatccaagttaatcactgaacctgcagaaattatggcctaacttcctgagagaccgaaccccctcacctgaatccccctctatcaaacaaacaaaaaagcagcagtaaagagctagaagttgcagtagcccctactgctttagctttggcctccaacgattctgtgctatagatacagcactgtttctggcacgcctcgtgggcattttgaaatatttaacgtttcctcatgatttgcctttgtgtgtgattttagttccacatgatgacttgtgaacattagggatttaaaggaaaaaaaaaaagaattctgttcccctcatatcatgaacacagtaactgataggtaaaaagactgcatgattcacttttacacttatatttcattgctagttaaaaaataaaacctttgagaatctaagatgtacatttttaccttttaggcaatttcaatataatgtagaagtagtagtgtgccctgaaaaatgtacacgttttttcttattgttaccacatgttcacctttatcagcgtggatactgtcagcatgagtacatatttcaacccacgcttgtaaaagacataagagtttataaaggaccaaattcagttccttggtccttggaagacctatattctctgtagttactgaaaaccgaaagtcaattctaattattcatcttacatatttttccaccatgtcatttgaaaacttgcttttcttctgcataagagattcttatgccaaaaacattaaacagaagaaatcattttttttgctatgtaatacctcgcaactttgctctaaaatcaagctcagttattattttccaagtttgaacatgttaaatatcagatgccttgtaaattatgtctttaacgttttcttatagactaatttcctcttttccacctgccagacttgctaaccaagctcgaaaatgaacatgaaaaagccatacatgtattatttctcctaaaacctaaggcattatctgttggtttggcttgctgctcctattttgtagtcttgatagtagatgcttcttcagcgtaagagtagctatgatattcctttttatcttttcagtacatagtgctgaaaaatctgcaacttcttggatcatatttaatgaattatagtataatgcttgcaggcccagtacaagcatatatattgtgcctcttacagcctttggaatacattgtttccattttttaaatatcttctatatccatatagtattcaaattattaatgctcatgtaccaaggttttgctataaaagttttgtctgtatgaataatgtggctttagtaaataatcatttttcaactgtaaacttattctgaaataaagtaaaattctaattgtttaaatactgtgatg

SEQ ID NO: 114019 - DNA, 5833 bp, Homo sapiens
  Payload ID: 2281
  Gene Symbol: CLIP1
  Gene Name: CAP-GLY domain containing linker protein 1
  Uniprot ID: P30622
  ENST ID: ENST00000302528
  CDS Start-End: 109-4392
agatttaatccagagactgacttcactatagaacccacagttgtatcaatggttggggaaagatagtggcaacaggcaaaggagaaacagctctgacatacaaagaaaatgagtatgctaaagccaagtgggcttaaggcccccaccaagatcctgaagcctggaagcacagctctgaagacacctacggctgttgtagctccagtagaaaaaaccatatccagtgaaaaagcatcaagcactccatcatctgagactcaggaggaatttgtggatgactttcgagttggggagcgagtttgggtgaatggaaataagcctggatttatccagtttcttggagaaacccagtttgcaccaggccagtgggctggaattgttttagatgaacccataggcaagaacgatggttcggtggcaggagttcggtatttccagtgtgaacctttaaagggcatatttacccgaccttcaaagttaacaaggaaggtgcaagcagaagatgaagctaatggcctgcagacaacgcccgcctcccgagctacttcaccgctgtgcacttctacggccagcatggtgtcttcctccccctccaccccttcaaacatccctcagaaaccatcacagccagcagcaaaggaaccttcagctacgcctccgatcagcaaccttacaaaaactgccagtgaatctatctccaacctttcagaggctggctcaatcaagaaaggagaaagagagctcaaaatcggagacagagtattggttggtggcactaaggctggtgtagtccggtttcttggggagaccgactttgccaagggggagtggtgtggcgtggagttagatgagccacttgggaagaatgatggcgctgttgctggaacaaggtattttcagtgtcaacccaaatatggcttgttcgctcctgtccacaaagttaccaagattggcttcccttccactacaccagccaaagccaaggccaacgcagtgaggcgagtgatggcgaccacgtccgccagcctgaagcgcagcccttctgcctcttccctcagctccatgagctcagtggcctcctctgtgagcagcaggcccagtcggacaggactattgactgaaacctcctcccgttacgccaggaagatctccggtaccactgccctccaggaggccctgaaggagaagcagcagcacattgagcagctgctggcggaacgggatctggagagggcggaggtggccaaggccacgagccacgtgggggagatagagcaggagctagctctggcccgggacggacatgaccagcatgtcctggaattggaagccaaaatggaccagctgcgaacaatggtggaagctgctgacagggagaaggtggagcttctcaaccagcttgaagaggagaaaaggaaggttgaggaccttcagttccgggttgaagaagaatcaattaccaaaggtgatcttgagacgcagaccaaactggagcatgcccgcattaaggagcttgaacagagcctgctctttgaaaagaccaaagctgacaaactccagagggagttagaagacactagggtggctacagtttcagaaaagtcacgtataatggaactggagaaagacctagcattgagagtacaggaagtagctgagctccgaagaaggctagagtccaataagcctgctggggatgtggacatgtcactttcccttttgcaagagataagctctttgcaagaaaagttagaagtcacccgtactgaccaccagagagaaataacttctctgaaggagcattttggagcccgggaagaaactcatcagaaggagataaaggctctgtataccgccacggaaaagctttccaaagagaacgagtcattgaaaagcaagctggagcatgccaacaaagagaactcagatgtgatagctctatggaagtccaaactggagactgccatcgcatcccaccagcaggcgatggaagaactgaaggtatctttcagcaaagggcttggaacagagacggcagaatttgctgaactaaaaacacaaatagagaaaatgagactagattaccaacacgaaatagaaaatttgcagaatcaacaagactctgaacgggctgcccatgctaaagagatggaagccttgagggctaaactgatgaaagttattaaagaaaaggaaaacagtctggaagccatcaggtcgaaactggacaaagcagaagaccagcatctcgtagaaatggaagacacgttaaacaaattacaggaagctgaaataaaggtaaaggagctagaggtactgcaagccaaatgcaatgaacaaaccaaggttattgataattttacatcacagctcaaggctactgaagaaaagctcttggatcttgatgcacttcggaaagccagttccgaaggtaaatcggaaatgaagaaacttagacagcagcttgaggcagctgagaaacagattaaacatttagagattgaaaagaatgctgaaagtagcaaggctagtagcattaccagagagctccaggggagagagctaaagcttactaaccttcaggaaaatttgagtgaagtcagtcaagtgaaagagactttggaaaaagaacttcagattttgaaagaaaagtttgctgaagcttcagaggaggcagtctctgttcagagaagtatgcaagaaactgtaaataagttacaccaaaaggaggaacagtttaacatgctgtcttctgacttggagaagctgagagaaaacttagcagatatggaggcaaaatttagagagaaagatgagagagaagagcagctgataaaggcaaaggaaaaactggaaaatgacattgcagaaataatgaagatgtcaggagataactcttctcagctgacaaaaatgaacgatgaattacgtctgaaagaaagagatgtagaagaattacagctaaaacttacaaaggctaatgaaaatgcaagttttctgcaaaaaagtattgaggacatgactgtcaaagctgaacagagccagcaagaagcagctaaaaagcatgaggaagaaaagaaagaattggagaggaaattgtcggacctggaaaagaaaatggaaacaagccacaaccagtgtcaggagctgaaagccaggtatgagagagccacttctgagacaaaaaccaagcatgaagaaatcctacagaacctccagaagacgctgctggacacagaggacaagctgaagggcgcacgggaggagaacagtggcttgctgcaggagctggaggagctgagaaagcaagccgacaaagccaaagctgctcaaacagcggaagatgccatgcagataatggaacagatgaccaaagagaagactgagactctggcctccttggaggacaccaagcaaacaaatgcaaaactacagaatgaattggacacacttaaagaaaacaacttgaaaaatgtggaagagctgaacaaatcaaaagaactcctgactgtagagaatcaaaaaatggaagaatttaggaaagaaatagaaaccctaaagcaggcagcagctcagaagtcccagcagctttcagcgttgcaagaagagaacgttaaacttgctgaggagctggggagaagcagggacgaagtcacaagtcatcaaaagctggaagaagaaagatctgtgctcaataatcagttgttagaaatgaaaaaaagagaatccaagttcataaaagacgcagatgaagagaaagcttccttgcagaaatccatcagtataactagtgccttactcacagaaaaggatgccgagctggagaaactgagaaatgaggtcacagtgctcaggggagaaaacgcctctgccaagtccttgcattcagttgttcagactctagagtctgataaggtgaagctcgagctcaaggtaaagaacttggagcttcaactcaaagaaaacaagaggcagctcagcagctcctcaggtaatacagacactcaggcagacgaggatgaaagagcccaggagagtcagattgatttcctaaattcagtaatagtggaccttcaaaggaagaatcaagacctcaagatgaaggtggagatgatgtcagaagcagccctgaatgggaacggggatgacctaaacaattatgacagtgatgatcaggagaaacagtccaagaagaaacctcgcctcttctgtgacatttgtgactgctttgatctccacgacacagaggattgtcctacccaggcacagatgtcagaggaccctccccattccacacaccatggcagtcggggtgaggaacgcccatactgtgaaatctgtgagatgtttggacactgggccaccaactgcaatgacgacgaaaccttctgatgaagcctccagtggagaactgggcttgctcagacgcactcgcattgacacaacgtaacaccagcattgtgtgtgcagacttcaggagaactcatgttattttttaaccccgtcaacaaatctaggaaaatattttgatcttcaacaaattgccctttagtctccccgtatgagttagaataataaatatttagtaggtgagttttcacctcgaattttgttttcttgatttttacgtttgaagacattgcaccagatgccattacatttattggccccccgaccttgtagaaaaacccctaccctcacaataccttatttaagtaactttaaattatgccgttacttttcatatttgcactaagatatttccaggctgcatttgtatatttagattttttggttaagctttgacactggaatgagttgaaaaaatgtgccattttgcattttcatctactcatttaaagtattttattcttattcaaagaaatatctgagctctttgcactacctgttatcagtagtgcctttacttcaggcttgataatacttaggtgtgattataaaatcatgaagcaggtaaagggaggggcaagcccccaaactgctgtggggacattttataatctatatgctgcacccacttaatctactgtggtgttttgtttattagttttgcataatttcagcttctatatattgtatgtatatattttttaaaaatctatattttgggaaaaaaacatacacaatgtgtctttctttttggacatttacctttttgaaaaagaaaacacttaaaatgatcattaggacataacagactaggccagacatagcatcttgtggctttgcaaccattttcatttgtttgttttccttttatttcttcaccagatttaaataactggaggaattttctccaatttttttttccttctctggcaggtatccccagcagtcaattaacaataagccagtataaaacacctaaataaccaatctacaatctcccttcacaagtttttttactgtttttagatgaatgtacgatgagaaattcaacgttaataattctggattttcttatcacaaaaaagaaaatgaaggacctcaaagcacctgaacagtttatcgaccagtttgaatctatttatcttcatttgaatgtcttctagaatatgtaaaaagtcataaaatgtatcttccatgctacatgtacaataagaacttctataattgtatatatgcctttgatgtattttcccctcaagattatcaactgtgtgttcgacagtgaatattcaatctggtaccagttgaaatttttggttataaatgtaatacgaattgtttcacaaacagaaaacatgtaaagcagtattaaaatttggccaaacaagtgttctgtatctactttaataaatggttattcttt

SEQ ID NO: 114020 - DNA, 5880 bp, Homo sapiens
  Payload ID: 2281
  Gene Symbol: CLIP1
  Gene Name: CAP-GLY domain containing linker protein 1
  Uniprot ID: P30622
  ENST ID: ENST00000358808
  CDS Start-End: 156-4439
gctgctgctgcagtgggacaggtggcggcgaccggcggcgtccgaggagatttaatccagagactgacttcactatagaacccacagttgtatcaatggttggggaaagatagtggcaacaggcaaaggagaaacagctctgacatacaaagaaaatgagtatgctaaagccaagtgggcttaaggcccccaccaagatcctgaagcctggaagcacagctctgaagacacctacggctgttgtagctccagtagaaaaaaccatatccagtgaaaaagcatcaagcactccatcatctgagactcaggaggaatttgtggatgactttcgagttggggagcgagtttgggtgaatggaaataagcctggatttatccagtttcttggagaaacccagtttgcaccaggccagtgggctggaattgttttagatgaacccataggcaagaacgatggttcggtggcaggagttcggtatttccagtgtgaacctttaaagggcatatttacccgaccttcaaagttaacaaggaaggtgcaagcagaagatgaagctaatggcctgcagacaacgcccgcctcccgagctacttcaccgctgtgcacttctacggccagcatggtgtcttcctccccctccaccccttcaaacatccctcagaaaccatcacagccagcagcaaaggaaccttcagctacgcctccgatcagcaaccttacaaaaactgccagtgaatctatctccaacctttcagaggctggctcaatcaagaaaggagaaagagagctcaaaatcggagacagagtattggttggtggcactaaggctggtgtagtccggtttcttggggagaccgactttgccaagggggagtggtgtggcgtggagttagatgagccacttgggaagaatgatggcgctgttgctggaacaaggtattttcagtgtcaacccaaatatggcttgttcgctcctgtccacaaagttaccaagattggcttcccttccactacaccagccaaagccaaggccaacgcagtgaggcgagtgatggcgaccacgtccgccagcctgaagcgcagcccttctgcctcttccctcagctccatgagctcagtggcctcctctgtgagcagcaggcccagtcggacaggactattgactgaaacctcctcccgttacgccaggaagatctccggtaccactgccctccaggaggccctgaaggagaagcagcagcacattgagcagctgctggcggaacgggatctggagagggcggaggtggccaaggccacgagccacgtgggggagatagagcaggagctagctctggcccgggacggacatgaccagcatgtcctggaattggaagccaaaatggaccagctgcgaacaatggtggaagctgctgacagggagaaggtggagcttctcaaccagcttgaagaggagaaaaggaaggttgaggaccttcagttccgggttgaagaagaatcaattaccaaaggtgatcttgagacgcagaccaaactggagcatgcccgcattaaggagcttgaacagagcctgctctttgaaaagaccaaagctgacaaactccagagggagttagaagacactagggtggctacagtttcagaaaagtcacgtataatggaactggagaaagacctagcattgagagtacaggaagtagctgagctccgaagaaggctagagtccaataagcctgctggggatgtggacatgtcactttcccttttgcaagagataagctctttgcaagaaaagttagaagtcacccgtactgaccaccagagagaaataacttctctgaaggagcattttggagcccgggaagaaactcatcagaaggagataaaggctctgtataccgccacggaaaagctttccaaagagaacgagtcattgaaaagcaagctggagcatgccaacaaagagaactcagatgtgatagctctatggaagtccaaactggagactgccatcgcatcccaccagcaggcgatggaagaactgaaggtatctttcagcaaagggcttggaacagagacggcagaatttgctgaactaaaaacacaaatagagaaaatgagactagattaccaacacgaaatagaaaatttgcagaatcaacaagactctgaacgggctgcccatgctaaagagatggaagccttgagggctaaactgatgaaagttattaaagaaaaggaaaacagtctggaagccatcaggtcgaaactggacaaagcagaagaccagcatctcgtagaaatggaagacacgttaaacaaattacaggaagctgaaataaaggtaaaggagctagaggtactgcaagccaaatgcaatgaacaaaccaaggttattgataattttacatcacagctcaaggctactgaagaaaagctcttggatcttgatgcacttcggaaagccagttccgaaggtaaatcggaaatgaagaaacttagacagcagcttgaggcagctgagaaacagattaaacatttagagattgaaaagaatgctgaaagtagcaaggctagtagcattaccagagagctccaggggagagagctaaagcttactaaccttcaggaaaatttgagtgaagtcagtcaagtgaaagagactttggaaaaagaacttcagattttgaaagaaaagtttgctgaagcttcagaggaggcagtctctgttcagagaagtatgcaagaaactgtaaataagttacaccaaaaggaggaacagtttaacatgctgtcttctgacttggagaagctgagagaaaacttagcagatatggaggcaaaatttagagagaaagatgagagagaagagcagctgataaaggcaaaggaaaaactggaaaatgacattgcagaaataatgaagatgtcaggagataactcttctcagctgacaaaaatgaacgatgaattacgtctgaaagaaagagatgtagaagaattacagctaaaacttacaaaggctaatgaaaatgcaagttttctgcaaaaaagtattgaggacatgactgtcaaagctgaacagagccagcaagaagcagctaaaaagcatgaggaagaaaagaaagaattggagaggaaattgtcggacctggaaaagaaaatggaaacaagccacaaccagtgtcaggagctgaaagccaggtatgagagagccacttctgagacaaaaaccaagcatgaagaaatcctacagaacctccagaagacgctgctggacacagaggacaagctgaagggcgcacgggaggagaacagtggcttgctgcaggagctggaggagctgagaaagcaagccgacaaagccaaagctgctcaaacagcggaagatgccatgcagataatggaacagatgaccaaagagaagactgagactctggcctccttggaggacaccaagcaaacaaatgcaaaactacagaatgaattggacacacttaaagaaaacaacttgaaaaatgtggaagagctgaacaaatcaaaagaactcctgactgtagagaatcaaaaaatggaagaatttaggaaagaaatagaaaccctaaagcaggcagcagctcagaagtcccagcagctttcagcgttgcaagaagagaacgttaaacttgctgaggagctggggagaagcagggacgaagtcacaagtcatcaaaagctggaagaagaaagatctgtgctcaataatcagttgttagaaatgaaaaaaagagaatccaagttcataaaagacgcagatgaagagaaagcttccttgcagaaatccatcagtataactagtgccttactcacagaaaaggatgccgagctggagaaactgagaaatgaggtcacagtgctcaggggagaaaacgcctctgccaagtccttgcattcagttgttcagactctagagtctgataaggtgaagctcgagctcaaggtaaagaacttggagcttcaactcaaagaaaacaagaggcagctcagcagctcctcaggtaatacagacactcaggcagacgaggatgaaagagcccaggagagtcagattgatttcctaaattcagtaatagtggaccttcaaaggaagaatcaagacctcaagatgaaggtggagatgatgtcagaagcagccctgaatgggaacggggatgacctaaacaattatgacagtgatgatcaggagaaacagtccaagaagaaacctcgcctcttctgtgacatttgtgactgctttgatctccacgacacagaggattgtcctacccaggcacagatgtcagaggaccctccccattccacacaccatggcagtcggggtgaggaacgcccatactgtgaaatctgtgagatgtttggacactgggccaccaactgcaatgacgacgaaaccttctgatgaagcctccagtggagaactgggcttgctcagacgcactcgcattgacacaacgtaacaccagcattgtgtgtgcagacttcaggagaactcatgttattttttaaccccgtcaacaaatctaggaaaatattttgatcttcaacaaattgccctttagtctccccgtatgagttagaataataaatatttagtaggtgagttttcacctcgaattttgttttcttgatttttacgtttgaagacattgcaccagatgccattacatttattggccccccgaccttgtagaaaaacccctaccctcacaataccttatttaagtaactttaaattatgccgttacttttcatatttgcactaagatatttccaggctgcatttgtatatttagattttttggttaagctttgacactggaatgagttgaaaaaatgtgccattttgcattttcatctactcatttaaagtattttattcttattcaaagaaatatctgagctctttgcactacctgttatcagtagtgcctttacttcaggcttgataatacttaggtgtgattataaaatcatgaagcaggtaaagggaggggcaagcccccaaactgctgtggggacattttataatctatatgctgcacccacttaatctactgtggtgttttgtttattagttttgcataatttcagcttctatatattgtatgtatatattttttaaaaatctatattttgggaaaaaaacatacacaatgtgtctttctttttggacatttacctttttgaaaaagaaaacacttaaaatgatcattaggacataacagactaggccagacatagcatcttgtggctttgcaaccattttcatttgtttgttttccttttatttcttcaccagatttaaataactggaggaattttctccaatttttttttccttctctggcaggtatccccagcagtcaattaacaataagccagtataaaacacctaaataaccaatctacaatctcccttcacaagtttttttactgtttttagatgaatgtacgatgagaaattcaacgttaataattctggattttcttatcacaaaaaagaaaatgaaggacctcaaagcacctgaacagtttatcgaccagtttgaatctatttatcttcatttgaatgtcttctagaatatgtaaaaagtcataaaatgtatcttccatgctacatgtacaataagaacttctataattgtatatatgcctttgatgtattttcccctcaagattatcaactgtgtgttcgacagtgaatattcaatctggtaccagttgaaatttttggttataaatgtaatacgaattgtttcacaaacagaaaacatgtaaagcagtattaaaatttggccaaacaagtgttctgtatctactttaataaatggttattcttt

SEQ ID NO: 114021 - DNA, 5568 bp, Homo sapiens
  Payload ID: 2281
  Gene Symbol: CLIP1
  Gene Name: CAP-GLY domain containing linker protein 1
  ENST ID: ENST00000361654
  CDS Start-End: 175-4125
ggcggcggccgcggcggctgctgctgctgcagtgggacaggtggcggcgaccggcggcgtccgaggagatttaatccagagactgacttcactatagaacccacagttgtatcaatggttggggaaagatagtggcaacaggcaaaggagaaacagctctgacatacaaagaaaatgagtatgctaaagccaagtgggcttaaggcccccaccaagatcctgaagcctggaagcacagctctgaagacacctacggctgttgtagctccagtagaaaaaaccatatccagtgaaaaagcatcaagcactccatcatctgagactcaggaggaatttgtggatgactttcgagttggggagcgagtttgggtgaatggaaataagcctggatttatccagtttcttggagaaacccagtttgcaccaggccagtgggctggaattgttttagatgaacccataggcaagaacgatggttcggtggcaggagttcggtatttccagtgtgaacctttaaagggcatatttacccgaccttcaaagttaacaaggaaggtgcaagcagaagatgaagctaatggcctgcagacaacgcccgcctcccgagctacttcaccgctgtgcacttctacggccagcatggtgtcttcctccccctccaccccttcaaacatccctcagaaaccatcacagccagcagcaaaggaaccttcagctacgcctccgatcagcaaccttacaaaaactgccagtgaatctatctccaacctttcagaggctggctcaatcaagaaaggagaaagagagctcaaaatcggagacagagtattggttggtggcactaaggctggtgtagtccggtttcttggggagaccgactttgccaagggggagtggtgtggcgtggagttagatgagccacttgggaagaatgatggcgctgttgctggaacaaggtattttcagtgtcaacccaaatatggcttgttcgctcctgtccacaaagttaccaagattggcttcccttccactacaccagccaaagccaaggccaacgcagtgaggcgagtgatggcgaccacgtccgccagcctgaagcgcagcccttctgcctcttccctcagctccatgagctcagtggcctcctctgtgagcagcaggcccagtcggacaggactattgactgaaacctcctcccgttacgccaggaagatctccggtaccactgccctccaggaggccctgaaggagaagcagcagcacattgagcagctgctggcggaacgggatctggagagggcggaggtggccaaggccacgagccacgtgggggagatagagcaggagctagctctggcccgggacggacatgaccagcatgtcctggaattggaagccaaaatggaccagctgcgaacaatggtggaagctgctgacagggagaaggtggagcttctcaaccagcttgaagaggagaaaaggaaggttgaggaccttcagttccgggttgaagaagaatcaattaccaaaggtgatcttgaggtggctacagtttcagaaaagtcacgtataatggaactggagaaagacctagcattgagagtacaggaagtagctgagctccgaagaaggctagagtccaataagcctgctggggatgtggacatgtcactttcccttttgcaagagataagctctttgcaagaaaagttagaagtcacccgtactgaccaccagagagaaataacttctctgaaggagcattttggagcccgggaagaaactcatcagaaggagataaaggctctgtataccgccacggaaaagctttccaaagagaacgagtcattgaaaagcaagctggagcatgccaacaaagagaactcagatgtgatagctctatggaagtccaaactggagactgccatcgcatcccaccagcaggcgatggaagaactgaaggtatctttcagcaaagggcttggaacagagacggcagaatttgctgaactaaaaacacaaatagagaaaatgagactagattaccaacacgaaatagaaaatttgcagaatcaacaagactctgaacgggctgcccatgctaaagagatggaagccttgagggctaaactgatgaaagttattaaagaaaaggaaaacagtctggaagccatcaggtcgaaactggacaaagcagaagaccagcatctcgtagaaatggaagacacgttaaacaaattacaggaagctgaaataaaggctagtagcattaccagagagctccaggggagagagctaaagcttactaaccttcaggaaaatttgagtgaagtcagtcaagtgaaagagactttggaaaaagaacttcagattttgaaagaaaagtttgctgaagcttcagaggaggcagtctctgttcagagaagtatgcaagaaactgtaaataagttacaccaaaaggaggaacagtttaacatgctgtcttctgacttggagaagctgagagaaaacttagcagatatggaggcaaaatttagagagaaagatgagagagaagagcagctgataaaggcaaaggaaaaactggaaaatgacattgcagaaataatgaagatgtcaggagataactcttctcagctgacaaaaatgaacgatgaattacgtctgaaagaaagagatgtagaagaattacagctaaaacttacaaaggctaatgaaaatgcaagttttctgcaaaaaagtattgaggacatgactgtcaaagctgaacagagccagcaagaagcagctaaaaagcatgaggaagaaaagaaagaattggagaggaaattgtcggacctggaaaagaaaatggaaacaagccacaaccagtgtcaggagctgaaagccaggtatgagagagccacttctgagacaaaaaccaagcatgaagaaatcctacagaacctccagaagacgctgctggacacagaggacaagctgaagggcgcacgggaggagaacagtggcttgctgcaggagctggaggagctgagaaagcaagccgacaaagccaaagctgctcaaacagcggaagatgccatgcagataatggaacagatgaccaaagagaagactgagactctggcctccttggaggacaccaagcaaacaaatgcaaaactacagaatgaattggacacacttaaagaaaacaacttgaaaaatgtggaagagctgaacaaatcaaaagaactcctgactgtagagaatcaaaaaatggaagaatttaggaaagaaatagaaaccctaaagcaggcagcagctcagaagtcccagcagctttcagcgttgcaagaagagaacgttaaacttgctgaggagctggggagaagcagggacgaagtcacaagtcatcaaaagctggaagaagaaagatctgtgctcaataatcagttgttagaaatgaaaaaaagagaatccaagttcataaaagacgcagatgaagagaaagcttccttgcagaaatccatcagtataactagtgccttactcacagaaaaggatgccgagctggagaaactgagaaatgaggtcacagtgctcaggggagaaaacgcctctgccaagtccttgcattcagttgttcagactctagagtctgataaggtgaagctcgagctcaaggtaaagaacttggagcttcaactcaaagaaaacaagaggcagctcagcagctcctcaggtaatacagacactcaggcagacgaggatgaaagagcccaggagagtcagattgatttcctaaattcagtaatagtggaccttcaaaggaagaatcaagacctcaagatgaaggtggagatgatgtcagaagcagccctgaatgggaacggggatgacctaaacaattatgacagtgatgatcaggagaaacagtccaagaagaaacctcgcctcttctgtgacatttgtgactgctttgatctccacgacacagaggattgtcctacccaggcacagatgtcagaggaccctccccattccacacaccatggcagtcggggtgaggaacgcccatactgtgaaatctgtgagatgtttggacactgggccaccaactgcaatgacgacgaaaccttctgatgaagcctccagtggagaactgggcttgctcagacgcactcgcattgacacaacgtaacaccagcattgtgtgtgcagacttcaggagaactcatgttattttttaaccccgtcaacaaatctaggaaaatattttgatcttcaacaaattgccctttagtctccccgtatgagttagaataataaatatttagtaggtgagttttcacctcgaattttgttttcttgatttttacgtttgaagacattgcaccagatgccattacatttattggccccccgaccttgtagaaaaacccctaccctcacaataccttatttaagtaactttaaattatgccgttacttttcatatttgcactaagatatttccaggctgcatttgtatatttagattttttggttaagctttgacactggaatgagttgaaaaaatgtgccattttgcattttcatctactcatttaaagtattttattcttattcaaagaaatatctgagctctttgcactacctgttatcagtagtgcctttacttcaggcttgataatacttaggtgtgattataaaatcatgaagcaggtaaagggaggggcaagcccccaaactgctgtggggacattttataatctatatgctgcacccacttaatctactgtggtgttttgtttattagttttgcataatttcagcttctatatattgtatgtatatattttttaaaaatctatattttgggaaaaaaacatacacaatgtgtctttctttttggacatttacctttttgaaaaagaaaacacttaaaatgatcattaggacataacagactaggccagacatagcatcttgtggctttgcaaccattttcatttgtttgttttccttttatttcttcaccagatttaaataactggaggaattttctccaatttttttttccttctctggcaggtatccccagcagtcaattaacaataagccagtataaaacacctaaataaccaatctacaatctcccttcacaagtttttttactgtttttagatgaatgtacgatgagaaattcaacgttaataattctggattttcttatcacaaaaaagaaaatgaaggacctcaaagcacctgaacagtttatcgaccagtttgaatctatttatcttcatttgaatgtcttctagaatatgtaaaaagtcataaaatgtatcttccatgctacatgtacaataagaacttctataattgtatatatgcctttgatgtattttcccctcaagattatcaactgtgtgttcgacagtgaatattcaatctggtaccagttgaaatttttggttataaatgtaatacgaattgtttcacaaacagaaaacatgtaaagcagtattaaaatttggccaaacaagtgttctgtatctactttaataaatggttattcttttt

SEQ ID NO: 114022 - DNA, 2592 bp, Homo sapiens
  Payload ID: 2281
  Gene Symbol: CLIP1
  Gene Name: CAP-GLY domain containing linker protein 1
  ENST ID: ENST00000540539
  CDS Start-End: 2032-2385
cattcagatggacgtgacaggcattctaacccaggagttagcaggcctgagggagagcacgtgaagggcaaggctggtgtctgtgagaccctgtagggtcccgcaaggggacacaaactcatccacatgtgctgaaagtggtgcatctgggaagtccacaggaaaatgagttttgaacacaggccctttcactgcagtttagattgtgattaaaaatatacatatattctccctccacttgtttttttttttttttcctcaaatataaggtaatacagacactcaggcagacgaggatgaaagagcccaggagagtcaggtaatgttcctgccttattgctttactttcttgctgtttttcaaaatcattgaatcttttcgtttattttccttctcatttgatgccttttgtatcatttagtcttttgaattggtaatgcattcctctagtccaaacattaaacagaattaaaaatatatacattaaatgtcttcctccaaaccttctctctcttctgctcagttcccaaccctgcaaacagttaattactgttatttgtgtctttccttttcagagattttttaaagtgtgtatacaagccagcactaatacagtcttccctcccttttttttttttaacataaataatggcatactacataaacggttctgcacttattttttttatagctatgtagtgttccattacgtggatttactataatttagtcagttccctattggttgacaatgacactgggatgtttctgatcctttgggtgtattataaacaatgccgtaaggaattatcttgggcagctatcattttatatattagtatttctgcaggatgaattcctagaagtagaattgctctgtcaaagggtttgttactcatctgaaccttaaaaagactggtttcttgaaaactcagtctcttaaagcgaaaattaacaaaacaactttagttttaaactaaaaatgggattaggccaggaatggtggcttatccctgtaattccagcactttgggaggccaaggtgggatgattgcttgagcccaaaagtttgagaccaacctggacatagcgagacctcatctctacaaaaaaaaaaaaacaaaaaaaacaaaaaacaatcctgcagcctgagtgacagagcaacaccctgtctcaaaacaattacttaattaaaaaaaagtttttaagggcctgggccaggtgcagtggctcacgcctataattccagctttttggaaggctgtggcaagcggactgtttgagatcaggagatcgagaccagcctgagcaacaatggcaagaccccatctctacaaaaaataaaattagttaggcatggcgccatgctcccatagtcccagttaccccagaagctgaggcaggaggatcacttgagtccagaaggttgaggctgcagtgagccatgatcatgccaccgcacttaggcctgactgacaaagcaagaacctgtctcagaaaaaaaaaaggtggggtggggggcccgggcacagcagctcacacctgcaatcccagcactttggtaggccaaggtaggcagatcgctggagcccgagaccagcctgcgcaacatgggcactccaagctgggtgacagagcaaggccctgtctcaaaacaaacaaaaatttgtaaaaagggattatataaaggcaaactattctgtacttggaaatataattgtatatagcaacaaacatctgtcttttaattttaatatactttgtatgtattagtcatgttcaaaattcaaaagtacaaaagccacattttatatttaaataaaagaaaaactcaccttgagatgttagttgccagacacctcctttgaggggcacaaaacgattcaacactgtacaaacttaccatggattagcattgtcctctttgtatgtctactgggcttaataactaacagtgtcttctcttcccccttcctttctgcttcggtttgtttcatctgctgctgacaacacttttcttccaatcagcaaatgattgatttcctaaattcagtaatagtggaccttcaaaggaagaatcaagacctcaagatgaaggtggagatgatgtcagaagcagccctgaatgggaacggggatgacctaaacaattatgacagtgatgatcaggagaaacagtccaagaagaaacctcgcctcttctgtgacatttgtgactgctttgatctccacgacacagaggattgtcctacccaggcacagatgtcagaggaccctccccattccacacaccatggcagtcggggtgaggaacgcccatactgtgaaatctgtgagatgtttggacactgggccaccaactgcaatgacgacgaaaccttctgatgaagcctccagtggagaactgggcttgctcagacgcactcgcattgacacaacgtaacaccagcattgtgtgtgcagacttcaggagaactcatgttattttttaaccccgtcaacaaatctaggaaaatattttgatcttcaacaaattgccctttagtctccccgtatgagttagaataataaatatttagtaggtgagttttc

SEQ ID NO: 114023 - DNA, 2554 bp, Homo sapiens
  Payload ID: 2281
  Gene Symbol: CLIP1
  Gene Name: CAP-GLY domain containing linker protein 1
  ENST ID: ENST00000540304
  CDS Start-End: 145-2554
tgagctgatgcctgccccgattctacagacaccatgagatttaatccagagactgacttcactatagaacccacagttgtatcaatggttggggaaagatagtggcaacaggcaaaggagaaacagctctgacatacaaagaaaatgagtatgctaaagccaagtgggcttaaggcccccaccaagatcctgaagcctggaagcacagctctgaagacacctacggctgttgtagctccagtagaaaaaaccatatccagtgaaaaagcatcaagcactccatcatctgagactcaggaggaatttgtggatgactttcgagttggggagcgagtttgggtgaatggaaataagcctggatttatccagtttcttggagaaacccagtttgcaccaggccagtgggctggaattgttttagatgaacccataggcaagaacgatggttcggtggcaggagttcggtatttccagtgtgaacctttaaagggcatatttacccgaccttcaaagttaacaaggaaggtgcaagcagaagatgaagctaatggcctgcagacaacgcccgcctcccgagctacttcaccgctgtgcacttctacggccagcatggtgtcttcctccccctccaccccttcaaacatccctcagaaaccatcacagccagcagcaaaggaaccttcagctacgcctccgatcagcaaccttacaaaaactgccagtgaatctatctccaacctttcagaggctggctcaatcaagaaaggagaaagagagctcaaaatcggagacagagtattggttggtggcactaaggctggtgtagtccggtttcttggggagaccgactttgccaagggggagtggtgtggcgtggagttagatgagccacttgggaagaatgatggcgctgttgctggaacaaggtattttcagtgtcaacccaaatatggcttgttcgctcctgtccacaaagttaccaagattggcttcccttccactacaccagccaaagccaaggccaacgcagtgaggcgagtgatggcgaccacgtccgccagcctgaagcgcagcccttctgcctcttccctcagctccatgagctcagtggcctcctctgtgagcagcaggcccagtcggacaggactacatgtcctggaattggaagccaaaatggaccagctgcgaacaatggtggaagctgctgacagggagaaggtggagcttctcaaccagcttgaagaggagaaaaggaaggttgaggaccttcagttccgggttgaagaagaatcaattaccaaaggtgatcttgagacgcagaccaaactggagcatgcccgcattaaggagcttgaacagagcctgctctttgaaaagaccaaagctgacaaactccagagggagttagaagacactagggtggctacagtttcagaaaagtcacgtataatggaactggagaaagacctagcattgagagtacaggaagtagctgagctccgaagaaggctagagtccaataagcctgctggggatgtggacatgtcactttcccttttgcaagagataagctctttgcaagaaaagttagaagtcacccgtactgaccaccagagagaaataacttctctgaaggagcattttggagcccgggaagaaactcatcagaaggagataaaggctctgtataccgccacggaaaagctttccaaagagaacgagtcattgaaaagcaagctggagcatgccaacaaagagaactcagatgtgatagctctatggaagtccaaactggagactgccatcgcatcccaccagcaggcgatggaagaactgaaggtatctttcagcaaagggcttggaacagagacggcagaatttgctgaactaaaaacacaaatagagaaaatgagactagattaccaacacgaaatagaaaatttgcagaatcaacaagactctgaacgggctgcccatgctaaagagatggaagccttgagggctaaactgatgaaagttattaaagaaaaggaaaacagtctggaagccatcaggtcgaaactggacaaagcagaagaccagcatctcgtagaaatggaagacacgttaaacaaattacaggaagctgaaataaaggctagtagcattaccagagagctccaggggagagagctaaagcttactaaccttcaggaaaatttgagtgaagtcagtcaagtgaaagagactttggaaaaagaacttcagattttgaaagaaaagtttgctgaagcttcagaggaggcagtctctgttcagagaagtatgcaagaaactgtaaataagttacaccaaaaggaggaacagtttaacatgctgtcttctgacttggagaagctgagagaaaacttagcagatatggaggcaaaatttagagagaaagatgagagagaagagcagctgataaaggcaaaggaaaaactggaaaatgacattgcagaaataatgaagatgtcaggagataactcttctcagctgacaaaaatgaacgatgaattacgtctgaaagaaaggt

SEQ ID NO: 114024 - DNA, 4633 bp, Homo sapiens
  Payload ID: 2281
  Gene Symbol: CLIP1
  Gene Name: CAP-GLY domain containing linker protein 1
  ENST ID: ENST00000545889
  CDS Start-End: 151-3192
cttgggaagaatgatggcgctgttgctggaacaaggtattttcagtgtcaacccaaatatggcttgttcgctcctgtccacaaagttaccaagattggcttcccttccactacaccagccaaagccaaggccaacgcagtgaggcgagtgatggcgaccacgtccgccagcctgaagcgcagcccttctgcctcttccctcagctccatgagctcagtggcctcctctgtgagcagcaggcccagtcggacaggactattgactgaaacctcctcccgttacgccaggaagatctccggtaccactgccctccaggaggccctgaaggagaagcagcagcacattgagcagctgctggcggaacgggatctggagagggcggaggtggccaaggccacgagccacgtgggggagatagagcaggagctagctctggcccgggacggacatgaccagcatgtcctggaattggaagccaaaatggaccagctgcgaacaatggtggaagctgctgacagggagaaggtggagcttctcaaccagcttgaagaggagaaaaggaaggttgaggaccttcagttccgggttgaagaagaatcaattaccaaaggtgatcttgagacgcagaccaaactggagcatgcccgcattaaggagcttgaacagagcctgctctttgaaaagaccaaagctgacaaactccagagggagttagaagacactagggtggctacagtttcagaaaagtcacgtataatggaactggagaaagacctagcattgagagtacaggaagtagctgagctccgaagaaggctagagtccaataagcctgctggggatgtggacatgtcactttcccttttgcaagagataagctctttgcaagaaaagttagaagtcacccgtactgaccaccagagagaaataacttctctgaaggagcattttggagcccgggaagaaactcatcagaaggagataaaggctctgtataccgccacggaaaagctttccaaagagaacgagtcattgaaaagcaagctggagcatgccaacaaagagaactcagatgtgatagctctatggaagtccaaactggagactgccatcgcatcccaccagcaggcgatggaagaactgaaggtatctttcagcaaagggcttggaacagagacggcagaatttgctgaactaaaaacacaaatagagaaaatgagactagattaccaacacgaaatagaaaatttgcagaatcaacaagactctgaacgggctgcccatgctaaagagatggaagccttgagggctaaactgatgaaagttattaaagaaaaggaaaacagtctggaagccatcaggtcgaaactggacaaagcagaagaccagcatctcgtagaaatggaagacacgttaaacaaattacaggaagctgaaataaagaaagaaaagtttgctgaagcttcagaggaggcagtctctgttcagagaagtatgcaagaaactgtaaataagttacaccaaaaggaggaacagtttaacatgctgtcttctgacttggagaagctgagagaaaacttagcagatatggaggcaaaatttagagagaaagatgagagagaagagcagctgataaaggcaaaggaaaaactggaaaatgacattgcagaaataatgaagatgtcaggagataactcttctcagctgacaaaaatgaacgatgaattacgtctgaaagaaagagatgtagaagaattacagctaaaacttacaaaggctaatgaaaatgcaagttttctgcaaaaaagtattgaggacatgactgtcaaagctgaacagagccagcaagaagcagctaaaaagcatgaggaagaaaagaaagaattggagaggaaattgtcggacctggaaaagaaaatggaaacaagccacaaccagtgtcaggagctgaaagccaggtatgagagagccacttctgagacaaaaaccaagcatgaagaaatcctacagaacctccagaagacgctgctggacacagaggacaagctgaagggcgcacgggaggagaacagtggcttgctgcaggagctggaggagctgagaaagcaagccgacaaagccaaagctgctcaaacagcggaagatgccatgcagataatggaacagatgaccaaagagaagactgagactctggcctccttggaggacaccaagcaaacaaatgcaaaactacagaatgaattggacacacttaaagaaaacaacttgaaaaatgtggaagagctgaacaaatcaaaagaactcctgactgtagagaatcaaaaaatggaagaatttaggaaagaaatagaaaccctaaagcaggcagcagctcagaagtcccagcagctttcagcgttgcaagaagagaacgttaaacttgctgaggagctggggagaagcagggacgaagtcacaagtcatcaaaagctggaagaagaaagatctgtgctcaataatcagttgttagaaatgaaaaaaagagaatccaagttcataaaagacgcagatgaagagaaagcttccttgcagaaatccatcagtataactagtgccttactcacagaaaaggatgccgagctggagaaactgagaaatgaggtcacagtgctcaggggagaaaacgcctctgccaagtccttgcattcagttgttcagactctagagtctgataaggtgaagctcgagctcaaggtaaagaacttggagcttcaactcaaagaaaacaagaggcagctcagcagctcctcaggtaatacagacactcaggcagacgaggatgaaagagcccaggagagtcagattgatttcctaaattcagtaatagtggaccttcaaaggaagaatcaagacctcaagatgaaggtggagatgatgtcagaagcagccctgaatgggaacggggatgacctaaacaattatgacagtgatgatcaggagaaacagtccaagaagaaacctcgcctcttctgtgacatttgtgactgctttgatctccacgacacagaggattgtcctacccaggcacagatgtcagaggaccctccccattccacacaccatggcagtcggggtgaggaacgcccatactgtgaaatctgtgagatgtttggacactgggccaccaactgcaatgacgacgaaaccttctgatgaagcctccagtggagaactgggcttgctcagacgcactcgcattgacacaacgtaacaccagcattgtgtgtgcagacttcaggagaactcatgttattttttaaccccgtcaacaaatctaggaaaatattttgatcttcaacaaattgccctttagtctccccgtatgagttagaataataaatatttagtaggtgagttttcacctcgaattttgttttcttgatttttacgtttgaagacattgcaccagatgccattacatttattggccccccgaccttgtagaaaaacccctaccctcacaataccttatttaagtaactttaaattatgccgttacttttcatatttgcactaagatatttccaggctgcatttgtatatttagattttttggttaagctttgacactggaatgagttgaaaaaatgtgccattttgcattttcatctactcatttaaagtattttattcttattcaaagaaatatctgagctctttgcactacctgttatcagtagtgcctttacttcaggcttgataatacttaggtgtgattataaaatcatgaagcaggtaaagggaggggcaagcccccaaactgctgtggggacattttataatctatatgctgcacccacttaatctactgtggtgttttgtttattagttttgcataatttcagcttctatatattgtatgtatatattttttaaaaatctatattttgggaaaaaaacatacacaatgtgtctttctttttggacatttacctttttgaaaaagaaaacacttaaaatgatcattaggacataacagactaggccagacatagcatcttgtggctttgcaaccattttcatttgtttgttttccttttatttcttcaccagatttaaataactggaggaattttctccaatttttttttccttctctggcaggtatccccagcagtcaattaacaataagccagtataaaacacctaaataaccaatctacaatctcccttcacaagtttttttactgtttttagatgaatgtacgatgagaaattcaacgttaataattctggattttcttatcacaaaaaagaaaatgaaggacctcaaagcacctgaacagtttatcgaccagtttgaatctatttatcttcatttgaatgtcttctagaatatgtaaaaagtcataaaatgtatcttccatgctacatgtacaataagaacttctataattgtatatatgcctttgatgtattttcccctcaagattatcaactgtgtgttcgacagtgaatattcaatctggtaccagttgaaatttttggttataaatgtaatacgaattgtttcacaaacagaaaacatgtaaagcagtattaaaatttggccaaacaagtgttctgtatctactttaataaatggttattcttt

SEQ ID NO: 114025 - DNA, 4400 bp, Homo sapiens
  Payload ID: 2281
  Gene Symbol: CLIP1
  Gene Name: CAP-GLY domain containing linker protein 1
  Uniprot ID: P30622
  ENST ID: ENST00000540338
  CDS Start-End: 43-4359
tggcaacaggcaaaggagaaacagctctgacatacaaagaaaatgagtatgctaaagccaagtgggcttaaggcccccaccaagatcctgaagcctggaagcacagctctgaagacacctacggctgttgtagctccagtagaaaaaaccatatccagtgaaaaagcatcaagcactccatcatctgagactcaggaggaatttgtggatgactttcgagttggggagcgagtttgggtgaatggaaataagcctggatttatccagtttcttggagaaacccagtttgcaccaggccagtgggctggaattgttttagatgaacccataggcaagaacgatggttcggtggcaggagttcggtatttccagtgtgaacctttaaagggcatatttacccgaccttcaaagttaacaaggaaggtgcaagcagaagatgaagctaatggcctgcagacaacgcccgcctcccgagctacttcaccgctgtgcacttctacggccagcatggtgtcttcctccccctccaccccttcaaacatccctcagaaaccatcacagccagcagcaaaggaaccttcagctacgcctccgatcagcaaccttacaaaaactgccagtgaatctatctccaacctttcagaggctggctcaatcaagaaaggagaaagagagctcaaaatcggagacagagtattggttggtggcactaaggctggtgtagtccggtttcttggggagaccgactttgccaagggggagtggtgtggcgtggagttagatgagccacttgggaagaatgatggcgctgttgctggaacaaggtattttcagtgtcaacccaaatatggcttgttcgctcctgtccacaaagttaccaagattggcttcccttccactacaccagccaaagccaaggccaacgcagtgaggcgagtgatggcgaccacgtccgccagcctgaagcgcagcccttctgcctcttccctcagctccatgagctcagtggcctcctctgtgagcagcaggcccagtcggacaggactattgactgaaacctcctcccgttacgccaggaagatctccggtaccactgccctccaggaggccctgaaggagaagcagcagcacattgagcagctgctggcggaacgggatctggagagggcggaggtggccaaggccacgagccacgtgggggagatagagcaggagctagctctggcccgggacggacatgaccagcatgtcctggaattggaagccaaaatggaccagctgcgaacaatggtggaagctgctgacagggagaaggtggagcttctcaaccagcttgaagaggagaaaaggaaggttgaggaccttcagttccgggttgaagaagaatcaattaccaaaggtgatcttgagcaaaagagccagatttctgaagatcctgagaatacgcagaccaaactggagcatgcccgcattaaggagcttgaacagagcctgctctttgaaaagaccaaagctgacaaactccagagggagttagaagacactagggtggctacagtttcagaaaagtcacgtataatggaactggagaaagacctagcattgagagtacaggaagtagctgagctccgaagaaggctagagtccaataagcctgctggggatgtggacatgtcactttcccttttgcaagagataagctctttgcaagaaaagttagaagtcacccgtactgaccaccagagagaaataacttctctgaaggagcattttggagcccgggaagaaactcatcagaaggagataaaggctctgtataccgccacggaaaagctttccaaagagaacgagtcattgaaaagcaagctggagcatgccaacaaagagaactcagatgtgatagctctatggaagtccaaactggagactgccatcgcatcccaccagcaggcgatggaagaactgaaggtatctttcagcaaagggcttggaacagagacggcagaatttgctgaactaaaaacacaaatagagaaaatgagactagattaccaacacgaaatagaaaatttgcagaatcaacaagactctgaacgggctgcccatgctaaagagatggaagccttgagggctaaactgatgaaagttattaaagaaaaggaaaacagtctggaagccatcaggtcgaaactggacaaagcagaagaccagcatctcgtagaaatggaagacacgttaaacaaattacaggaagctgaaataaaggtaaaggagctagaggtactgcaagccaaatgcaatgaacaaaccaaggttattgataattttacatcacagctcaaggctactgaagaaaagctcttggatcttgatgcacttcggaaagccagttccgaaggtaaatcggaaatgaagaaacttagacagcagcttgaggcagctgagaaacagattaaacatttagagattgaaaagaatgctgaaagtagcaaggctagtagcattaccagagagctccaggggagagagctaaagcttactaaccttcaggaaaatttgagtgaagtcagtcaagtgaaagagactttggaaaaagaacttcagattttgaaagaaaagtttgctgaagcttcagaggaggcagtctctgttcagagaagtatgcaagaaactgtaaataagttacaccaaaaggaggaacagtttaacatgctgtcttctgacttggagaagctgagagaaaacttagcagatatggaggcaaaatttagagagaaagatgagagagaagagcagctgataaaggcaaaggaaaaactggaaaatgacattgcagaaataatgaagatgtcaggagataactcttctcagctgacaaaaatgaacgatgaattacgtctgaaagaaagagatgtagaagaattacagctaaaacttacaaaggctaatgaaaatgcaagttttctgcaaaaaagtattgaggacatgactgtcaaagctgaacagagccagcaagaagcagctaaaaagcatgaggaagaaaagaaagaattggagaggaaattgtcggacctggaaaagaaaatggaaacaagccacaaccagtgtcaggagctgaaagccaggtatgagagagccacttctgagacaaaaaccaagcatgaagaaatcctacagaacctccagaagacgctgctggacacagaggacaagctgaagggcgcacgggaggagaacagtggcttgctgcaggagctggaggagctgagaaagcaagccgacaaagccaaagctgctcaaacagcggaagatgccatgcagataatggaacagatgaccaaagagaagactgagactctggcctccttggaggacaccaagcaaacaaatgcaaaactacagaatgaattggacacacttaaagaaaacaacttgaaaaatgtggaagagctgaacaaatcaaaagaactcctgactgtagagaatcaaaaaatggaagaatttaggaaagaaatagaaaccctaaagcaggcagcagctcagaagtcccagcagctttcagcgttgcaagaagagaacgttaaacttgctgaggagctggggagaagcagggacgaagtcacaagtcatcaaaagctggaagaagaaagatctgtgctcaataatcagttgttagaaatgaaaaaaagagaatccaagttcataaaagacgcagatgaagagaaagcttccttgcagaaatccatcagtataactagtgccttactcacagaaaaggatgccgagctggagaaactgagaaatgaggtcacagtgctcaggggagaaaacgcctctgccaagtccttgcattcagttgttcagactctagagtctgataaggtgaagctcgagctcaaggtaaagaacttggagcttcaactcaaagaaaacaagaggcagctcagcagctcctcaggtaatacagacactcaggcagacgaggatgaaagagcccaggagagtcagattgatttcctaaattcagtaatagtggaccttcaaaggaagaatcaagacctcaagatgaaggtggagatgatgtcagaagcagccctgaatgggaacggggatgacctaaacaattatgacagtgatgatcaggagaaacagtccaagaagaaacctcgcctcttctgtgacatttgtgactgctttgatctccacgacacagaggattgtcctacccaggcacagatgtcagaggaccctccccattccacacaccatggcagtcggggtgaggaacgcccatactgtgaaatctgtgagatgtttggacactgggccaccaactgcaatgacgacgaaaccttctgatgaagcctccagtggagaactgggcttgctcagacgcactc

SEQ ID NO: 114026 - DNA, 665 bp, Homo sapiens
  Payload ID: 2281
  Gene Symbol: CLIP1
  Gene Name: CAP-GLY domain containing linker protein 1
  ENST ID: ENST00000535290
  CDS Start-End: 341-665
attaagctgtgaatgaacctcccaaacccaggaatatgatatgagaacatagcctttgaatttctctctcaagtttgacttgaaaaatcagcctcagaaacatctttatcttaagatagatttccgttgctctcagaacgtctctcccctgaccttctgttattaagttcatggacatacagcattttagaattaggtgggggctccgaagtctgcgagtgcagctgtgcacagatttaatccagagactgacttcactatagaacccacagttgtatcaatggttggggaaagatagtggcaacaggcaaaggagaaacagctctgacatacaaagaaaatgagtatgctaaagccaagtgggcttaaggcccccaccaagatcctgaagcctggaagcacagctctgaagacacctacggctgttgtagctccagtagaaaaaaccatatccagtgaaaaagcatcaagcactccatcatctgagactcaggaggaatttgtggatgactttcgagttggggagcgagtttgggtgaatggaaataagcctggatttatccagtttcttggagaaacccagtttgcaccaggccagtgggctggaattgttttagatgaacccataggcaagaacgatggttcggtggcaggagttcggtatt

SEQ ID NO: 114027 - DNA, 2000 bp, Homo sapiens
  Payload ID: 2281
  Gene Symbol: CLIP1
  Gene Name: CAP-GLY domain containing linker protein 1
  ENST ID: ENST00000537004
  CDS Start-End: 715-2000
gtagctgggactacacgcacgcaccaccatgcccagctaatttttgtattagtagagacggggtttcaccatgttggccagggttgtctctatctcttgacctcatgatcagcctgccttggcctcccaaagtactgcgattacaggcgtgagccaccacgcctggcggggatgcttaaatgtagcccaatcctccagtaaagaatactaagaaaaagtgtttggaaccgaaccaaaataaaaacttgcgtaccagaagtttgcaggtaatacagatatgcgtacatgactggtgttcagctatttaggtggacttgcttgtctctgcttacctgtgttgctgatgctggtcagcagtggagaaaactgagattagatgctgctaatctcagatgggaggataatttcttaggaggaaggacatttcttgagtcatcagctccagattcctttaaagtggtgaggcttcagcccagagggcgactaacatgagaattcctgtttgtgaggtcattgtcatgacctcatagccaggctgttcaaaatgtttgcccagcttctggcaggatatgagctgatgcctgccccgattctacagacaccatgagatttaatccagagactgacttcactatagaacccacagttgtatcaatggttggggaaagatagtggcaacaggcaaaggagaaacagctctgacatacaaagaaaatgagtatgctaaagccaagtgggcttaaggcccccaccaagatcctgaagcctggaagcacagctctgaagacacctacggctgttgtagctccagtagaaaaaaccatatccagtgaaaaagcatcaagcactccatcatctgagactcaggaggaatttgtggatgactttcgagttggggagcgagtttgggtgaatggaaataagcctggatttatccagtttcttggagaaacccagtttgcaccaggccagtgggctggaattgttttagatgaacccataggcaagaacgatggttcggtggcaggagttcggtatttccagtgtgaacctttaaagggcatatttacccgaccttcaaagttaacaaggaaggtgcaagcagaagatgaagctaatggcctgcagacaacgcccgcctcccgagctacttcaccgctgtgcacttctacggccagcatggtgtcttcctccccctccaccccttcaaacatccctcagaaaccatcacagccagcagcaaaggaaccttcagctacgcctccgatcagcaaccttacaaaaactgccagtgaatctatctccaacctttcagaggctggctcaatcaagaaaggagaaagagagctcaaaatcggagacagagtattggttggtggcactaaggctggtgtagtccggtttcttggggagaccgactttgccaagggggagtggtgtggcgtggagttagatgagccacttgggaagaatgatggcgctgttgctggaacaaggtattttcagtgtcaacccaaatatggcttgttcgctcctgtccacaaagttaccaagattggcttcccttccactacaccagccaaagccaaggccaacgcagtgaggcgagtgatggcgaccacgtccgccagcctgaagcgcagcccttctgcctcttccctcagctccatgagctcagtggcctcctctgtgagcagcaggcccagtcggacaggactacatgtcctggaattggaagccaaaatggaccagctgcgaacaatggtggaagctgctgacagggagaaggtggagcttctcaaccagcttgaagaggagaaaaggaaggttgaggaccttcagttccgggttgaagaagaatcaattaccaaaggtgatcttgagcaaaagagccagatttctgaagatcctgagaatgtaagagggcacttaactgtgtggatatttcccttgttaacaaagattgatcacagattaaaatgcttattgatatactcaaa

SEQ ID NO: 114028 - DNA, 560 bp, Homo sapiens
  Payload ID: 2281
  Gene Symbol: CLIP1
  Gene Name: CAP-GLY domain containing linker protein 1
  ENST ID: ENST00000539080
  CDS Start-End: 311-560
gagccgacgagccgggaggcgggaggcggcggccgcggcggctgctgctgctgcagtgggacaggtggcggcgaccggcggcgtccgaggagtctcttctgtatatacagaaatatgaatgtgaatgaagtggaaggaagaaaatcaaatagcttgccctttcttaaggggaaacaagtcaatttggaaaggtcccagcgttgtatttaatccagagactgacttcactatagaacccacagttgtatcaatggttggggaaagatagtggcaacaggcaaaggagaaacagctctgacatacaaagaaaatgagtatgctaaagccaagtgggcttaaggcccccaccaagatcctgaagcctggaagcacagctctgaagacacctacggctgttgtagctccagtagaaaaaaccatatccagtgaaaaagcatcaagcactccatcatctgagactcaggaggaatttgtggatgactttcgagttggggagcgagtttgggtgaatggaaataagcctggatttatccagtttcttggagaaacccagtttgcac

SEQ ID NO: 114029 - DNA, 5229 bp, Homo sapiens
  Payload ID: 2281
  Gene Symbol: CLIP1
  Gene Name: CAP-GLY domain containing linker protein 1
  Uniprot ID: P30622
  ENST ID: ENST00000537178
  CDS Start-End: 219-4397
gtcacgctctcccccgccccgagccgacgagccgggaggcgggaggcggcggccgcggcggctgctgctgctgcagtgggacaggtggcggcgaccggcggcgtccgaggagatttaatccagagactgacttcactatagaacccacagttgtatcaatggttggggaaagatagtggcaacaggcaaaggagaaacagctctgacatacaaagaaaatgagtatgctaaagccaagtgggcttaaggcccccaccaagatcctgaagcctggaagcacagctctgaagacacctacggctgttgtagctccagtagaaaaaaccatatccagtgaaaaagcatcaagcactccatcatctgagactcaggaggaatttgtggatgactttcgagttggggagcgagtttgggtgaatggaaataagcctggatttatccagtttcttggagaaacccagtttgcaccaggccagtgggctggaattgttttagatgaacccataggcaagaacgatggttcggtggcaggagttcggtatttccagtgtgaacctttaaagggcatatttacccgaccttcaaagttaacaaggaaggtgcaagcagaagatgaagctaatggcctgcagacaacgcccgcctcccgagctacttcaccgctgtgcacttctacggccagcatggtgtcttcctccccctccaccccttcaaacatccctcagaaaccatcacagccagcagcaaaggaaccttcagctacgcctccgatcagcaaccttacaaaaactgccagtgaatctatctccaacctttcagaggctggctcaatcaagaaaggagaaagagagctcaaaatcggagacagagtattggttggtggcactaaggctggtgtagtccggtttcttggggagaccgactttgccaagggggagtggtgtggcgtggagttagatgagccacttgggaagaatgatggcgctgttgctggaacaaggtattttcagtgtcaacccaaatatggcttgttcgctcctgtccacaaagttaccaagattggcttcccttccactacaccagccaaagccaaggccaacgcagtgaggcgagtgatggcgaccacgtccgccagcctgaagcgcagcccttctgcctcttccctcagctccatgagctcagtggcctcctctgtgagcagcaggcccagtcggacaggactattgactgaaacctcctcccgttacgccaggaagatctccggtaccactgccctccaggaggccctgaaggagaagcagcagcacattgagcagctgctggcggaacgggatctggagagggcggaggtggccaaggccacgagccacgtgggggagatagagcaggagctagctctggcccgggacggacatgaccagcatgtcctggaattggaagccaaaatggaccagctgcgaacaatggtggaagctgctgacagggagaaggtggagcttctcaaccagcttgaagaggagaaaaggaaggttgaggaccttcagttccgggttgaagaagaatcaattaccaaaggtgatcttgaggtggctacagtttcagaaaagtcacgtataatggaactggagaaagacctagcattgagagtacaggaagtagctgagctccgaagaaggctagagtccaataagcctgctggggatgtggacatgtcactttcccttttgcaagagataagctctttgcaagaaaagttagaagtcacccgtactgaccaccagagagaaataacttctctgaaggagcattttggagcccgggaagaaactcatcagaaggagataaaggctctgtataccgccacggaaaagctttccaaagagaacgagtcattgaaaagcaagctggagcatgccaacaaagagaactcagatgtgatagctctatggaagtccaaactggagactgccatcgcatcccaccagcaggcgatggaagaactgaaggtatctttcagcaaagggcttggaacagagacggcagaatttgctgaactaaaaacacaaatagagaaaatgagactagattaccaacacgaaatagaaaatttgcagaatcaacaagactctgaacgggctgcccatgctaaagagatggaagccttgagggctaaactgatgaaagttattaaagaaaaggaaaacagtctggaagccatcaggtcgaaactggacaaagcagaagaccagcatctcgtagaaatggaagacacgttaaacaaattacaggaagctgaaataaaggtaaaggagctagaggtactgcaagccaaatgcaatgaacaaaccaaggttattgataattttacatcacagctcaaggctactgaagaaaagctcttggatcttgatgcacttcggaaagccagttccgaaggtaaatcggaaatgaagaaacttagacagcagcttgaggcagctgagaaacagattaaacatttagagattgaaaagaatgctgaaagtagcaaggctagtagcattaccagagagctccaggggagagagctaaagcttactaaccttcaggaaaatttgagtgaagtcagtcaagtgaaagagactttggaaaaagaacttcagattttgaaagaaaagtttgctgaagcttcagaggaggcagtctctgttcagagaagtatgcaagaaactgtaaataagttacaccaaaaggaggaacagtttaacatgctgtcttctgacttggagaagctgagagaaaacttagcagatatggaggcaaaatttagagagaaagatgagagagaagagcagctgataaaggcaaaggaaaaactggaaaatgacattgcagaaataatgaagatgtcaggagataactcttctcagctgacaaaaatgaacgatgaattacgtctgaaagaaagagatgtagaagaattacagctaaaacttacaaaggctaatgaaaatgcaagttttctgcaaaaaagtattgaggacatgactgtcaaagctgaacagagccagcaagaagcagctaaaaagcatgaggaagaaaagaaagaattggagaggaaattgtcggacctggaaaagaaaatggaaacaagccacaaccagtgtcaggagctgaaagccaggtatgagagagccacttctgagacaaaaaccaagcatgaagaaatcctacagaacctccagaagacgctgctggacacagaggacaagctgaagggcgcacgggaggagaacagtggcttgctgcaggagctggaggagctgagaaagcaagccgacaaagccaaagctgctcaaacagcggaagatgccatgcagataatggaacagatgaccaaagagaagactgagactctggcctccttggaggacaccaagcaaacaaatgcaaaactacagaatgaattggacacacttaaagaaaacaacttgaaaaatgtggaagagctgaacaaatcaaaagaactcctgactgtagagaatcaaaaaatggaagaatttaggaaagaaatagaaaccctaaagcaggcagcagctcagaagtcccagcagctttcagcgttgcaagaagagaacgttaaacttgctgaggagctggggagaagcagggacgaagtcacaagtcatcaaaagctggaagaagaaagatctgtgctcaataatcagttgttagaaatgaaaaaaagagaatccaagttcataaaagacgcagatgaagagaaagcttccttgcagaaatccatcagtataactagtgccttactcacagaaaaggatgccgagctggagaaactgagaaatgaggtcacagtgctcaggggagaaaacgcctctgccaagtccttgcattcagttgttcagactctagagtctgataaggtgaagctcgagctcaaggtaaagaacttggagcttcaactcaaagaaaacaagaggcagctcagcagctcctcaggtaatacagacactcaggcagacgaggatgaaagagcccaggagagtcagattgatttcctaaattcagtaatagtggaccttcaaaggaagaatcaagacctcaagatgaaggtggagatgatgtcagaagcagccctgaatgggaacggggatgacctaaacaattatgacagtgatgatcaggagaaacagtccaagaagaaacctcgcctcttctgtgacatttgtgactgctttgatctccacgacacagaggattgtcctacccaggcacagatgtcagaggaccctccccattccacacaccatggcagtcggggtgaggaacgcccatactgtgaaatctgtgagatgtttggacactgggccaccaactgcaatgacgacgaaaccttctgatgaagcctccagtggagaactgggcttgctcagacgcactcgcattgacacaacgtaacaccagcattgtgtgtgcagacttcaggagaactcatgttattttttaaccccgtcaacaaatctaggaaaatattttgatcttcaacaaattgccctttagtctccccgtatgagttagaataataaatatttagtaggtgagttttcacctcgaattttgttttcttgatttttacgtttgaagacattgcaccagatgccattacatttattggccccccgaccttgtagaaaaacccctaccctcacaataccttatttaagtaactttaaattatgccgttacttttcatatttgcactaagatatttccaggctgcatttgtatatttagattttttggttaagctttgacactggaatgagttgaaaaaatgtgccattttgcattttcatctactcatttaaagtattttattcttattcaaagaaatatctgagctctttgcactacctgttatcagtagtgcctttacttcaggcttgataatacttaggtgtgattataaaatcatgaagcaggtaaagggaggggcaagcccccaaactgctgtggggacattttataatctatatgctgcacccacttaatctactgtggtgttttgtttattagttttgcataatttcagcttctatatattgtatgtatatattttttaaaaatctatattttgggaaaaaaacatacacaatgtgtctttctttttggacatttacctttttgaaaaagaaaacacttaaaatgatcattaggacataacagactagg

SEQ ID NO: 114030 - DNA, 1658 bp, Homo sapiens
  Payload ID: 2281
  Gene Symbol: CLIP1
  Gene Name: CAP-GLY domain containing linker protein 1
  ENST ID: ENST00000541108
  CDS Start-End: 108-1160
gatttaatccagagactgacttcactatagaacccacagttgtatcaatggttggggaaagatagtggcaacaggcaaaggagaaacagctctgacatacaaagaaaatgagtatgctaaagccaagtgggcttaaggcccccaccaagatcctgaagcctggaagcacagctctgaagacacctacggctgttgtagctccagtagaaaaaaccatatccagtgaaaaagcatcaagcactccatcatctgagactcaggaggaatttgtggatgactttcgagttggggagcgagtttgggtgaatggaaataagcctggatttatccagtttcttggagaaacccagtttgcaccaggccagtgggctggaattgttttagatgaacccataggcaagaacgatggttcggtggcaggagttcggtatttccagtgtgaacctttaaagggcatatttacccgaccttcaaagttaacaaggaaggtgcaagcagaagatgaagctaatggcctgcagacaacgcccgcctcccgagctacttcaccgctgtgcacttctacggccagcatggtgtcttcctccccctccaccccttcaaacatccctcagaaaccatcacagccagcagcaaaggaaccttcagctacgcctccgatcagcaaccttacaaaaactgccagtgaatctatctccaacctttcagaggctggctcaatcaagaaaggagaaagagagctcaaaatcggagacagagtattggttggtggcactaaggctggtgtagtccggtttcttggggagaccgactttgccaagggggagtggtgtggcgtggagttagatgagccacttgggaagaatgatggcgctgttgctggaacaaggtattttcagtgtcaacccaaatatggcttgttcgctcctgtccacaaagttaccaagattggcttcccttccactacaccagccaaagccaaggccaacgcagtgaggcgagtgatggcgaccacgtccgccagcctgaagcgcagcccttctgcctcttccctcagctccatgagctcagtggcctcctctgtgagcagcaggcccagtcggacaggactagtaaggcccctttctcactacctgcctccacttcccaggcaggattaaggcccgtggtcagtgcccctgctttgctgctttgctgctttgcttgtccttgtgctgaatgttgctcacagcttttgctgtgaaagtctttgcaattgactgaaacctcctcccgttacgccaggaagatctccggtaccactgccctccaggaggccctgaaggagaagcagcagcacattgagcagctgctggcggaacgggatctggagagggcggaggtggccaaggccacgagccacgtgggggagatagagcaggagctagctctggcccgggacggacatgaccaggtgaagtctggaccttgttgcggagatggtgatggtttctaaagccactgaggagccgagaagcatgcccggtgcttggcaccgaggagctagacttgagagcacaagaaatgggtgtacatttctttgctgtgcttgtttgaaagctacagtctggggtgccagtttccatgatcacagagatgaagttttgttcttgattcga

SEQ ID NO: 114031 - DNA, 5913 bp, Homo sapiens
  Payload ID: 2281
  Gene Symbol: CLIP1
  Gene Name: CAP-GLY domain containing linker protein 1
  Uniprot ID: P30622
  ENST ID: ENST00000620786
  CDS Start-End: 156-4472
gctgctgctgcagtgggacaggtggcggcgaccggcggcgtccgaggagatttaatccagagactgacttcactatagaacccacagttgtatcaatggttggggaaagatagtggcaacaggcaaaggagaaacagctctgacatacaaagaaaatgagtatgctaaagccaagtgggcttaaggcccccaccaagatcctgaagcctggaagcacagctctgaagacacctacggctgttgtagctccagtagaaaaaaccatatccagtgaaaaagcatcaagcactccatcatctgagactcaggaggaatttgtggatgactttcgagttggggagcgagtttgggtgaatggaaataagcctggatttatccagtttcttggagaaacccagtttgcaccaggccagtgggctggaattgttttagatgaacccataggcaagaacgatggttcggtggcaggagttcggtatttccagtgtgaacctttaaagggcatatttacccgaccttcaaagttaacaaggaaggtgcaagcagaagatgaagctaatggcctgcagacaacgcccgcctcccgagctacttcaccgctgtgcacttctacggccagcatggtgtcttcctccccctccaccccttcaaacatccctcagaaaccatcacagccagcagcaaaggaaccttcagctacgcctccgatcagcaaccttacaaaaactgccagtgaatctatctccaacctttcagaggctggctcaatcaagaaaggagaaagagagctcaaaatcggagacagagtattggttggtggcactaaggctggtgtagtccggtttcttggggagaccgactttgccaagggggagtggtgtggcgtggagttagatgagccacttgggaagaatgatggcgctgttgctggaacaaggtattttcagtgtcaacccaaatatggcttgttcgctcctgtccacaaagttaccaagattggcttcccttccactacaccagccaaagccaaggccaacgcagtgaggcgagtgatggcgaccacgtccgccagcctgaagcgcagcccttctgcctcttccctcagctccatgagctcagtggcctcctctgtgagcagcaggcccagtcggacaggactattgactgaaacctcctcccgttacgccaggaagatctccggtaccactgccctccaggaggccctgaaggagaagcagcagcacattgagcagctgctggcggaacgggatctggagagggcggaggtggccaaggccacgagccacgtgggggagatagagcaggagctagctctggcccgggacggacatgaccagcatgtcctggaattggaagccaaaatggaccagctgcgaacaatggtggaagctgctgacagggagaaggtggagcttctcaaccagcttgaagaggagaaaaggaaggttgaggaccttcagttccgggttgaagaagaatcaattaccaaaggtgatcttgagcaaaagagccagatttctgaagatcctgagaatacgcagaccaaactggagcatgcccgcattaaggagcttgaacagagcctgctctttgaaaagaccaaagctgacaaactccagagggagttagaagacactagggtggctacagtttcagaaaagtcacgtataatggaactggagaaagacctagcattgagagtacaggaagtagctgagctccgaagaaggctagagtccaataagcctgctggggatgtggacatgtcactttcccttttgcaagagataagctctttgcaagaaaagttagaagtcacccgtactgaccaccagagagaaataacttctctgaaggagcattttggagcccgggaagaaactcatcagaaggagataaaggctctgtataccgccacggaaaagctttccaaagagaacgagtcattgaaaagcaagctggagcatgccaacaaagagaactcagatgtgatagctctatggaagtccaaactggagactgccatcgcatcccaccagcaggcgatggaagaactgaaggtatctttcagcaaagggcttggaacagagacggcagaatttgctgaactaaaaacacaaatagagaaaatgagactagattaccaacacgaaatagaaaatttgcagaatcaacaagactctgaacgggctgcccatgctaaagagatggaagccttgagggctaaactgatgaaagttattaaagaaaaggaaaacagtctggaagccatcaggtcgaaactggacaaagcagaagaccagcatctcgtagaaatggaagacacgttaaacaaattacaggaagctgaaataaaggtaaaggagctagaggtactgcaagccaaatgcaatgaacaaaccaaggttattgataattttacatcacagctcaaggctactgaagaaaagctcttggatcttgatgcacttcggaaagccagttccgaaggtaaatcggaaatgaagaaacttagacagcagcttgaggcagctgagaaacagattaaacatttagagattgaaaagaatgctgaaagtagcaaggctagtagcattaccagagagctccaggggagagagctaaagcttactaaccttcaggaaaatttgagtgaagtcagtcaagtgaaagagactttggaaaaagaacttcagattttgaaagaaaagtttgctgaagcttcagaggaggcagtctctgttcagagaagtatgcaagaaactgtaaataagttacaccaaaaggaggaacagtttaacatgctgtcttctgacttggagaagctgagagaaaacttagcagatatggaggcaaaatttagagagaaagatgagagagaagagcagctgataaaggcaaaggaaaaactggaaaatgacattgcagaaataatgaagatgtcaggagataactcttctcagctgacaaaaatgaacgatgaattacgtctgaaagaaagagatgtagaagaattacagctaaaacttacaaaggctaatgaaaatgcaagttttctgcaaaaaagtattgaggacatgactgtcaaagctgaacagagccagcaagaagcagctaaaaagcatgaggaagaaaagaaagaattggagaggaaattgtcggacctggaaaagaaaatggaaacaagccacaaccagtgtcaggagctgaaagccaggtatgagagagccacttctgagacaaaaaccaagcatgaagaaatcctacagaacctccagaagacgctgctggacacagaggacaagctgaagggcgcacgggaggagaacagtggcttgctgcaggagctggaggagctgagaaagcaagccgacaaagccaaagctgctcaaacagcggaagatgccatgcagataatggaacagatgaccaaagagaagactgagactctggcctccttggaggacaccaagcaaacaaatgcaaaactacagaatgaattggacacacttaaagaaaacaacttgaaaaatgtggaagagctgaacaaatcaaaagaactcctgactgtagagaatcaaaaaatggaagaatttaggaaagaaatagaaaccctaaagcaggcagcagctcagaagtcccagcagctttcagcgttgcaagaagagaacgttaaacttgctgaggagctggggagaagcagggacgaagtcacaagtcatcaaaagctggaagaagaaagatctgtgctcaataatcagttgttagaaatgaaaaaaagagaatccaagttcataaaagacgcagatgaagagaaagcttccttgcagaaatccatcagtataactagtgccttactcacagaaaaggatgccgagctggagaaactgagaaatgaggtcacagtgctcaggggagaaaacgcctctgccaagtccttgcattcagttgttcagactctagagtctgataaggtgaagctcgagctcaaggtaaagaacttggagcttcaactcaaagaaaacaagaggcagctcagcagctcctcaggtaatacagacactcaggcagacgaggatgaaagagcccaggagagtcagattgatttcctaaattcagtaatagtggaccttcaaaggaagaatcaagacctcaagatgaaggtggagatgatgtcagaagcagccctgaatgggaacggggatgacctaaacaattatgacagtgatgatcaggagaaacagtccaagaagaaacctcgcctcttctgtgacatttgtgactgctttgatctccacgacacagaggattgtcctacccaggcacagatgtcagaggaccctccccattccacacaccatggcagtcggggtgaggaacgcccatactgtgaaatctgtgagatgtttggacactgggccaccaactgcaatgacgacgaaaccttctgatgaagcctccagtggagaactgggcttgctcagacgcactcgcattgacacaacgtaacaccagcattgtgtgtgcagacttcaggagaactcatgttattttttaaccccgtcaacaaatctaggaaaatattttgatcttcaacaaattgccctttagtctccccgtatgagttagaataataaatatttagtaggtgagttttcacctcgaattttgttttcttgatttttacgtttgaagacattgcaccagatgccattacatttattggccccccgaccttgtagaaaaacccctaccctcacaataccttatttaagtaactttaaattatgccgttacttttcatatttgcactaagatatttccaggctgcatttgtatatttagattttttggttaagctttgacactggaatgagttgaaaaaatgtgccattttgcattttcatctactcatttaaagtattttattcttattcaaagaaatatctgagctctttgcactacctgttatcagtagtgcctttacttcaggcttgataatacttaggtgtgattataaaatcatgaagcaggtaaagggaggggcaagcccccaaactgctgtggggacattttataatctatatgctgcacccacttaatctactgtggtgttttgtttattagttttgcataatttcagcttctatatattgtatgtatatattttttaaaaatctatattttgggaaaaaaacatacacaatgtgtctttctttttggacatttacctttttgaaaaagaaaacacttaaaatgatcattaggacataacagactaggccagacatagcatcttgtggctttgcaaccattttcatttgtttgttttccttttatttcttcaccagatttaaataactggaggaattttctccaatttttttttccttctctggcaggtatccccagcagtcaattaacaataagccagtataaaacacctaaataaccaatctacaatctcccttcacaagtttttttactgtttttagatgaatgtacgatgagaaattcaacgttaataattctggattttcttatcacaaaaaagaaaatgaaggacctcaaagcacctgaacagtttatcgaccagtttgaatctatttatcttcatttgaatgtcttctagaatatgtaaaaagtcataaaatgtatcttccatgctacatgtacaataagaacttctataattgtatatatgcctttgatgtattttcccctcaagattatcaactgtgtgttcgacagtgaatattcaatctggtaccagttgaaatttttggttataaatgtaatacgaattgtttcacaaacagaaaacatgtaaagcagtattaaaatttggccaaacaagtgttctgtatctactttaataaatggttattcttt

SEQ ID NO: 114032 - DNA, 5563 bp, Homo sapiens
  Payload ID: 2282
  Gene Symbol: CLIP2
  Gene Name: CAP-GLY domain containing linker protein 2
  Uniprot ID: Q9UDT6
  ENST ID: ENST00000223398
  CDS Start-End: 328-3468
cggctcggccgcggggcgcgcaggcggctgctgggcggcctcggtgcgcgcctcccgccttcccagagacgtggcgcgaggcccgggccctgagcacctatcgcggggatccccggcgccaggagggggtgcagccggtgggcagcgccgcgcagggaggggccgcagcatcctcgccccccagcgcgcccgggcccgagaggaggaggccggggctctccgggcctcccgccgcttagcctgatgctggaaggacgaaggtgagtgaagatggcagagaggacgtgaccagcactcacccttgtccacctgcccagtggcaccgccatgcagaagcccagcggcctgaagccccccggccgtggggggaagcactccagccccatgggccggacatctactgggtcagcttcatcctcggcggcggtggccgctagctccaaggaaggctccccactgcacaaacagtcatctggaccctcctcctccccggccgcagctgctgcccccgagaagccgggccccaaggcggcggaagtgggggatgacttcctgggggactttgtggtgggcgagcgggtgtgggtgaacggcgtgaagccaggcgtggtgcagtatctgggagagacgcagttcgcaccgggccagtgggctggcgtggtgctggacgacccggtgggcaagaatgatggcgcggtgggcggcgtgcgctacttcgagtgcccggccctccagggtatcttcacgcggccctccaagctgacccggcagcccacggccgagggctcggggagtgatgcccactccgtggagtcgctgactgcccagaacctgtcattgcattcgggcacggccacgcccccgctgaccagccgcgtcatccccctgcgggagagcgtcctcaacagctccgtgaagactggcaacgagtcgggatccaacctctcagacagcggctctgtgaagcggggcgaaaaggacctgcgcctgggggaccgcgtgctggttggcgggacgaagactggcgtggtgcggtacgtgggggagacagactttgccaagggcgagtggtgtggcgtggagctggacgagccccttgggaagaatgatggggcggtggcgggcaccaggtacttccagtgcccacccaagtttggtctcttcgcgcccatccacaaagtgatccgtatcggcttcccatctaccagcccagccaaggccaagaagaccaagcgtatggccatgggtgtgtcagcactgacccacagtcccagcagttcctccatcagctccgtcagctctgtggcctcctccgtggggggtcggcccagccgcagtggcctgctcacggagacctcttcacgctacgcccgcaagatctcgggcaccacggccttgcaggaggcactgaaggagaagcagcagcacattgagcagctgctggctgaacgagacctggaacgggctgaggtggccaaggccacaagccacatctgcgaggtggagaaggagattgccctgctcaaggcacagcatgagcagtatgttgcagaagccgaggagaagctgcagcgagcccggctgctcgtggagagcgtgcggaaagagaaggtggacctgtccaaccagctggaggaggagaggaggaaggtggaggatctgcagttccgcgtggaggaggagtccatcaccaagggagacctggagacccagacgcagctggagcacgcgcgcattggggagctggaacagagcctgctactggagaaggcgcaggccgagcggctgctccgagaattagcggacaacaggctgaccacagtggccgagaagtcgcgcgtgctgcagctggaggaggagctcaccctgcgccgaggtgaaatcgaggagctccagcagtgcctgttgcactcgggtcccccacctccggaccacccagacgccgccgagatcctgcggctacgggagcggctgctctcggccagcaaggaacaccagagggagagtggggtgctgcgggataaatacgagaaggccctgaaggcctaccaggcggaggtggacaagctccgcgcggccaacgagaagtacgcacaggaggtggcgggcctgaaggacaaggttcagcaggccaccagcgagaacatggggctaatggacaactggaaatccaagctggactcgctggcctcggaccaccagaagtccctggaggacctcaaagccaccctgaactcgggcccaggcgcccagcagaaggagatcggcgagctgaaggcagtgatggagggcatcaagatggagcaccagctggagctgggtaacttgcaggccaagcatgacctggagaccgccatgcacgtgaaggagaaggaggccctgcgagagaagctgcaggaggcccaggaggagctggctgggctgcagcggcactggcgggcccagctggaggtgcaagccagccagcaccggctggagctgcaggaggcccaggaccagcgccgggatgccgagctgcgtgtgcacgagctggaaaaactggacgtggagtaccggggccaggcgcaggctatcgagttcctcaaggagcagatctcgctggccgagaagaagatgttggactacgagcggctgcagcgggcagaagcccagggcaaacaggaggtcgagagtttgcgggagaagctcctggtggctgagaacagactccaggcggtcgaggccctgtgctcctcccagcacacccacatgattgagtcgaatgacatttcagaggagacgatcaggacgaaggaaactgtggagggcctgcaggacaagctgaacaagagggacaaagaggtgacagccttgacctcccagaccgagatgctcagggcccaagtaagtgcgctggagagcaagtgtaagtcaggcgagaagaaggtggacgccctcctgaaggagaagcggcgcctggaggcagagctggagaccgtgtcccggaagacccatgacgcctcgggccagctagtcctcatcagccaggagctgctgcggaaggagcggagcctgaacgaactgcgggtgttgctgctggaggccaatcgtcactccccagggccggagagggacctgagccgtgaggtacacaaggctgagtggcggatcaaggagcagaaactcaaggatgacatccggggcctgcgtgaaaagctgaccgggctggacaaagagaaatccctgtcggatcagaggcgctactccctcatcgaccggtcctcggcgcccgagcttctgcggctgcagcaccagctgatgagcacggaggacgccctgcgggatgcgctggaccaggctcagcaggtggagaagctgatggaggccatgaggagctgccctgacaaggcccagaccatcggcaattccggttctgcaaacggcatccaccagcaggacaaagctcagaaacaagaggacaagcactgatcctgaggggatactgtggagcagcccagtccacaccagagccccacgcggctgcccggcagtacctcctccaggcaggagccgggactgtcactttggagacaaaacagtgtttgtaacaataacgtactcaccgccgcggacaatcccccaccccgatccctcgccagaccaggacgcttcctcaagcccagccttctacagagagtgtgaacggtacagccccggcctgacccggggaccttcagcctggacacccggcagcttctggagtttgtcagtggaggcagaggggatccggccaggcccctctgtccagaaggagctgccctgaggaccatcttagcggccctgtcctctttttccgcccattctccctcgggtctccccagaggggccggcgggggctggggagggggtaagtttatccatgcagacaccaagggggagcatccagtctttaagagccaagtgggggccccttttccgaagccacttccaggccaaggcagtcgccagggcttcttgtccccaccttctgaaccttcttcaaacagtagtacaagctcccctcagccagcctgcctgcccagcgaggcccccaggttcaaggtgttggcgggggcggagggcaggggaacgggatccttctcccgctgcccaccaacaccaacacacacacacctctaagctgctggccgaagatgtcaccaaggccaaagacacagtattatgaaggtttggaaacccctctcctcacctcccaccgtgaccttgggcaaaccctggctcggagcccagggcagaggcagctcagagtggaggctctaggcaggtttgacaaaggtcagtaatacggtttcccctggggttgaccagatgttccaaaatatctgcatccacctggagatgcagctaagtgggtccttatgtacacaccacgttcacacacacacagagggaccacgtgtgcacgcatgaccgtgtgggtggcggcgtttgctgtgaaccacgctcaggccacacagagacacatacttggtttctgggactgagacccaggcctggcaggaccgtgcctacagatactgcaaacgttcctacagcctagaggtgcgtatacacacccaagtacacgcagccaggcattcaggggtgtgtttgccacatggagcatcccttcctggtcttgccaggcacctgcacagagcgtctccagccccatctcctaacgggggctgggggtaagagaaatctaactgcgctcccccaacccctcgccctgccatcttcccctcaagcctgctaagttatcccaggcctgtgcgtggtggaaaaagccagccttggccctgcagcctccacctcgccgctgggggaccaacaggttgcttacagctttgcaccccggcatcagcacaggggtccctgccccaccctccggcagctcagggagtgttttcctgtgaggcctcccccatcagtggaccagagggagaagcccgatgccccatcccggctttcccgtaacgcacaggacacgtgtgcaattcataggaacggcccagatcgccctcatgagtgccacctggtacaggtaggtggcgctcacgttcctgcccaaatgcagcccatcggggagtcacagtcagtccccccggcccccctcccagtccctgttggctttcggtagctctcgcatgcagttctattaacagccgtctagaagcgatgctttagtggcctaacccagggtcaaatacagctctttctagcaaaatcaggcagctctgccccatcggtaggggcaccgattagtctactaacagccagaggtccatctagcagggtgccgggaggagctgagcccccggaggtgggctcctggtgacgggtgtccaagaagcggtttccttgggagcttctgcctccgtgggcctctcagcccgccccgtgtggccgcccgggtgtggctcagccatgtcccctccccaggtccttcattcacccctcccctccccacagtggaattgttgaagtgtggcgagtctgtgctcgggacaataaagcttgtgacaggtccaggaccccggca

SEQ ID NO: 114033 - DNA, 5445 bp, Homo sapiens
  Payload ID: 2282
  Gene Symbol: CLIP2
  Gene Name: CAP-GLY domain containing linker protein 2
  Uniprot ID: Q9UDT6
  ENST ID: ENST00000361545
  CDS Start-End: 328-3363
cggctcggccgcggggcgcgcaggcggctgctgggcggcctcggtgcgcgcctcccgccttcccagagacgtggcgcgaggcccgggccctgagcacctatcgcggggatccccggcgccaggagggggtgcagccggtgggcagcgccgcgcagggaggggccgcagcatcctcgccccccagcgcgcccgggcccgagaggaggaggccggggctctccgggcctcccgccgcttagcctgatgctggaaggacgaaggtgagtgaagatggcagagaggacgtgaccagcactcacccttgtccacctgcccagtggcaccgccatgcagaagcccagcggcctgaagccccccggccgtggggggaagcactccagccccatgggccggacatctactgggtcagcttcatcctcggcggcggtggccgctagctccaaggaaggctccccactgcacaaacagtcatctggaccctcctcctccccggccgcagctgctgcccccgagaagccgggccccaaggcggcggaagtgggggatgacttcctgggggactttgtggtgggcgagcgggtgtgggtgaacggcgtgaagccaggcgtggtgcagtatctgggagagacgcagttcgcaccgggccagtgggctggcgtggtgctggacgacccggtgggcaagaatgatggcgcggtgggcggcgtgcgctacttcgagtgcccggccctccagggtatcttcacgcggccctccaagctgacccggcagcccacggccgagggctcggggagtgatgcccactccgtggagtcgctgactgcccagaacctgtcattgcattcgggcacggccacgcccccgctgaccagccgcgtcatccccctgcgggagagcgtcctcaacagctccgtgaagactggcaacgagtcgggatccaacctctcagacagcggctctgtgaagcggggcgaaaaggacctgcgcctgggggaccgcgtgctggttggcgggacgaagactggcgtggtgcggtacgtgggggagacagactttgccaagggcgagtggtgtggcgtggagctggacgagccccttgggaagaatgatggggcggtggcgggcaccaggtacttccagtgcccacccaagtttggtctcttcgcgcccatccacaaagtgatccgtatcggcttcccatctaccagcccagccaaggccaagaagaccaagcgtatggccatgggtgtgtcagcactgacccacagtcccagcagttcctccatcagctccgtcagctctgtggcctcctccgtggggggtcggcccagccgcagtggcctgctcacggagacctcttcacgctacgcccgcaagatctcgggcaccacggccttgcaggaggcactgaaggagaagcagcagcacattgagcagctgctggctgaacgagacctggaacgggctgaggtggccaaggccacaagccacatctgcgaggtggagaaggagattgccctgctcaaggcacagcatgagcagtatgttgcagaagccgaggagaagctgcagcgagcccggctgctcgtggagagcgtgcggaaagagaaggtggacctgtccaaccagctggaggaggagaggaggaaggtggaggatctgcagttccgcgtggaggaggagtccatcaccaagggagacctggagctgaccacagtggccgagaagtcgcgcgtgctgcagctggaggaggagctcaccctgcgccgaggtgaaatcgaggagctccagcagtgcctgttgcactcgggtcccccacctccggaccacccagacgccgccgagatcctgcggctacgggagcggctgctctcggccagcaaggaacaccagagggagagtggggtgctgcgggataaatacgagaaggccctgaaggcctaccaggcggaggtggacaagctccgcgcggccaacgagaagtacgcacaggaggtggcgggcctgaaggacaaggttcagcaggccaccagcgagaacatggggctaatggacaactggaaatccaagctggactcgctggcctcggaccaccagaagtccctggaggacctcaaagccaccctgaactcgggcccaggcgcccagcagaaggagatcggcgagctgaaggcagtgatggagggcatcaagatggagcaccagctggagctgggtaacttgcaggccaagcatgacctggagaccgccatgcacgtgaaggagaaggaggccctgcgagagaagctgcaggaggcccaggaggagctggctgggctgcagcggcactggcgggcccagctggaggtgcaagccagccagcaccggctggagctgcaggaggcccaggaccagcgccgggatgccgagctgcgtgtgcacgagctggaaaaactggacgtggagtaccggggccaggcgcaggctatcgagttcctcaaggagcagatctcgctggccgagaagaagatgttggactacgagcggctgcagcgggcagaagcccagggcaaacaggaggtcgagagtttgcgggagaagctcctggtggctgagaacagactccaggcggtcgaggccctgtgctcctcccagcacacccacatgattgagtcgaatgacatttcagaggagacgatcaggacgaaggaaactgtggagggcctgcaggacaagctgaacaagagggacaaagaggtgacagccttgacctcccagaccgagatgctcagggcccaagtaagtgcgctggagagcaagtgtaagtcaggcgagaagaaggtggacgccctcctgaaggagaagcggcgcctggaggcagagctggagaccgtgtcccggaagacccatgacgcctcgggccagctagtcctcatcagccaggagctgctgcggaaggagcggagcctgaacgaactgcgggtgttgctgctggaggccaatcgtcactccccagggccggagagggacctgagccgtgaggtacacaaggctgagtggcggatcaaggagcagaaactcaaggatgacatccggggcctgcgtgaaaagctgaccgggctggacaaagagaaatccctgtcggatcagaggcgctactccctcatcgaccggtcctcggcgcccgagcttctgcggctgcagcaccagctgatgagcacggaggacgccctgcgggatgcgctggaccaggctcagcaggtggagaagctgatggaggccatgaggagctgccctgacaaggcccagaccatcggcaattccggttctgcaaacggcatccaccagcaggacaaagctcagaaacaagaggacaagcactgatcctgaggggatactgtggagcagcccagtccacaccagagccccacgcggctgcccggcagtacctcctccaggcaggagccgggactgtcactttggagacaaaacagtgtttgtaacaataacgtactcaccgccgcggacaatcccccaccccgatccctcgccagaccaggacgcttcctcaagcccagccttctacagagagtgtgaacggtacagccccggcctgacccggggaccttcagcctggacacccggcagcttctggagtttgtcagtggaggcagaggggatccggccaggcccctctgtccagaaggagctgccctgaggaccatcttagcggccctgtcctctttttccgcccattctccctcgggtctccccagaggggccggcgggggctggggagggggtaagtttatccatgcagacaccaagggggagcatccagtctttaagagccaagtgggggccccttttccgaagccacttccaggccaaggcagtcgccagggcttcttgtccccaccttctgaaccttcttcaaacagtagtacaagctcccctcagccagcctgcctgcccagcgaggcccccaggttcaaggtgttggcgggggcggagggcaggggaacgggatccttctcccgctgcccaccaacaccaacacacacacacctctaagctgctggccgaagatgtcaccaaggccaaagacacagtattatgaaggtttggaaacccctctcctcacctcccaccgtgaccttgggcaaaccctggctcggagcccagggcagaggcagctcagagtggaggctctaggcaggtttgacaaaggtcagtaatacggtttcccctggggttgaccagatgttccaaaatatctgcatccacctggagatgcagctaagtgggtccttatgtacacaccacgttcacacacacacagagggaccacgtgtgcacgcatgaccgtgtgggtggcggcgtttgctgtgaaccacgctcaggccacacagagacacatacttggtttctgggactgagacccaggcctggcaggaccgtgcctacagatactgcaaacgttcctacagcctagaggtgcgtatacacacccaagtacacgcagccaggcattcaggggtgtgtttgccacatggagcatcccttcctggtcttgccaggcacctgcacagagcgtctccagccccatctcctaacgggggctgggggtaagagaaatctaactgcgctcccccaacccctcgccctgccatcttcccctcaagcctgctaagttatcccaggcctgtgcgtggtggaaaaagccagccttggccctgcagcctccacctcgccgctgggggaccaacaggttgcttacagctttgcaccccggcatcagcacaggggtccctgccccaccctccggcagctcagggagtgttttcctgtgaggcctcccccatcagtggaccagagggagaagcccgatgccccatcccggctttcccgtaacgcacaggacacgtgtgcaattcataggaacggcccagatcgccctcatgagtgccacctggtacaggtaggtggcgctcacgttcctgcccaaatgcagcccatcggggagtcacagtcagtccccccggcccccctcccagtccctgttggctttcggtagctctcgcatgcagttctattaacagccgtctagaagcgatgctttagtggcctaacccagggtcaaatacagctctttctagcaaaatcaggcagctctgccccatcggtaggggcaccgattagtctactaacagccagaggtccatctagcagggtgccgggaggagctgagcccccggaggtgggctcctggtgacgggtgtccaagaagcggtttccttgggagcttctgcctccgtgggcctctcagcccgccccgtgtggccgcccgggtgtggctcagccatgtcccctccccaggtccttcattcacccctcccctccccacagtggaattgttgaagtgtggcgagtctgtgctcgggacaataaagcttgtgacaggtc

SEQ ID NO: 114034 - DNA, 3141 bp, Homo sapiens
  Payload ID: 2282
  Gene Symbol: CLIP2
  Gene Name: CAP-GLY domain containing linker protein 2
  Uniprot ID: Q9UDT6
  ENST ID: ENST00000395060
  CDS Start-End: 1-3141
atgcagaagcccagcggcctgaagccccccggccgtggggggaagcactccagccccatgggccggacatctactgggtcagcttcatcctcggcggcggtggccgctagctccaaggaaggctccccactgcacaaacagtcatctggaccctcctcctccccggccgcagctgctgcccccgagaagccgggccccaaggcggcggaagtgggggatgacttcctgggggactttgtggtgggcgagcgggtgtgggtgaacggcgtgaagccaggcgtggtgcagtatctgggagagacgcagttcgcaccgggccagtgggctggcgtggtgctggacgacccggtgggcaagaatgatggcgcggtgggcggcgtgcgctacttcgagtgcccggccctccagggtatcttcacgcggccctccaagctgacccggcagcccacggccgagggctcggggagtgatgcccactccgtggagtcgctgactgcccagaacctgtcattgcattcgggcacggccacgcccccgctgaccagccgcgtcatccccctgcgggagagcgtcctcaacagctccgtgaagactggcaacgagtcgggatccaacctctcagacagcggctctgtgaagcggggcgaaaaggacctgcgcctgggggaccgcgtgctggttggcgggacgaagactggcgtggtgcggtacgtgggggagacagactttgccaagggcgagtggtgtggcgtggagctggacgagccccttgggaagaatgatggggcggtggcgggcaccaggtacttccagtgcccacccaagtttggtctcttcgcgcccatccacaaagtgatccgtatcggcttcccatctaccagcccagccaaggccaagaagaccaagcgtatggccatgggtgtgtcagcactgacccacagtcccagcagttcctccatcagctccgtcagctctgtggcctcctccgtggggggtcggcccagccgcagtggcctgctcacggagacctcttcacgctacgcccgcaagatctcgggcaccacggccttgcaggaggcactgaaggagaagcagcagcacattgagcagctgctggctgaacgagacctggaacgggctgaggtggccaaggccacaagccacatctgcgaggtggagaaggagattgccctgctcaaggcacagcatgagcagtatgttgcagaagccgaggagaagctgcagcgagcccggctgctcgtggagagcgtgcggaaagagaaggtggacctgtccaaccagctggaggaggagaggaggaaggtggaggatctgcagttccgcgtggaggaggagtccatcaccaagggagacctggagacccagacgcagctggagcacgcgcgcattggggagctggaacagagcctgctactggagaaggcgcaggccgagcggctgctccgagaattagcggacaacaggctgaccacagtggccgagaagtcgcgcgtgctgcagctggaggaggagctcaccctgcgccgaggtgaaatcgaggagctccagcagtgcctgttgcactcgggtcccccacctccggaccacccagacgccgccgagatcctgcggctacgggagcggctgctctcggccagcaaggaacaccagagggagagtggggtgctgcgggataaatacgagaaggccctgaaggcctaccaggcggaggtggacaagctccgcgcggccaacgagaagtacgcacaggaggtggcgggcctgaaggacaaggttcagcaggccaccagcgagaacatggggctaatggacaactggaaatccaagctggactcgctggcctcggaccaccagaagtccctggaggacctcaaagccaccctgaactcgggcccaggcgcccagcagaaggagatcggcgagctgaaggcagtgatggagggcatcaagatggagcaccagctggagctgggtaacttgcaggccaagcatgacctggagaccgccatgcacgtgaaggagaaggaggccctgcgagagaagctgcaggaggcccaggaggagctggctgggctgcagcggcactggcgggcccagctggaggtgcaagccagccagcaccggctggagctgcaggaggcccaggaccagcgccgggatgccgagctgcgtgtgcacgagctggaaaaactggacgtggagtaccggggccaggcgcaggctatcgagttcctcaaggagcagatctcgctggccgagaagaagatgttggactacgagcggctgcagcgggcagaagcccagggcaaacaggaggtcgagagtttgcgggagaagctcctggtggctgagaacagactccaggcggtcgaggccctgtgctcctcccagcacacccacatgattgagtcgaatgacatttcagaggagacgatcaggacgaaggaaactgtggagggcctgcaggacaagctgaacaagagggacaaagaggtgacagccttgacctcccagaccgagatgctcagggcccaagtaagtgcgctggagagcaagtgtaagtcaggcgagaagaaggtggacgccctcctgaaggagaagcggcgcctggaggcagagctggagaccgtgtcccggaagacccatgacgcctcgggccagctagtcctcatcagccaggagctgctgcggaaggagcggagcctgaacgaactgcgggtgttgctgctggaggccaatcgtcactccccagggccggagagggacctgagccgtgaggtacacaaggctgagtggcggatcaaggagcagaaactcaaggatgacatccggggcctgcgtgaaaagctgaccgggctggacaaagagaaatccctgtcggatcagaggcgctactccctcatcgaccggtcctcggcgcccgagcttctgcggctgcagcaccagctgatgagcacggaggacgccctgcgggatgcgctggaccaggctcagcaggtggagaagctgatggaggccatgaggagctgccctgacaaggcccagaccatcggcaattccggttctgcaaacggcatccaccagcaggacaaagctcagaaacaagaggacaagcactga

SEQ ID NO: 114035 - DNA, 561 bp, Homo sapiens
  Payload ID: 2282
  Gene Symbol: CLIP2
  Gene Name: CAP-GLY domain containing linker protein 2
  ENST ID: ENST00000493166
  CDS Start-End: 1-561
actacgagcggctgcagcgggcagaagcccagggcaaacaggaggtcgagagtttgcgggagaagctcctggtggctgagaacagactccaggcggtcgaggccctgtgctcctcccagcacacccacatgattgagtcgaatgacatttcagaggagacgatcaggacgaaggaaactgtggagggcgcagtgttagcttctttatatcccctttccagaaatattttgtgcaggcctgcaggacaagctgaacaagagggacaaagaggtgacagccttgacctcccagaccgagatgctcagggcccaacgctggagagcaagtgtaagtcaggcgagaagaaggtggacgccctcctgaaggagaagcggcgcctggaggcagagctggagaccgtgtcccggaagacccatgacgcctcgggccagctagtcctcatcagccaggagctgctgcggaaggagcggagcctgaacgaactgcgggtgttgctgctggaggccaatcgtcactccccagggccggagagggacctgagccgtgaggtacacaaggctg

SEQ ID NO: 114036 - DNA, 564 bp, Homo sapiens
  Payload ID: 2282
  Gene Symbol: CLIP2
  Gene Name: CAP-GLY domain containing linker protein 2
  ENST ID: ENST00000487447
  CDS Start-End: 1-86
gggatgcgctggaccaggctcagcaggtggagaagctgatggaggccatgaggagctgccctgacaaggcccaggacaagcactgatcctgaggggatactgtggagcagcccagtccacaccagagccccacgcggctgcccggcagtacctcctccaggcaggagccgggactgtcactttggagacaaaacagtgtttgtaacaataacgtactcaccgccgcggacaatcccccaccccgatccctcgccagaccaggacgcttcctcaagcccagccttctacagagagtgtgaacggtacagccccggcctgacccggggaccttcagcctggacacccggcagcttctggagtttgtcagtggaggcagaggggatccggccaggcccctctgtccagaaggagctgccctgaggaccatcttagcggccctgtcctctttttccgcccattctccctcgggtctccccagaggggccggcgggggctggggagggggtaagtttatccatgcagacaccaagggggagcatccagtctttaagagccaagtggggg

SEQ ID NO: 114037 - DNA, 3370 bp, Homo sapiens
  Payload ID: 2283
  Gene Symbol: CLIP3
  Gene Name: CAP-GLY domain containing linker protein 3
  Uniprot ID: Q96DZ5
  ENST ID: ENST00000360535
  CDS Start-End: 229-1872
atgcgcagtcgcgcccctccctctccgcccccaccccctgtcggcgtctgggcctcgtccccttctctctgtctcccttgcctcccccatcacgtcccctgacaccgacaccccattgctcccacagtctccccagtctccactttggtccccagcgctgtctgcccgaggatttgcctgaaggctgcccccaactctgcacccgccccccgagggccaccgaggaccatgactaagacagatcctgccccgatggccccgccaccccgaggagaggaggaagaagaggaggaggaggatgaacccgtccccgaggcccccagccccacccaggagcgccggcagaagcctgttgtgcacccctcggcacctgcccccctccctaaggactacgctttcaccttcttcgatcccaatgacccggcgtgccaggagatcctgtttgaccctcagaccaccatccccgagctgtttgccattgtgcgccagtgggtgccccaagtccagcacaagatagacgtcatcggcaatgagattctgcgccgaggctgccatgtgaacgatcgtgacgggctgaccgacatgacactgctccactatgcgtgcaaagctggggcccacggagtcggggaccccgcggcagccgtgcgcctctcgcagcagctgctggcgctgggcgcagatgtgacgctgcgcagccgctggaccaacatgaacgcgcttcactacgcggcctattttgatgtgcccgacctcgtgcgtgtgctgctgaagggtgcgaggccgcgagtggtgaactccacgtgcagtgacttcaaccacggctcagccctgcacatcgctgcttccagcctgtgcctgggcgccgccaaatgtttgctggagcacggcgccaaccctgcgctgaggaatcgaaaaggacaggtgccggcggaggtggtcccagatcctatggacatgtccctggacaaggcagaggcggcactggtggccaaggagctgcggacgcttctggaagaggcagtgccactatcttgcgccctccccaaggtcacgctacccaactatgacaacgtcccaggcaatctcatgcttagcgcactgggcttgcgcctgggagaccgcgtgctgctggatggccagaagacgggcacactgcggttctgtgggaccacggagtttgccagcggccagtgggtgggcgtggagctggacgaacctgagggcaagaacgatggcagcgttgggggcgttcggtacttcatctgccctcccaagcagggtctctttgcctccgtgtccaagatctccaaggcagtggacgcacccccctcctctgtcacctccacaccccggaccccccggatggacttctcccgtgtcaccggcaaaggccgcagggaacacaaaggcaagaagaagaccccatcatccccatctctgggcagcttgcagcagcgtgacggggccaaggctgaggttggagaccaggtccttgtcgcgggccagaagcaggggatcgtgcgcttctacgggaagacagactttgccccaggttactggtatggcattgagctggaccagcccacaggcaagcatgatggctctgtcttcggtgtccggtacttcacttgccccccgaggcatggggtcttcgcaccagcatcccgtattcagaggattggcggatccactgattcccccggggacagcgttggagccaaaaaagtgcatcaagtgacaatgacgcagcccaaacgcaccttcaccacagtccggaccccaaaggacattgcatcagagaactccatttccaggttgctgttctgctgctggttcccctggatgctgagggcggagatgcagtcttagaggccctggacacctgacaaagagacagagtccccactagcatctcctgacacccgaggagccctgagtcaccctgagatagagattcccagtaacacatccagagtagagacccctgttagccagccctcgatcattgaggccccattattaacagatactcccataataacccccaaatacagaccccatgtcacccagaaagagattccctgagtagcaccttcaggctagtccctatccccaacccctcagagcagattcccagattaacagatttccatatcaccccaaatgatggtgaccctctccacataatgcattacaacagaacattcttgaatcacccaaccctggatcagaaacctccccattaacaaacactgccccttaagtcctcttgaaataaacataggtcacacccccaaagcaaaagagtaacagacattcatgtcattgttccccatttaacatcagtcctctcaagatgtcgtgaccccatggtcaccctgaagcccttagattccaacccctcaatcagagacttccttcattaacaaagacccttgttcttatccctcaagaagaaacccaccataaccagcccactgtcacccctaatttacagacaccaaaacagtcctggaagtgctaattacaggaccccccaagtcttcctaccctctgcaccctcaagaaacccccagtgccttgtatgaagcccaccccacatggcccacagctcctgtgctggccagactcccagaaaattctctattttttaagtaacgacttccccctttgggggaccccaaaatttggaggccccattctaggactctggggatcccaaaccctagagtacacacgtcccaaactcccctgtgccctcaagtcctacagcccctagaagaccccaatgccgtaactcctaggacccccaaatcatggaatcccaaatccccagggaatcccaaatttgaaaatccaatcccaagtccccaggaaacccaatcatgaggtccttgtgcctggtatggaggagactgcagtcaggatatgcattccaggctcccagacacctcaagccctattcacaggcaccaggaaaccccacacaggaattcccatccctggaaactggagaatttcaatgccccgagtccatgggtttcaagacaccaaattccaagagccccagccctaagggaaccccaaatcctaaagcctccatctctaataaatggaaggccccaaggccctgaggggatctcaaatcctggaaccccgatttcaatctacgttctagtcactggcctcaaaggaccccacagcacctgggccagaccaacagctcgagggagaacctgaaggcccagggggtccagggcggacctggggccccgaccaccaaggacagctcacgactgccccttcactgcatgtccccaaactcagcatgactcctgtcctcttcaataaagacgtttctatggcc

SEQ ID NO: 114038 - DNA, 549 bp, Homo sapiens
  Payload ID: 2283
  Gene Symbol: CLIP3
  Gene Name: CAP-GLY domain containing linker protein 3
  ENST ID: ENST00000590559
  CDS Start-End: 150-549
aagctgcttaacctctgggccccagtgtgtgagcctcgcattatgatgtctccccagtctccactttggtccccagcgctgtctgcccgaggatttgcctgaaggctgcccccaactctgcacccgccccccgagggccaccgaggaccatgactaagacagatcctgccccgatggccccgccaccccgaggagaggaggaagaagaggaggaggaggatgaacccgtccccgaggcccccagccccacccaggagcgccggcagaagcctgttgtgcacccctcggcacctgcccccctccctaaggactacgctttcaccttcttcgatcccaatgacccggcgtgccaggagatcctgtttgaccctcagaccaccatccccgagctgtttgccattgtgcgccagtgggtgccccaagtccagcacaagatagacgtcatcggcaatgagattctgcgccgaggctgccatgtgaacgatcgtgacgggctgaccgacatgacactgctccactatgcgtgcaaagctggggcccacggagtcg

SEQ ID NO: 114039 - DNA, 2080 bp, Homo sapiens
  Payload ID: 2283
  Gene Symbol: CLIP3
  Gene Name: CAP-GLY domain containing linker protein 3
  Uniprot ID: Q96DZ5
  ENST ID: ENST00000593074
  CDS Start-End: 315-1958
aatcccgagataaacaaacccggggagggggcagccgcgactgaggggcctgacgcgggaggagaagaatggggggctgggcctgggggaggtggcaggcgctgggcgcacacaccggggccctctatgggtaacgggggtccctatggttgcccaagatccagttgcgcggaggccacccggggccctggaagctcctaggggcttggaccctggagcctgccgggcaccctctccagctgacctctgcctccaggatttgcctgaaggctgcccccaactctgcacccgccccccgagggccaccgaggaccatgactaagacagatcctgccccgatggccccgccaccccgaggagaggaggaagaagaggaggaggaggatgaacccgtccccgaggcccccagccccacccaggagcgccggcagaagcctgttgtgcacccctcggcacctgcccccctccctaaggactacgctttcaccttcttcgatcccaatgacccggcgtgccaggagatcctgtttgaccctcagaccaccatccccgagctgtttgccattgtgcgccagtgggtgccccaagtccagcacaagatagacgtcatcggcaatgagattctgcgccgaggctgccatgtgaacgatcgtgacgggctgaccgacatgacactgctccactatgcgtgcaaagctggggcccacggagtcggggaccccgcggcagccgtgcgcctctcgcagcagctgctggcgctgggcgcagatgtgacgctgcgcagccgctggaccaacatgaacgcgcttcactacgcggcctattttgatgtgcccgacctcgtgcgtgtgctgctgaagggtgcgaggccgcgagtggtgaactccacgtgcagtgacttcaaccacggctcagccctgcacatcgctgcttccagcctgtgcctgggcgccgccaaatgtttgctggagcacggcgccaaccctgcgctgaggaatcgaaaaggacaggtgccggcggaggtggtcccagatcctatggacatgtccctggacaaggcagaggcggcactggtggccaaggagctgcggacgcttctggaagaggcagtgccactatcttgcgccctccccaaggtcacgctacccaactatgacaacgtcccaggcaatctcatgcttagcgcactgggcttgcgcctgggagaccgcgtgctgctggatggccagaagacgggcacactgcggttctgtgggaccacggagtttgccagcggccagtgggtgggcgtggagctggacgaacctgagggcaagaacgatggcagcgttgggggcgttcggtacttcatctgccctcccaagcagggtctctttgcctccgtgtccaagatctccaaggcagtggacgcacccccctcctctgtcacctccacaccccggaccccccggatggacttctcccgtgtcaccggcaaaggccgcagggaacacaaaggcaagaagaagaccccatcatccccatctctgggcagcttgcagcagcgtgacggggccaaggctgaggttggagaccaggtccttgtcgcgggccagaagcaggggatcgtgcgcttctacgggaagacagactttgccccaggttactggtatggcattgagctggaccagcccacaggcaagcatgatggctctgtcttcggtgtccggtacttcacttgccccccgaggcatggggtcttcgcaccagcatcccgtattcagaggattggcggatccactgattcccccggggacagcgttggagccaaaaaagtgcatcaagtgacaatgacgcagcccaaacgcaccttcaccacagtccggaccccaaaggacattgcatcagagaactccatttccaggttgctgttctgctgctggttcccctggatgctgagggcggagatgcagtcttagaggccctggacacctgacaaagagacagagtccccactagcatctcctgacacccgaggagccctgagtcaccctgagatagagattcccagtaacacatccagagtagagacccctgttag

SEQ ID NO: 114040 - DNA, 704 bp, Homo sapiens
  Payload ID: 2283
  Gene Symbol: CLIP3
  Gene Name: CAP-GLY domain containing linker protein 3
  ENST ID: ENST00000592017
  CDS Start-End: 305-704
ctccgcccccaccccctgtcggcgtctgggcctcgtccccttctctctgtctcccttgcctcccccatcacgtcccctgacaccgacaccccattgctcccacagtctccccagtctccactttggtccccagcgctgtctgcccgagatccagttgcgcggaggccacccggggccctggaagctcctaggggcttggaccctggagcctgccgggcaccctctccagctgacctctgcctccaggatttgcctgaaggctgcccccaactctgcacccgccccccgagggccaccgaggaccatgactaagacagatcctgccccgatggccccgccaccccgaggagaggaggaagaagaggaggaggaggatgaacccgtccccgaggcccccagccccacccaggagcgccggcagaagcctgttgtgcacccctcggcacctgcccccctccctaaggactacgctttcaccttcttcgatcccaatgacccggcgtgccaggagatcctgtttgaccctcagaccaccatccccgagctgtttgccattgtgcgccagtgggtgccccaagtccagcacaagatagacgtcatcggcaatgagattctgcgccgaggctgccatgtgaacgatcgtgacgggctgaccgacatgacactgctccactatgcgtgcaaagctggggcccacggagtcg

SEQ ID NO: 114041 - DNA, 4293 bp, Homo sapiens
  Payload ID: 2284
  Gene Symbol: CLIP4
  Gene Name: CAP-GLY domain containing linker protein family, member 4
  Uniprot ID: Q8N3C7
  ENST ID: ENST00000320081
  CDS Start-End: 256-2373
gtccccagcgcgtgcgcggggccgtggccgaggcctgcgcgccgcccggccgcctgcactgcgcgcgcgcccaccccgcgtgggaggcagcgggaggggcccggagaggtgtggagcggcgcggcgggaggctccgtgggcggccacgggagacagcgccggcgggagcgcgcctctcggcctttcctccgcgcccccgcgtccccagccggccgctccgagaggacccggaggaggcaggtggctttctagaagatgaccatagaggaccttccagattttccattagaaggaaatcctttgtttggaagatacccatttatattttctgcttctgataccccagttatcttttccatttctgcagcaccaatgccttcagactgtgaattttctttctttgatcctaatgatgcatcatgccaggaaattctttttgatcccaaaacttcagtttcagaattatttgccattttgagacagtgggttcctcaggtccaacaaaacattgacattattggaaatgagattcttaagagaggttgcaatgtgaatgatagagatggattgacagatatgactcttttacattatacctgcaaatctggagctcatggtattggtgatgtggaaacagctgtaaaatttgcaactcagcttattgacctgggagcagacattagtttgcggagtcgctggacaaacatgaatgctttgcattatgctgcttattttgatgtccctgaacttataagagtgattttgaaaacatcgaaaccaaaagatgtggatgccacttgcagtgattttaattttggaacagctttgcatattgcagcatacaacttgtgtgcaggtgctgtgaagtgcctcttggagcagggagcaaatcctgcatttaggaatgacaaaggacagatccctgctgatgttgttccagacccagtagatatgccgttagagatggctgacgccgcagccactgctaaggaaatcaagcagatgcttctagatgcggtgcctctgtcatgtaacatctcaaaggccatgctcccaaattatgatcatgtcactggcaaggcaatgcttacgtcacttggcctgaagttgggggatcgtgttgttattgcaggacagaaggttggtacattaagattttgtggaacaactgaatttgcaagtgggcagtgggctggcattgaactggatgaaccagaaggaaaaaataatggaagtgttggaaaagtccagtactttaaatgtgcccccaagtatggtatttttgcacctctttcaaagataagtaaagcaaaaggtcgaaggaagaatataacacacactccttctacaaaagctgctgtacctctcatcaggtcccagaaaattgacgtagctcatgtgacgtcaaaagtaaatactggattaatgacatcaaaaaaagatagtgcttctgagtcaacactttcattgcctcctggtgaagaacttaaaactgtgacagagaaagatgttgccctgcttggatctgtcagcagctgctcctctacatcttctttggaacacagacagagctaccccaagaaacagaatgcaatcagcagtaacaagaagacaatgagcaaaagcccttccctttcatccagagccagtgctggtttgaattcctcagcaacatctacagcaaataatagccgttgcgagggggaactccgcctcggagagagagtgttagtggtaggacagagactgggcaccattaggttctttgggacaacaaacttcgctccaggatattggtatggtatagagcttgaaaaaccccatggcaagaatgatggttcagttggaggtgtgcagtattttagctgttctccaagatatggaatatttgctcccccatccagggtgcaaagagtaacagattccctggataccctttcagaaatttcttcaaataaacagaaccattcttatcctggttttaggagaagttttagcacaacttctgcttcttcccaaaaggagattaacagaagaaatgctttttccaaatcgaaagctgctttgcgtcgcagttggagcagcacccccaccgcaggtggcattgaagggagcgtgaagctgcacgaggggtctcaggtcctgctcacgagctccaatgagatgggtactgttaggtatgtgggccccactgactttgcttcaggtatctggcttggacttgagctccgaagcgccaagggaaaaaatgatgggtcagtgggtgacaagcgctatttcacctgtaagccgaaccatggagtcttagttcgaccgagcagagtgacctatcggggaattaatgggtcaaaacttgtggatgagaattgttaagcttctaaaatattaaataagctcaaatatatatatttggtgtaaataaagagtccatggtaaatggtttactttatttagccatattaaaattttgaaaatatagttatcttcttaaaaaccattataacaattcagagagagttctttacaaagccatgaatatgaactatggggaatcatggttcttttaaagcaattttcaaaataagtaccaattaaagctttaggttccaagaagattctgggactcaggaagaaaaagtgccatcaggtgaccagctgttgcatttcttgcttattctgttttgtttttgcacatcataatggatttttcttagtgccctaattgtgaagggtttctctagctttggttatgtgtaatgttcacgtgacctttttttgtcaatcatttttggaatttttctttctttctgtgctttattactaataagtccaatgagtgagtagtagctagatgactagtatgtagttttatattttggtaaaattatttgccctttcagaaatgcctcatctaaagatacatgataattttggagttggaaggggccttagaggctctccagctctgcttcttgcccattgccaaatactgaaatggaagcccgtcttacctggggtcactaactggttggttaactgagctaagaatagactgtgggtctcctcacttgtggcccagtgctctttctgctatacaaaatgtctaatctcagatttttcttctgctgcttgactgcttcatctggatgaactacaaaaaacccatgattaaggtttatgaattcaagtaataattagattttttttgcacagacttacttaacttccttattggatatgtttgtaacacataaacacaaagcacttttcaaacatgatgcacttttatctttgtgaataatttactgtcctttcctcctgggatatgagaaacattttaaaaaacgtatttaacagaagagagcaaataaagatatatcaggaaggatgtattagttatttacttaaatgtttataatatctggattttttttgttttgttactcatagaactggtgttgtttgctgtttttatttctctaattgttgcagagttctgcctgttacaaagctacagaactgtattgtttttattttccttcttgagcacatgttaacaaactaagcttcacattagagtgatgtcataatgtaaaatgtttgcattgtggttaggtattgaagtttatgtcctgtctgtgtaaagattcatcttttattgtaaatatttagactttaccacagaaatattggaacagtttgctttataagattaaaaagcatccttcagaatggagcttgccttgtgcttagaaataatatgttgaactattttgcaatatactattttaaatctaaattctgtcacttcgctgcctttttaaaatagtgtggtatttcaaatattgctagagctattttcctgaaatacatttgcaaaataaggctgctttgtaatcaaggaatatttttattgattgaaggaaatgactgtactgcgattcaaaagtaaacttattttattatacagattatttcttaaaaactctatttataccttaacatgaaatccatgaccacaccaaacttggttattcataatttttcctgttaaatataaaacactgtaagttaaaaacagtaatgccaacattgaatttatttttgaggtcaaagaaccagttgttctctttatatttagatgaggatgattgagtccatatactatgtatgtttacatatactatacatgcacattaggtgttttcatttgtgttttgcttatgaaatgtcatttaaagttcacttcttgagcatcaataaaaagggaagctgtgtggttttggaatggta

SEQ ID NO: 114042 - DNA, 2322 bp, Homo sapiens
  Payload ID: 2284
  Gene Symbol: CLIP4
  Gene Name: CAP-GLY domain containing linker protein family, member 4
  Uniprot ID: Q8N3C7
  ENST ID: ENST00000401605
  CDS Start-End: 259-2058
ggggacgctggctggtgctctcaaaggaggactctaagggaggcctgctgaagcctgccaccaccaccaggttttctgtaattggatctgcacaggggcctcagggagtgcagtatgaaaacacccatttccatgcactcccaaccaacacgctgaacaatctgtactcttggtgagaaagacccatgagggactgaaaattctttttctacgtgacactgagaagacagtcacatggtttgggtggctttctagaagatgaccatagaggaccttccagattttccattagaaggaaatcctttgtttggaagatacccatttatattttctgcttctgataccccagttatcttttccatttctgcagcaccaatgccttcagactgtgaattttctttctttgatcctaatgatgcatcatgccaggaaattctttttgatcccaaaacttcagtttcagaattatttgccattttgagacagtgggttcctcaggtccaacaaaacattgacattattggaaatgagattcttaagagaggttgcaatgtgaatgatagagatggattgacagatatgactcttttacattatacctgcaaatctggagctcatggtattggtgatgtggaaacagctgtaaaatttgcaactcagcttattgacctgggagcagacattagtttgcggagtcgctggacaaacatgaatgctttgcattatgctgcttattttgatgtccctgaacttataagagtgattttgaaaacatcgaaaccaaaagatgtggatgccacttgcagtgattttaattttggaacagctttgcatattgcagcatacaacttgtgtgcaggtgctgtgaagtgcctcttggagcagggagcaaatcctgcatttaggaatgacaaaggacagatccctgctgatgttgttccagacccagtagatatgccgttagagatggctgacgccgcagccactgctaaggaaatcaagcagatgcttctagatgcggtgcctctgtcatgtaacatctcaaaggccatgctcccaaattatgatcatgtcactggcaaggcaatgcttacgtcacttggcctgaagttgggggatcgtgttgttattgcaggacagaaggttggtacattaagattttgtggaacaactgaatttgcaagtgggcagtgggctggcattgaactggatgaaccagaaggaaaaaataatggaagtgttggaaaagtccagtactttaaatgtgcccccaagtatggtatttttgcacctctttcaaagataagtaaagcaaaaggtcgaaggaagaatataacacacactccttctacaaaagctgctgtacctctcatcaggtcccagaaaattgacgtagctcatgtgacgtcaaaagtaaatactggattaatgacatcaaaaaaagatagtgcttctgagtcaacactttcattgcctcctggtgaagaacttaaaactgtgacagagaaagatgttgccctgcttggatctgtcagcagctgctcctctacatcttctttggaacacagacagagctaccccaagaaacagaatgcaatcagcagtaacaagaagacaatgagcaaaagcccttccctttcatccagagccagtgctggtttgaattcctcagcaacatctacagcaaataatagccgttgcgagggggaactccgcctcggagagagagtgttagtggtaggacagagactgggcaccattaggttctttgggacaacaaacttcgctccaggatattggtatggtatagagcttgaaaaaccccatggcaagaatgatggttcagttggaggtgtgcagtattttagctgttctccaagatatggaatatttgctcccccatccagggtgcaaagagtaacagattccctggataccctttcagaaatttcttcaaataaacagaaccattcttatcctggttttaggagaagttttagcacaacttctgcttcttcccaaaaggagattaacagaagaaatgctttttccaagtgagtattaagaagatttagaaaaacacctttcaagatgaacatgatgggattctgtgaagaaagaaaagtggagtgctgtatcttttgcattgcttggtagagttttaacacgtaggagaaaaggtgtgataagtgtattgagaagcgttcttcctccctcctttgcaagcgcaattaaaaatgtcaccagtgactaaaactagtgcactgcatatattttatcttcatagaggtcagaactgttaataaaagttaaaggaattta

SEQ ID NO: 114043 - DNA, 2162 bp, Homo sapiens
  Payload ID: 2284
  Gene Symbol: CLIP4
  Gene Name: CAP-GLY domain containing linker protein family, member 4
  ENST ID: ENST00000401617
  CDS Start-End: 409-2124
aaggaggactctaagggaggcctgctgaagcctgccaccaccaccaggttttctgtaattggatctgcacaggggcctcagggagtgcagtatgaaaacacccatttccatgcactcccaaccaacacgctgaacaatctgtactcttggtgagaaagacccatgagggactgaaaattctttttctacgtgacactgagaagacagtcacatggtttggaattttctttctttgatcctaatgatgcatcatgccaggaaattctttttgatcccaaaacttcagtttcagaattatttgccattttgagacagtgggttcctcaggtccaacaaaacattgacattattggaaatgagattcttaagagaggttgcaatgtgaatgatagagatggattgacagatatgactcttttacattatacctgcaaatctggagctcatggtattggtgatgtggaaacagctgtaaaatttgcaactcagcttattgacctgggagcagacattagtttgcggagtcgctggacaaacatgaatgctttgcattatgctgcttattttgatgtccctgaacttataagagtgattttgaaaacatcgaaaccaaaagatgtggatgccacttgcagtgattttaattttggaacagctttgcatattgcagcatacaacttgtgtgcaggtgctgtgaagtgcctcttggagcagggagcaaatcctgcatttaggaatgacaaaggacagatccctgctgatgttgttccagacccagtagatatgccgttagagatggctgacgccgcagccactgctaaggaaatcaagcagatgcttctagatgcggtgcctctgtcatgtaacatctcaaaggccatgctcccaaattatgatcatgtcactggcaaggcaatgcttacgtcacttggcctgaagttgggggatcgtgttgttattgcaggacagaaggttggtacattaagattttgtggaacaactgaatttgcaagtgggcagtgggctggcattgaactggatgaaccagaaggaaaaaataatggaagtgttggaaaagtccagtactttaaatgtgcccccaagtatggtatttttgcacctctttcaaagataagtaaagcaaaaggtcgaaggaagaatataacacacactccttctacaaaagctgctgtacctctcatcaggtcccagaaaattgacgtagctcatgtgacgtcaaaagtaaatactggattaatgacatcaaaaaaagatagtgcttctgagtcaacactttcattgcctcctggtgaagaacttaaaactgtgacagagaaagatgttgccctgcttggatctgtcagcagctgctcctctacatcttctttggaacacagacagagctaccccaagaaacagaatgcaatcagcagtaacaagaagacaatgagcaaaagcccttccctttcatccagagccagtgctggtttgaattcctcagcaacatctacagcaaataatagccgttgcgagggggaactccgcctcggagagagagtgttagtggtaggacagagactgggcaccattaggttctttgggacaacaaacttcgctccaggatattggtatggtatagagcttgaaaaaccccatggcaagaatgatggttcagttggaggtgtgcagtattttagctgttctccaagatatggaatatttgctcccccatccagggtgcaaagagtaacagattccctggataccctttcagaaatttcttcaaataaacagaaccattcttatcctggttttaggagaagttttagcacaacttctgcttcttcccaaaaggagattaacagaagaaatgctttttccaaatcgaaagctgctttgcgtcgcagttggagcagcacccccaccgcaggtggcattgaagggagcgtgaagctgcacgaggggtctcaggtcctgctcacgagctccaatgagatgggtactgttagcatgtttaggattacgggaatgctggttttgctttttcatgcaacaacacaggagccatctgctgcaatgaaattagcaaagtcaaattgtgtgttctttagggactcattttaaaaaccattaaagacagattgacaacacacttcatacaa

SEQ ID NO: 114044 - DNA, 2480 bp, Homo sapiens
  Payload ID: 2284
  Gene Symbol: CLIP4
  Gene Name: CAP-GLY domain containing linker protein family, member 4
  Uniprot ID: Q8N3C7
  ENST ID: ENST00000404424
  CDS Start-End: 333-2450
acattatctctgagagcactcgcagatgctgagcctgcagagacagagaaactggcagctgaccagggtcagggatggtcatgtattcaaatattgtgggttttagtcaagtgtgctccacccgattcaacaatgtgatgtgactgctcctagcaactattttgatatggtgaatgttgttaagcataggacctaagaagaggtggcagtctctttcctctccgcacttggcaggccacccactcattcctgataatcacatttaagagagctctggacaagctggaatgcatccaagagaatccctcaacatgctggtggctttctagaagatgaccatagaggaccttccagattttccattagaaggaaatcctttgtttggaagatacccatttatattttctgcttctgataccccagttatcttttccatttctgcagcaccaatgccttcagactgtgaattttctttctttgatcctaatgatgcatcatgccaggaaattctttttgatcccaaaacttcagtttcagaattatttgccattttgagacagtgggttcctcaggtccaacaaaacattgacattattggaaatgagattcttaagagaggttgcaatgtgaatgatagagatggattgacagatatgactcttttacattatacctgcaaatctggagctcatggtattggtgatgtggaaacagctgtaaaatttgcaactcagcttattgacctgggagcagacattagtttgcggagtcgctggacaaacatgaatgctttgcattatgctgcttattttgatgtccctgaacttataagagtgattttgaaaacatcgaaaccaaaagatgtggatgccacttgcagtgattttaattttggaacagctttgcatattgcagcatacaacttgtgtgcaggtgctgtgaagtgcctcttggagcagggagcaaatcctgcatttaggaatgacaaaggacagatccctgctgatgttgttccagacccagtagatatgccgttagagatggctgacgccgcagccactgctaaggaaatcaagcagatgcttctagatgcggtgcctctgtcatgtaacatctcaaaggccatgctcccaaattatgatcatgtcactggcaaggcaatgcttacgtcacttggcctgaagttgggggatcgtgttgttattgcaggacagaaggttggtacattaagattttgtggaacaactgaatttgcaagtgggcagtgggctggcattgaactggatgaaccagaaggaaaaaataatggaagtgttggaaaagtccagtactttaaatgtgcccccaagtatggtatttttgcacctctttcaaagataagtaaagcaaaaggtcgaaggaagaatataacacacactccttctacaaaagctgctgtacctctcatcaggtcccagaaaattgacgtagctcatgtgacgtcaaaagtaaatactggattaatgacatcaaaaaaagatagtgcttctgagtcaacactttcattgcctcctggtgaagaacttaaaactgtgacagagaaagatgttgccctgcttggatctgtcagcagctgctcctctacatcttctttggaacacagacagagctaccccaagaaacagaatgcaatcagcagtaacaagaagacaatgagcaaaagcccttccctttcatccagagccagtgctggtttgaattcctcagcaacatctacagcaaataatagccgttgcgagggggaactccgcctcggagagagagtgttagtggtaggacagagactgggcaccattaggttctttgggacaacaaacttcgctccaggatattggtatggtatagagcttgaaaaaccccatggcaagaatgatggttcagttggaggtgtgcagtattttagctgttctccaagatatggaatatttgctcccccatccagggtgcaaagagtaacagattccctggataccctttcagaaatttcttcaaataaacagaaccattcttatcctggttttaggagaagttttagcacaacttctgcttcttcccaaaaggagattaacagaagaaatgctttttccaaatcgaaagctgctttgcgtcgcagttggagcagcacccccaccgcaggtggcattgaagggagcgtgaagctgcacgaggggtctcaggtcctgctcacgagctccaatgagatgggtactgttaggtatgtgggccccactgactttgcttcaggtatctggcttggacttgagctccgaagcgccaagggaaaaaatgatgggtcagtgggtgacaagcgctatttcacctgtaagccgaaccatggagtcttagttcgaccgagcagagtgacctatcggggaattaatgggtcaaaacttgtggatgagaattgttaagcttctaaaatattaaataagctcaaatat

SEQ ID NO: 114045 - DNA, 562 bp, Homo sapiens
  Payload ID: 2284
  Gene Symbol: CLIP4
  Gene Name: CAP-GLY domain containing linker protein family, member 4
  ENST ID: ENST00000438819
  CDS Start-End: 284-562
aatctttctgattctcttctgatggactgctgctctgcttgtatatgtgtctttagtttggtgcctctcatcttttagttatgctgactctagaaaattttctttctttgatcctaatgatgcatcatgccaggaaattctttttgatcccaaaacttcagtttcagaattatttgccattttgagacagtgggttcctcaggtccaacaaaacattgacattattggaaatgagattcttaagagaggttgcaatgtgaatgatagagatggattgacagatatgactcttttacattatacctgcaaatctggagctcatggtattggtgatgtggaaacagctgtaaaatttgcaactcagcttattgacctgggagcagacattagtttgcggagtcgctggacaaacatgaatgctttgcattatgctgcttattttgatgtccctgaacttataagagtgattttgaaaacatcgaaaccaaaagatgtggatgccacttgcagtgattttaattttggaacagctttgcatattgcagcatacaacttgtgtgca

SEQ ID NO: 114046 - DNA, 826 bp, Homo sapiens
  Payload ID: 2284
  Gene Symbol: CLIP4
  Gene Name: CAP-GLY domain containing linker protein family, member 4
  ENST ID: ENST00000449202
  CDS Start-End: 183-826
gacactcttgaaccatatctcaaatctgaagtctcctggcttcagtaaggcccttttatggggtccagacagtcctgaaccagcctgaagatgctagtggacatccccatttattactgctctgtgttaaagcatggaccaaggagtcttggaaaaaaaatcacaaggtggctttctagaagatgaccatagaggaccttccagattttccattagaaggaaatcctttgtttggaagatacccatttatattttctgcttctgataccccagttatcttttccatttctgcagcaccaatgccttcagactgtgaattttctttctttgatcctaatgatgcatcatgccaggaaattctttttgatcccaaaacttcagtttcagaattatttgccattttgagacagtgggttcctcaggtccaacaaaacattgacattattggaaatgagattcttaagagaggttgcaatgtgaatgatagagatggattgacagatatgactcttttacattatacctgcaaatctggagctcatggtattggtgatgtggaaacagctgtaaaatttgcaactcagcttattgacctgggagcagacattagtttgcggagtcgctggacaaacatgaatgctttgcattatgctgcttattttgatgtccctgaacttataagagtgattttgaaaacatcgaaaccaaaagatgtggatgccacttgcagtgattttaattttggaacagctttgcatattgcagcatacaacttgtgtgcaggtgctgtgaagtgcctcttggagcagggagcaaatcctgcatt

SEQ ID NO: 114047 - DNA, 2311 bp, Homo sapiens
  Payload ID: 2284
  Gene Symbol: CLIP4
  Gene Name: CAP-GLY domain containing linker protein family, member 4
  ENST ID: ENST00000456385
  CDS Start-End: 288-581
agtaacgctttcttgttaccagatgacagagagtcaggctgtcagagttcacgactttaggtgcacagtttcaccctgtctggtccttgggagacggagaaggggtcaggagaaaacgtgggtgaagaggcagcaaagccgcaggagatatgaactaattgctcaacgtgggtgtagcacggattaggccttttacagcaagcgctgccagcagggaactggtggatgtactcttgaccacgctcggctggactctggggagcccaagacgggtggctttctagaagatgaccatagaggaccttccagattttccattagaaggaaatcctttgtttggaagatacccatttatattttctgcttctgataccccagttatcttttccatttctgcagcaccaatgccttcagactgtgaattttctttctttgatcctaatgatgcatcatgccaggaaattctttttgatcccaaaacttcagtttcagaattatttgccattttgagacagtgggttcctcaggtccaacaaaacattgacattattggaaatgaggtgatgtggaaacagctgtaaaatttgcaactcagcttattgacctgggagcagacattagtttgcggagtcgctggacaaacatgaatgctttgcattatgctgcttattttgatgtccctgaacttataagagtgattttgaaaacatcgaaaccaaaagatgtggatgccacttgcagtgattttaattttggaacagctttgcatattgcagcatacaacttgtgtgcaggtgctgtgaagtgcctcttggagcagggagcaaatcctgcatttaggaatgacaaaggacagatccctgctgatgttgttccagacccagtagatatgccgttagagatggctgacgccgcagccactgctaaggaaatcaagcagatgcttctagatgcggtgcctctgtcatgtaacatctcaaaggccatgctcccaaattatgatcatgtcactggcaaggcaatgcttacgtcacttggcctgaagttgggggatcgtgttgttattgcaggacagaaggttggtacattaagattttgtggaacaactgaatttgcaagtgggcagtgggctggcattgaactggatgaaccagaaggaaaaaataatggaagtgttggaaaagtccagtactttaaatgtgcccccaagtatggtatttttgcacctctttcaaagataagtaaagcaaaaggtcgaaggaagaatataacacacactccttctacaaaagctgctgtacctctcatcaggtcccagaaaattgacgtagctcatgtgacgtcaaaagtaaatactggattaatgacatcaaaaaaagatagtgcttctgagtcaacactttcattgcctcctggtgaagaacttaaaactgtgacagagaaagatgttgccctgcttggatctgtcagcagctgctcctctacatcttctttggaacacagacagagctaccccaagaaacagaatgcaatcagcagtaacaagaagacaatgagcaaaagcccttccctttcatccagagccagtgctggtatctatggctttttcaaccaggctttcttggtgttttttatcttggtttgtttgtttgaattcctcagcaacatctacagcaaataatagccgttgcgagggggaactccgcctcggagagagagtgttagtggtaggacagagactgggcaccattaggttctttgggacaacaaacttcgctccaggatattggtatggtatagagcttgaaaaaccccatggcaagaatgatggttcagttggaggtgtgcagtattttagctgttctccaagatatggaatatttgctcccccatccagggtgcaaagagtaacagattccctggataccctttcagaaatttcttcaaataaacagaaccattcttatcctggttttaggagaagttttagcacaacttctgcttcttcccaaaaggagattaacagaagaaatgctttttccaagtgagtattaagaagatttagaaaaacacctttcaagatgaacatgatgggattctgtgaagaaagaaaagtggagtgctgtatcttttgcattgcttggtagagttttaacacgtaggagaaaaggtgtgataagtgtattgagaagcgttcttcctccctcctttgcaagcgcaattaaaaatgtcaccagtgactaaaactagtgcactgcatatattttatcttcatagaggtcagaactgttaataaaagttaaaggaattt

SEQ ID NO: 114048 - DNA, 2269 bp, Homo sapiens
  Payload ID: 2284
  Gene Symbol: CLIP4
  Gene Name: CAP-GLY domain containing linker protein family, member 4
  ENST ID: ENST00000415891
  CDS Start-End: 223-1710
agggaggcctgctgaagcctgccaccaccaccaggttttctgtaattggatctgcacaggggcctcagggagtgcagtatgaaaacacccatttccatgcactcccaaccaacacgctgaacaatctgtactcttggtgagaaagacccatgagggactgaaaattctttttctacgtgacactgagaagacagtcacatggtttgggtggctttctagaagatgaccatagaggaccttccagattttccattagaaggaaatcctttgtttggaagatacccatttatattttctgcttctgataccccagttatcttttccatttctgcagcaccaatgccttcagactgtgaattttctttctttgatcctaatgatgcatcatgccaggaaattctttttgatcccaaaacttcagtttcagaattatttgccattttgagacagtgggttcctcaggtccaacaaaacattgacattattggaaatgagattcttaagagaggttgcaatgtgaatgatagagatggattgacagatatgactcttttacattatacctgcaaatctggagctcatggtattggtgatgtggaaacagctgtaaaatttgcaactcagcttattgacctgggagcagacattagtttgcggagtcgctggacaaacatgaatgctttgcattatgctgcttattttgatgtccctgaacttataagagtgattttgaaaacatcgaaaccaaaagatgtggatgccacttgcagtgattttaattttggaacagctttgcatattgcagcatacaacttgtgtgcaggtgctgtgaagtgcctcttggagcagggagcaaatcctgcatttaggaatgacaaaggacagatccctgctgatgttgttccagacccagtagatatgccgttagagatggctgacgccgcagccactgctaaggaaatcaagcagatgcttctagatgcggtgcctctgtcatgtaacatctcaaaggccatgctcccaaattatgatcatgtcactggcaaggcaatgcttacgtcacttggcctgaagttgggggatcgtgttgttattgcaggacagaaggttggtacattaagattttgtggaacaactgaatttgcaagtgggcagtgggctggcattgaactggatgaaccagaaggaaaaaataatggaagtgttggaaaagtccagtactttaaatgtgcccccaagtatggtatttttgcacctctttcaaagataagtaaagcaaaaggtcgaaggaagaatataacacacactccttctacaaaagctgctgtacctctcatcaggtcccagaaaattgacgtagctcatgtgacgtcaaaagtaaatactggattaatgacatcaaaaaaagatagtgcttctgagtcaacactttcattgcctcctggtgaagaacttaaaactgtgacagagaaagatgttgccctgcttggatctgtcagcagctgctcctctacatcttctttggaacacagacagagctaccccaagaaacagaatgcaatcagcagtaacaagaagacaatgagcaaaagcccttccctttcatccagagccagtgctggtatctatggctttttcaaccaggctttcttggtgttttttatcttggtttgtttgtttgaattcctcagcaacatctacagcaaataatagccgttgcgagggggaactccgcctcggagagagagtgttagtggtaggacagagactgggcaccattaggttctttgggacaacaaacttcgctccaggatattggtatggtatagagcttgaaaaaccccatggcaagaatgatggttcagttggaggtgtgcagtattttagctgttctccaagatatggaatatttgctcccccatccagggtgcaaagagtaacagattccctggataccctttcagaaatttcttcaaataaacagaaccattcttatcctggttttaggagaagttttagcacaacttctgcttcttcccaaaaggagattaacagaagaaatgctttttccaagtgagtattaagaagatttagaaaaacacctttcaagatgaacatgatgggattctgtgaagaaagaaaagtggagtgctgtatcttttgcattgcttggtagagttttaacacgtaggagaaaaggtgtgataagtgtattgagaagcgttcttcctccctcctttgcaagcgcaattaaaaatgtcaccagtga

SEQ ID NO: 114049 - DNA, 6111 bp, Homo sapiens
  Payload ID: 2285
  Gene Symbol: CIC
  Gene Name: capicua transcriptional repressor
  ENST ID: ENST00000160740
  CDS Start-End: 686-5506
gggggaggcgcggcggggggaggggagcgcgtagtagtggcggggcggggaggcggtggtggttcggcgcggggctcgctcggagcgcacggacgcacgcacgctggtccgtctgcccgcccggggccggaggtcgacccggcgctgagcctcgggcccggggcccggaaaggcggggcggcggcgccggcagccgggacgcgcggggccagagccgttacccgccggagctgcgagggagggagggaacgagcgagccagcgagcggggaagggagggggccgcccccgcgcacgcgcgtcgcgccccgccccgcctgccccgcctgccccgcccgccggactccgcgagggaggagggagagggagggggcggtgccgatggcccccgtgccgcgcgccccgtgacggcccccgcgcgcgccggggggcggggcggggccggtgcgcgctgacctcccccgccccccgggcggcgggaggcaggcggcgctgtgcgcaggcgcgcccggcagagacccccgcgtggggcggccggaggggggcggcgggggggggggcatgcggcgacggcctcccgctccccccgggcccaagcggcgacggccgaggagcgggctgcgggcggagcggcgtcggccgctgaggaggtgcgagcccctgccgggtcccccctgcgccggaccatgtattcggcccacaggcccctgatgcccgcgtccagcgcggcctcccgtggcctcggcatgttcgtgtggacgaatgtggaacctcgctctgtggctgtgttcccttggcactccttagtccccttcctggcacccagccagcctgacccctccgtgcagccgagcgaggcccagcaacctgccagccacccagtggcctccaaccagagcaaagaacctgctgagtcggcagctgttgctcatgaacggccaccaggtgggacagggagtgctgaccctgagcggccccctggagccacatgccctgagagcccaggacccggacccccacaccctttgggggtggtggaatctggtaagggtccgcctcccaccacggaggaggaggcctccggccccccaggagagccccggctggacagtgagacagagagtgaccatgatgatgccttcctctccatcatgtctcctgagatccagttgcctctaccgcccggaaaacgtcggacccagtccctcagtgccctacccaaggaacgggactcatcttctgagaaggatggacgcagccccaacaagcgggagaaggaccacatccggcggcccatgaatgccttcatgatcttcagcaagcggcaccgggccctggtccaccagcgtcatcccaaccaggacaaccggaccgtcagcaagatcctgggcgagtggtggtatgccctggggcccaaggagaagcagaagtaccacgacctggccttccaggtgaaggaggcccacttcaaggcccacccagattggaagtggtgcaacaaggaccgaaagaagtccagctcagaggccaagcccacgagcctggggctggcaggagggcacaaggagacgcgggagcggagcatgtcggagacgggcactgctgctgcccctggggtgtcctctgagctcctgtccgttgcagcccagacactcctgagctcagacaccaaggctccggggagcagctcctgtggggcagaacggctacacacagttgggggacctggctcagcccggccccgagctttctcccacagcggggtacacagcctggacggcggagaagtagacagtcaggcgctacaggaactgacgcagatggtgtctggccctgcatcgtactctggcccaaagccttctacccagtatggagctccaggaccctttgcagcccctggtgagggaggtgccttggcggccactgggcggcccccgctgctgcccacccgagcttctcgttctcagcgtgcggccagtgaggacatgacgagtgatgaggagcgcatggtcatctgtgaggaggaaggggatgatgatgtcattgctgacgatggcttcggcaccactgacattgatctcaagtgcaaggagcgggtgaccgacagcgagagtggggacagctctggggaggacccagagggcaacaagggctttggtcggaaggtgttttcacctgtgatccgttcctcctttacccactgccgccccccactggaccctgagcccccagggcccccggatcctcctgtagcctttggcaaaggctatggttccgccccatcctcctctgcgtcctcgcctgcttcctcctcagcctcggcagccacctccttctcactgggctcaggaaccttcaaggcccaggagtctggtcagggcagcacagcgggccccctacggcccccaccccctggggctgggggtccagcgacaccttccaaggcaacccggttcctcccaatggatcctgccaccttccggcgcaagagacccgaaagtgtgggtggcctggagccaccaggcccctcagtcatcgcggcccctcccagcggaggaggaaacatcctgcagacactggtgctgcccccaaacaaggaggagcaagagggcggcggagccagagtgccctccgcccccgccccatcactggcctatggggccccagcagctcccctgtcccgtcctgccgccaccatggtcaccaatgtggtgcggcctgtcagcagcactcctgtgcccatcgcctctaagcccttccccacctctggccgggctgaggcgtctccaaatgacacagcaggtgccaggactgaaatgggcactgggtctcgggtgcctgggggctccccgctgggtgtcagcttagtgtattcggacaagaagtcggcagcagccacctcaccagccccacacttggtggctggacccctgctgggcactgtggggaaggcgcctgccactgtcactaacctactggtgggcaccccggggtatggggcccctgcgccccctgctgtccagttcattgcccagggggcccctggtggtgggaccactgcgggctcaggagcaggtgctgggagtggccccaatgggccagtacccctgggcatcctgcaaccaggtgccctgggcaaggctgggggaatcacccaggtacagtacatcctgcccacgctgccccagcagcttcaggtggcacctgccccagcaccagcccctgggaccaaggcagcggctcccagcggccctgcacccaccaccagcatccgtttcaccctcccaccgggcacttccaccaacggcaaagtcctggctgccactgcacccactcctggcatccccatcctgcagtctgtaccctccgccccaccccccaaagcccagtcagtttctcccgtgcaggccccgcccccgggtggctcagcccagctgctgcctgggaaggtcctagtgcctctggccgcccctagcatgtcagtgcggggtggaggggccggccagccactgccactggtgagcccgcccttctcagtacctgtgcagaatggtgcccagccccccagcaagatcatccagctgaccccggtgcctgtgagcacacccagcggcctggtgccgcccctgagcccagccacactccctggacccacctctcagcctcagaaggtcctgttgccctcctccaccagaatcacctatgtgcagtcagcgggcgggcacgcgctgcccctgggtaccagccctgcgtccagccaggctggaacagtcacctcgtacgggcccacgagctctgtagctctaggcttcacctcgctggggcccagcggccccgccttcgtgcagcccctgctctcaggccaagccccactgctggctcccggtcaggtgggcgtgtcacctgtgcccagtccccagctgccgcctgcctgtgcagcccccggaggtcctgtcataacagcattttactctggcagccctgcacccacctcctcagcacccctggcccagccatcccaggcccccccaagcctggtctacactgtggccaccagcacaaccccacctgcagccaccattctgcccaagggcccgccagcccctgccactgccaccccagccccgactagccctttccccagcgccacaggttccatgacctacagcttagtggcccccaaggcccagcggcccagcccgaaggccccccagaaagtgaaggcagccatcgccagcattcccgtggggtcctttgaggcaggtgcctctgggcggcctggccctgcaccccggcagcctctggagcctggcccagtccgagagccaactgccccagagtctgagcttgaggggcagcccacaccaccagcccctccacccctgccagagacctggactcccacggcccggagcagccccccactgcccccacctgctgaggagcggaccagcgccaagggccctgagaccatggccagcaaattccccagctcatcttcagactggcgcgtccctgggcagggcctggagaatcgtggggagcctcccactcctcccagcccggccccagctccagctgtagcccctggtggcagcagcgagagcagcagtgggcgggcagccggggacaccccggagcgcaaggaggcggctggtactggcaagaaggtgaaggtgcggcccccgcccctgaagaagacctttgactctgtggacaacagggtcctgtcagaagtggacttcgaagagcgctttgctgagttgcctgagtttcggcctgaggaggtgctgccctcccccaccctgcagtctctggccacctcaccccgggccatcctgggctcttaccgcaagaagaggaagaactccacggacctggattcagcacccgaggaccccacctcgcccaagcgcaagatgagaagacgctccagctgcagctcggagcccaacacccccaagagtgccaagtgcgagggggacatcttcacctttgaccgtacaggtacagaagccgaggacgtgcttggggagctagagtatgacaaggtgccatactcctccctgcggcgcaccctggaccagcgccgggccctggtcatgcagctctttcaggaccatggcttcttcccgtcagcccaggccacagccgccttccaggcccgctatgcagacatctttccctccaaggtttgtctgcagttgaagatccgtgaggtgcgccagaagatcatgcaggctgccactcccacggagcagccccctggagctgaggctcctctccctgtaccgccccccactggcaccgctgctgcccctgcccccactcccagccccgcagggggccctgaccccacctcacccagctcggactctggcacggcccaggctgccccgccactgcctccacccccagagtcggggcctggacagcctggctgggagggggctccccagccctcccccccacccccaggtccctccacagctgccacaggcaggtgagggacccctgagaagatgccaggacttatagtaccccctcaggacatggacagtatgtgggggcaggaaggttatctcctcccgggtaaagccatttcgtcctctccagtttggggcggaatgaggcctgctcctcttgtaaatacccccttccctcgaagctccctcccggtgctggggggcagctgaggggctgcaggggcagtctccctcctccaagcccctgtacataacctggagcgtgtgaccttcagagcttttcactttatgcaaaatggctcctgtgagggctgcaagctggagggtggtgcaggccttgggccacagggaggcgcctgtggaatagggggagttcatgcaccccttttttccccagaggggctggactcaggttagtttgggggtgggggctcctgcactttgccacaggcacggggagggttttctcctcaccccctctgccctcccaacttgggttgtactttctaagaaggtgattccccctgcccttgcccccttccccagaacaaaacatgttgatcatgtgcaatatttcttactgtgccgagaagccgcaatgagcgagattaaagctgtttaacaca

SEQ ID NO: 114050 - DNA, 927 bp, Homo sapiens
  Payload ID: 2285
  Gene Symbol: CIC
  Gene Name: capicua transcriptional repressor
  ENST ID: ENST00000573349
  CDS Start-End: 1-927
agctcatcttcagactggcgcgtccctgggcagggcctggagaatcgtggggagcctcccactcctcccagcccggccccagctccagctgtagcccctggtggcagcagcgagagcagcagtgggcgggcagccggggacaccccggagcgcaaggaggcggctggtactggcaagaaggtgaaggtgcggcccccgcccctgaagaagacctttgactctgtggacaaggtcctgtcagaagtggacttcgaagagcgctttgctgagttgcctgagtttcggcctgaggaggtgctgccctcccccaccctgcagtctctggccacctcaccccgggccatcctgggctcttaccgcaagaagaggaagaactccacggacctggattcagcacccgaggaccccacctcgcccaagcgcaagatgagaagacgctccagctgcagctcggagcccaacacccccaagagtgccaagtgcgagggggacatcttcacctttgaccgtacagaagccgaggacgtgcttggggagctagagtatgacaaggtgccatactcctccctgcggcgcaccctggaccagcgccgggccctggtcatgcagctctttcaggaccatggcttcttcccgtcagcccaggccacagccgccttccaggcccgctatgcagacatctttccctccaaggtttgtctgcagttgaagatccgtgaggtgcgccagaagatcatgcaggctgccactcccacggagcagccccctggagctgaggctcctctccctgtaccgccccccactggcaccgctgctgcccctgcccccactcccagccccgcagggggccctgaccccacctcacccagctcggactctggcacggcccaggctgccccgccactgcctccacccccagagtcgggg

SEQ ID NO: 114051 - DNA, 5473 bp, Homo sapiens
  Payload ID: 2285
  Gene Symbol: CIC
  Gene Name: capicua transcriptional repressor
  Uniprot ID: Q96RK0
  ENST ID: ENST00000575354
  CDS Start-End: 41-4867
ggaggtgcgagcccctgccgggtcccccctgcgccggaccatgtattcggcccacaggcccctgatgcccgcgtccagcgcggcctcccgtggcctcggcatgttcgtgtggacgaatgtggaacctcgctctgtggctgtgttcccttggcactccttagtccccttcctggcacccagccagcctgacccctccgtgcagccgagcgaggcccagcaacctgccagccacccagtggcctccaaccagagcaaagaacctgctgagtcggcagctgttgctcatgaacggccaccaggtgggacagggagtgctgaccctgagcggccccctggagccacatgccctgagagcccaggacccggacccccacaccctttgggggtggtggaatctggtaagggtccgcctcccaccacggaggaggaggcctccggccccccaggagagccccggctggacagtgagacagagagtgaccatgatgatgccttcctctccatcatgtctcctgagatccagttgcctctaccgcccggaaaacgtcggacccagtccctcagtgccctacccaaggaacgggactcatcttctgagaaggatggacgcagccccaacaagcgggagaaggaccacatccggcggcccatgaatgccttcatgatcttcagcaagcggcaccgggccctggtccaccagcgtcatcccaaccaggacaaccggaccgtcagcaagatcctgggcgagtggtggtatgccctggggcccaaggagaagcagaagtaccacgacctggccttccaggtgaaggaggcccacttcaaggcccacccagattggaagtggtgcaacaaggaccgaaagaagtccagctcagaggccaagcccacgagcctggggctggcaggagggcacaaggagacgcgggagcggagcatgtcggagacgggcactgctgctgcccctggggtgtcctctgagctcctgtccgttgcagcccagacactcctgagctcagacaccaaggctccggggagcagctcctgtggggcagaacggctacacacagttgggggacctggctcagcccggccccgagctttctcccacagcggggtacacagcctggacggcggagaagtagacagtcaggcgctacaggaactgacgcagatggtgtctggccctgcatcgtactctggcccaaagccttctacccagtatggagctccaggaccctttgcagcccctggtgagggaggtgccttggcggccactgggcggcccccgctgctgcccacccgagcttctcgttctcagcgtgcggccagtgaggacatgacgagtgatgaggagcgcatggtcatctgtgaggaggaaggggatgatgatgtcattgctgacgatggcttcggcaccactgacattgatctcaagtgcaaggagcgggtgaccgacagcgagagtggggacagctctggggaggacccagagggcaacaagggctttggtcggaaggtgttttcacctgtgatccgttcctcctttacccactgccgccccccactggaccctgagcccccagggcccccggatcctcctgtagcctttggcaaaggctatggttccgccccatcctcctctgcgtcctcgcctgcttcctcctcagcctcggcagccacctccttctcactgggctcaggaaccttcaaggcccaggagtctggtcagggcagcacagcgggccccctacggcccccaccccctggggctgggggtccagcgacaccttccaaggcaacccggttcctcccaatggatcctgccaccttccggcgcaagagacccgaaagtgtgggtggcctggagccaccaggcccctcagtcatcgcggcccctcccagcggaggaggaaacatcctgcagacactggtgctgcccccaaacaaggaggagcaagagggcggcggagccagagtgccctccgcccccgccccatcactggcctatggggccccagcagctcccctgtcccgtcctgccgccaccatggtcaccaatgtggtgcggcctgtcagcagcactcctgtgcccatcgcctctaagcccttccccacctctggccgggctgaggcgtctccaaatgacacagcaggtgccaggactgaaatgggcactgggtctcgggtgcctgggggctccccgctgggtgtcagcttagtgtattcggacaagaagtcggcagcagccacctcaccagccccacacttggtggctggacccctgctgggcactgtggggaaggcgcctgccactgtcactaacctactggtgggcaccccggggtatggggcccctgcgccccctgctgtccagttcattgcccagggggcccctggtggtgggaccactgcgggctcaggagcaggtgctgggagtggccccaatgggccagtacccctgggcatcctgcaaccaggtgccctgggcaaggctgggggaatcacccaggtacagtacatcctgcccacgctgccccagcagcttcaggtggcacctgccccagcaccagcccctgggaccaaggcagcggctcccagcggccctgcacccaccaccagcatccgtttcaccctcccaccgggcacttccaccaacggcaaagtcctggctgccactgcacccactcctggcatccccatcctgcagtctgtaccctccgccccaccccccaaagcccagtcagtttctcccgtgcaggccccgcccccgggtggctcagcccagctgctgcctgggaaggtcctagtgcctctggccgcccctagcatgtcagtgcggggtggaggggccggccagccactgccactggtgagcccgcccttctcagtacctgtgcagaatggtgcccagccccccagcaagatcatccagctgaccccggtgcctgtgagcacacccagcggcctggtgccgcccctgagcccagccacactccctggacccacctctcagcctcagaaggtcctgttgccctcctccaccagaatcacctatgtgcagtcagcgggcgggcacgcgctgcccctgggtaccagccctgcgtccagccaggctggaacagtcacctcgtacgggcccacgagctctgtagctctaggcttcacctcgctggggcccagcggccccgccttcgtgcagcccctgctctcagcaggccaagccccactgctggctcccggtcaggtgggcgtgtcacctgtgcccagtccccagctgccgcctgcctgtgcagcccccggaggtcctgtcataacagcattttactctggcagccctgcacccacctcctcagcacccctggcccagccatcccaggcccccccaagcctggtctacactgtggccaccagcacaaccccacctgcagccaccattctgcccaagggcccgccagcccctgccactgccaccccagccccgactagccctttccccagcgccacagcaggttccatgacctacagcttagtggcccccaaggcccagcggcccagcccgaaggccccccagaaagtgaaggcagccatcgccagcattcccgtggggtcctttgaggcaggtgcctctgggcggcctggccctgcaccccggcagcctctggagcctggcccagtccgagagccaactgccccagagtctgagcttgaggggcagcccacaccaccagcccctccacccctgccagagacctggactcccacggcccggagcagccccccactgcccccacctgctgaggagcggaccagcgccaagggccctgagaccatggccagcaaattccccagctcatcttcagactggcgcgtccctgggcagggcctggagaatcgtggggagcctcccactcctcccagcccggccccagctccagctgtagcccctggtggcagcagcgagagcagcagtgggcgggcagccggggacaccccggagcgcaaggaggcggctggtactggcaagaaggtgaaggtgcggcccccgcccctgaagaagacctttgactctgtggacaacagggtcctgtcagaagtggacttcgaagagcgctttgctgagttgcctgagtttcggcctgaggaggtgctgccctcccccaccctgcagtctctggccacctcaccccgggccatcctgggctcttaccgcaagaagaggaagaactccacggacctggattcagcacccgaggaccccacctcgcccaagcgcaagatgagaagacgctccagctgcagctcggagcccaacacccccaagagtgccaagtgcgagggggacatcttcacctttgaccgtacaggtacagaagccgaggacgtgcttggggagctagagtatgacaaggtgccatactcctccctgcggcgcaccctggaccagcgccgggccctggtcatgcagctctttcaggaccatggcttcttcccgtcagcccaggccacagccgccttccaggcccgctatgcagacatctttccctccaaggtttgtctgcagttgaagatccgtgaggtgcgccagaagatcatgcaggctgccactcccacggagcagccccctggagctgaggctcctctccctgtaccgccccccactggcaccgctgctgcccctgcccccactcccagccccgcagggggccctgaccccacctcacccagctcggactctggcacggcccaggctgccccgccactgcctccacccccagagtcggggcctggacagcctggctgggagggggctccccagccctcccccccacccccaggtccctccacagctgccacaggcaggtgagggacccctgagaagatgccaggacttatagtaccccctcaggacatggacagtatgtgggggcaggaaggttatctcctcccgggtaaagccatttcgtcctctccagtttggggcggaatgaggcctgctcctcttgtaaatacccccttccctcgaagctccctcccggtgctggggggcagctgaggggctgcaggggcagtctccctcctccaagcccctgtacataacctggagcgtgtgaccttcagagcttttcactttatgcaaaatggctcctgtgagggctgcaagctggagggtggtgcaggccttgggccacagggaggcgcctgtggaatagggggagttcatgcaccccttttttccccagaggggctggactcaggttagtttgggggtgggggctcctgcactttgccacaggcacggggagggttttctcctcaccccctctgccctcccaacttgggttgtactttctaagaaggtgattccccctgcccttgcccccttccccagaacaaaacatgttgatcatgtgcaatatttcttactgtgccgagaagccgcaatgagcgagattaaagctgtttaacacac

SEQ ID NO: 114052 - DNA, 1304 bp, Homo sapiens
  Payload ID: 2285
  Gene Symbol: CIC
  Gene Name: capicua transcriptional repressor
  ENST ID: ENST00000576505
  CDS Start-End: 1-961
ggagcctcccactcctcccagcccggccccagctccagctgtagcccctggtggcagcagcgagagcagcagtgggcgggcagccggggacaccccggagcgcaaggaggcggctggtactggcaagaaggtgaaggtgcggcccccgcccctgaagaagacctttgactctgtggacaacagggtcctgtcagaagtggacttcgaagagcgctttgctgagttgcctgagtttcggcctgaggaggtgctgccctcccccaccctgcagtctctggccacctcaccccgggccatcctgggctcttaccgcaagaagaggaagaactccacggacctggattcagcacccgaggaccccacctcgcccaagcgcaagatgagaagacgctccagctgcagctcggagcccaacacccccaagagtgccaagtgcgagggggacatcttcacctttgaccgtacagaagccgaggacgtgcttggggagctagagtatgacaaggtgccatactcctccctgcggcgcaccctggaccagcgccgggccctggtcatgcagctctttcaggaccatggcttcttcccgtcagcccaggccacagccgccttccaggcccgctatgcagacatctttccctccaaggtttgtctgcagttgaagatccgtgaggtgcgccagaagatcatgcaggctgccactcccacggagcagccccctggagctgaggctcctctccctgtaccgccccccactggcaccgctgctgcccctgcccccactcccagccccgcagggggccctgaccccacctcacccagctcggactctggcacggcccaggctgccccgccactgcctccacccccagagtcggggcctggacagcctggctgggagggggctccccagccctcccccccacccccaggtccctccacagctgccacaggcaggtgagggacccctgagaagatgccaggacttatagtaccccctcaggacatggacagtatgtgggggcaggaaggttatctcctcccgggtaaagccatttcgtcctctccagtttggggcggaatgaggcctgctcctcttgtaaatacccccttccctcgaagctccctcccggtgctggggggcagctgaggggctgcaggggcagtctccctcctccaagcccctgtacataacctggagcgtgtgaccttcagagcttttcactttatgcaaaatggctcctgtgagggctgcaagctggagggtggtgcaggccttgggccacagggaggcgcctgtggaa

SEQ ID NO: 114053 - DNA, 601 bp, Homo sapiens
  Payload ID: 2285
  Gene Symbol: CIC
  Gene Name: capicua transcriptional repressor
  ENST ID: ENST00000571942
  CDS Start-End: 169-601
ggctgctccagctgttgcaggtccattcaccattttgtgtgttggagtaaaaaaaaaagggagaatcgagagggagagccggagggggggcggggagggaccggaccggaccgagccggggccacggccccccgccccgaaaccccgccgagcccaaggtggacaaaaatgaagccaatgaagaaggcatgcactggcctttcaggtcctggcagtggcagcaagtcccccccagccaccagggccaaggctctgaggcggcgaggggctggggagggtgacaagccagaggaggaggatgacgaggcacagcagccgcaaccacagtccgggcccgaagaggctgaggaaggggaggaggaggaggctgagcggggccctggggctgaaggtcctccactggagctgcaccctggcgacccggctccaggcccagcagaggaccccaaaggggatggggaggcaggccgctgggagccctcactcagccgcaagacagccacgttcaagtctcgagcgcccaagaagaagtatgtggaggagcacggagctggcagcagtggggtggctggggcccctgaagagcgggtgcggacccctg

SEQ ID NO: 114054 - DNA, 8218 bp, Homo sapiens
  Payload ID: 2285
  Gene Symbol: CIC
  Gene Name: capicua transcriptional repressor
  ENST ID: ENST00000572681
  CDS Start-End: 69-7613
gtgccgctaccgctgccactgagaggagccaccggcgacgccagagccaggaatacgggtggacaaaaatgaagccaatgaagaaggcatgcactggcctttcaggtcctggcagtggcagcaagtcccccccagccaccagggccaaggctctgaggcggcgaggggctggggagggtgacaagccagaggaggaggatgacgaggcacagcagccgcaaccacagtccgggcccgaagaggctgaggaaggggaggaggaggaggctgagcggggccctggggctgaaggtcctccactggagctgcaccctggcgacccggctccaggcccagcagaggaccccaaaggggatggggaggcaggccgctgggagccctcactcagccgcaagacagccacgttcaagtctcgagcgcccaagaagaagtatgtggaggagcacggagctggcagcagtggggtggctggggcccctgaagagcgggtgcggacccctgaggaggccagtggcctgggggtgcctccacggccacccacctccactcgttcctcctccactgacacagccagcgagcactcggcggacctggaggatgagccggctgaggcttgtggtccaggcccttggccccctggcagcaccagtggcagctatgacctgcggcagctgcggtcccagcgggtgctggctcggcgtggtgatggccttttcctgccggctgtggtgcgccaggtgcgccgaagccaggacctgggcgtgcagttccctggtgaccgagccctgactttctatgagggggtgccaggcgctggtgtggatgtagttttggatgccacacccccaccaggtgccctggtggtgggcacagctgtctgtacctgtgtggagcccggcgtggctgcctaccgggaaggtgtggtggtggaggtggccaccaagccagctgcctacaaggtccgtctcagccctggccccagctcccagccaggcctaccaggcagcctcccgcagcccccacagccactgcaccgtgagccagaggaggctgtgtgggtggcccgctccagcctacgcctgctgcgccccccctgggaacctgagaccatgctgaggaagccccctacaggccctgaggaagagcaggcagagcctggggccaccctgccaccctgccctgctgccctggaccccaaacagcccgaggatgctgaggtctctaagatcagctttggtggcaacctgggtactcactgtgaggagggcgaggagaagcaccctccagccctgggtaccccagccctgctcccactgcccccaccccagctcctgtcaccaccacccaagtctccagcctttgtgggccccggccgccctggcgagcagccctcgccctgccaggaggggagccagggcggcagccgcagcagcagcgtggcctccctggaaaaggggacagcaccggcagcccgggcccgcacgccactgacagccgcccagcagaagtacaagaagggcgatgtggtctgcacacccagcggaatacgaaagaagttcaacggcaagcagtggcgccggctgtgctcacgagatggctgcatgaaggagtcacagcggcgaggctactgctcacgccacctgtccatgcgaaccaaagagatggaaggcctggcagacagtgggcctggcggggcgggccggcccgcggccgtggcagcccgtgagggcagcacggagtttgactggggtgatgagacgtcgagggacagtgaggccagcagtgtggcggctcgtggagactcacggccacgcctggtggcccctgctgacttgtcacgctttgagttcgacgagtgtgaggcggccgtgatgctggtgtcgctgggcagctcgcgctcaggcacgccctccttctcacccgtctccactcaatcgcccttctcgccagccccatcaccctcaccctcaccactcttcggcttccgccctgccaactttagccccatcaatgcctcaccagtcatccagcgcactgcagtccgcagtcgccacctgagcgccagcacccctaaggcaggcgtgctgacgccaccagacctgggcccccacccaccgccacctgccccccgagagcgccactcctctggaatcctacccaccttccagaccaacctgaccttcaccgtgcccatcagccctgggcgacggaagacagagctgttgccgcatccaggggccttgggggcccctggcgcagggggtggaggagccgccccagactttcccaagagtgacagcttagactctggtgtggactcagtgtcccacacacctacaccctccacgccggctggcttccgggccgtgtcccctgctgtgcccttctctcgctcccgccagccctcaccattgctgctgttgccaccccctgccggcctgacctcggatccagggccctctgtgcgcagggtgcctgctgtgcagcgggactcacctgttattgtccgcaaccctgatgtgccactgccctccaaattccctggggaggtgggcactgctggtgaggtgcgggctgggggacctgggcggggctgccgtgaaaccccagtgccccctggggtggccagtgggaagcctggcctgcccccacctctgccagcccccgtgcccatcaccgtgcctccagctgcaccaactgccgtggcccagccgatgcccgcctttggcctggcttcttcaccctttcagcctgtggccttccacccctcacctgctgccctgttgcccgttttggtgcccagcagctataccagccaccctgcccccaagaaggaagtcatcatgggccggcctggaacagtgtggacgaatgtggaacctcgctctgtggctgtgttcccttggcactccttagtccccttcctggcacccagccagcctgacccctccgtgcagccgagcgaggcccagcaacctgccagccacccagtggcctccaaccagagcaaagaacctgctgagtcggcagctgttgctcatgaacggccaccaggtgggacagggagtgctgaccctgagcggccccctggagccacatgccctgagagcccaggacccggacccccacaccctttgggggtggtggaatctggtaagggtccgcctcccaccacggaggaggaggcctccggccccccaggagagccccggctggacagtgagacagagagtgaccatgatgatgccttcctctccatcatgtctcctgagatccagttgcctctaccgcccggaaaacgtcggacccagtccctcagtgccctacccaaggaacgggactcatcttctgagaaggatggacgcagccccaacaagcgggagaaggaccacatccggcggcccatgaatgccttcatgatcttcagcaagcggcaccgggccctggtccaccagcgtcatcccaaccaggacaaccggaccgtcagcaagatcctgggcgagtggtggtatgccctggggcccaaggagaagcagaagtaccacgacctggccttccaggtgaaggaggcccacttcaaggcccacccagattggaagtggtgcaacaaggaccgaaagaagtccagctcagaggccaagcccacgagcctggggctggcaggagggcacaaggagacgcgggagcggagcatgtcggagacgggcactgctgctgcccctggggtgtcctctgagctcctgtccgttgcagcccagacactcctgagctcagacaccaaggctccggggagcagctcctgtggggcagaacggctacacacagttgggggacctggctcagcccggccccgagctttctcccacagcggggtacacagcctggacggcggagaagtagacagtcaggcgctacaggaactgacgcagatggtgtctggccctgcatcgtactctggcccaaagccttctacccagtatggagctccaggaccctttgcagcccctggtgagggaggtgccttggcggccactgggcggcccccgctgctgcccacccgagcttctcgttctcagcgtgcggccagtgaggacatgacgagtgatgaggagcgcatggtcatctgtgaggaggaaggggatgatgatgtcattgctgacgatggcttcggcaccactgacattgatctcaagtgcaaggagcgggtgaccgacagcgagagtggggacagctctggggaggacccagagggcaacaagggctttggtcggaaggtgttttcacctgtgatccgttcctcctttacccactgccgccccccactggaccctgagcccccagggcccccggatcctcctgtagcctttggcaaaggctatggttccgccccatcctcctctgcgtcctcgcctgcttcctcctcagcctcggcagccacctccttctcactgggctcaggaaccttcaaggcccaggagtctggtcagggcagcacagcgggccccctacggcccccaccccctggggctgggggtccagcgacaccttccaaggcaacccggttcctcccaatggatcctgccaccttccggcgcaagagacccgaaagtgtgggtggcctggagccaccaggcccctcagtcatcgcggcccctcccagcggaggaggaaacatcctgcagacactggtgctgcccccaaacaaggaggagcaagagggcggcggagccagagtgccctccgcccccgccccatcactggcctatggggccccagcagctcccctgtcccgtcctgccgccaccatggtcaccaatgtggtgcggcctgtcagcagcactcctgtgcccatcgcctctaagcccttccccacctctggccgggctgaggcgtctccaaatgacacagcaggtgccaggactgaaatgggcactgggtctcgggtgcctgggggctccccgctgggtgtcagcttagtgtattcggacaagaagtcggcagcagccacctcaccagccccacacttggtggctggacccctgctgggcactgtggggaaggcgcctgccactgtcactaacctactggtgggcaccccggggtatggggcccctgcgccccctgctgtccagttcattgcccagggggcccctggtggtgggaccactgcgggctcaggagcaggtgctgggagtggccccaatgggccagtacccctgggcatcctgcaaccaggtgccctgggcaaggctgggggaatcacccaggtacagtacatcctgcccacgctgccccagcagcttcaggtggcacctgccccagcaccagcccctgggaccaaggcagcggctcccagcggccctgcacccaccaccagcatccgtttcaccctcccaccgggcacttccaccaacggcaaagtcctggctgccactgcacccactcctggcatccccatcctgcagtctgtaccctccgccccaccccccaaagcccagtcagtttctcccgtgcaggccccgcccccgggtggctcagcccagctgctgcctgggaaggtcctagtgcctctggccgcccctagcatgtcagtgcggggtggaggggccggccagccactgccactggtgagcccgcccttctcagtacctgtgcagaatggtgcccagccccccagcaagatcatccagctgaccccggtgcctgtgagcacacccagcggcctggtgccgcccctgagcccagccacactccctggacccacctctcagcctcagaaggtcctgttgccctcctccaccagaatcacctatgtgcagtcagcgggcgggcacgcgctgcccctgggtaccagccctgcgtccagccaggctggaacagtcacctcgtacgggcccacgagctctgtagctctaggcttcacctcgctggggcccagcggccccgccttcgtgcagcccctgctctcaggccaagccccactgctggctcccggtcaggtgggcgtgtcacctgtgcccagtccccagctgccgcctgcctgtgcagcccccggaggtcctgtcataacagcattttactctggcagccctgcacccacctcctcagcacccctggcccagccatcccaggcccccccaagcctggtctacactgtggccaccagcacaaccccacctgcagccaccattctgcccaagggcccgccagcccctgccactgccaccccagccccgactagccctttccccagcgccacaggttccatgacctacagcttagtggcccccaaggcccagcggcccagcccgaaggccccccagaaagtgaaggcagccatcgccagcattcccgtggggtcctttgaggcaggtgcctctgggcggcctggccctgcaccccggcagcctctggagcctggcccagtccgagagccaactgccccagagtctgagcttgaggggcagcccacaccaccagcccctccacccctgccagagacctggactcccacggcccggagcagccccccactgcccccacctgctgaggagcggaccagcgccaagggccctgagaccatggccagcaaattccccagctcatcttcagactggcgcgtccctgggcagggcctggagaatcgtggggagcctcccactcctcccagcccggccccagctccagctgtagcccctggtggcagcagcgagagcagcagtgggcgggcagccggggacaccccggagcgcaaggaggcggctggtactggcaagaaggtgaaggtgcggcccccgcccctgaagaagacctttgactctgtggacaaggtcctgtcagaagtggacttcgaagagcgctttgctgagttgcctgagtttcggcctgaggaggtgctgccctcccccaccctgcagtctctggccacctcaccccgggccatcctgggctcttaccgcaagaagaggaagaactccacggacctggattcagcacccgaggaccccacctcgcccaagcgcaagatgagaagacgctccagctgcagctcggagcccaacacccccaagagtgccaagtgcgagggggacatcttcacctttgaccgtacaggtacagaagccgaggacgtgcttggggagctagagtatgacaaggtgccatactcctccctgcggcgcaccctggaccagcgccgggccctggtcatgcagctctttcaggaccatggcttcttcccgtcagcccaggccacagccgccttccaggcccgctatgcagacatctttccctccaaggtttgtctgcagttgaagatccgtgaggtgcgccagaagatcatgcaggctgccactcccacggagcagccccctggagctgaggctcctctccctgtaccgccccccactggcaccgctgctgcccctgcccccactcccagccccgcagggggccctgaccccacctcacccagctcggactctggcacggcccaggctgccccgccactgcctccacccccagagtcggggcctggacagcctggctgggagggggctccccagccctcccccccacccccaggtccctccacagctgccacaggcaggtgagggacccctgagaagatgccaggacttatagtaccccctcaggacatggacagtatgtgggggcaggaaggttatctcctcccgggtaaagccatttcgtcctctccagtttggggcggaatgaggcctgctcctcttgtaaatacccccttccctcgaagctccctcccggtgctggggggcagctgaggggctgcaggggcagtctccctcctccaagcccctgtacataacctggagcgtgtgaccttcagagcttttcactttatgcaaaatggctcctgtgagggctgcaagctggagggtggtgcaggccttgggccacagggaggcgcctgtggaatagggggagttcatgcaccccttttttccccagaggggctggactcaggttagtttgggggtgggggctcctgcactttgccacaggcacggggagggttttctcctcaccccctctgccctcccaacttgggttgtactttctaagaaggtgattccccctgcccttgcccccttccccagaacaaaacatgttgatcatgtgcaatatttcttactgtgccgagaagccgcaatgagcgagattaaagctgtttaacaca

SEQ ID NO: 114055 - DNA, 846 bp, Homo sapiens
  Payload ID: 2285
  Gene Symbol: CIC
  Gene Name: capicua transcriptional repressor
  ENST ID: ENST00000575287
  CDS Start-End: 1-435
ccggagcgcaaggaggcggctggtactggcaagaaggtgaaggtgcggcccccgcccctgaagaagacctttgactctgtggacaacagggtcctgtcagaagtggacttcgaagagcgctttgctgagttgcctgagtttcggcctgaggaggtgctgccctcccccaccctgcagtctctggccacctcaccccgggccatcctgggctcttaccgcaagaagaggaagaactccacggacctggattcagcacccgaggaccccacctcgcccaagcgcaagatgagaagacgctccagctgcagctcggagcccaacacccccaagagtgccaagtgcgagggggacatcttcacctttgaccgtacagccttgccatgctgcctgtgccctgcacaggtacagaagccgaggacgtgcttggggagctagagtatgacaaggtgccatactcctccctgcggcgcaccctggaccagcgccgggccctggtcatgcagctctttcaggaccatggcttcttcccgtcagcccaggccacagccgccttccaggcccgctatgcagacatctttccctccaaggtttgtctgcagttgaagatccgtgaggtgcgccagaagatcatgcaggctgccactcccacggagcagccccctggagctgaggctcctctccctgtaccgccccccactggcaccgctgctgcccctgcccccactcccagccccgcagggggccctgaccccacctcacccagctcggactctggcacggcccaggctgccccgccactgcctccacccccagagtcggggcctggacagcctggctgggaggggg

SEQ ID NO: 114056 - DNA, 3020 bp, Homo sapiens
  Payload ID: 2286
  Gene Symbol: CAPZA1
  Gene Name: capping protein (actin filament) muscle Z-line, alpha 1
  Uniprot ID: P52907
  ENST ID: ENST00000263168
  CDS Start-End: 673-1533
gggaatcctgggatagtggcggacctgaagttggcctctgtgaaggctgagtcctggggaaccgggaccgagaagatttcgaaggtggaggagcgtgtctcaagattggggctacctgttctttcgtggggcagggaaggggcggacagcagcgcctattctggaggaactggactgagatgtgaccccgaagtgttaccgcttccaaacgaaatgagggtcacctttcacaccgccccccccccggggttggaaaagccaccgatcgttccagctgccgagcagctcttaaagctttggattcggctgtcgtggagataacgggcaccagaaaaacttgtaggagtagcaacagctatttggtcggatggaggccagaagccaagaataatcgaaacacgctgccagcgcccattagatggatgggaaatgagtgtaactcattgggaaagatattagacttcaaatcacctaaggcaaaccctacttcctggggcgcgggcgcgggcgctggcgttaggagacgtcactcccgcgcataactgacatggggccctcttggtcggcgtttccgggcgggtccttccgacggccgccgcggtgattccatcactcggctttcttcccggcctgcctcgcgcccgtagccgggctgggccagaacagcccaagatggccgacttcgatgatcgtgtgtcggatgaggagaaggtacgcatagctgctaaattcatcactcatgcacccccaggggaatttaatgaagtattcaatgacgttcggctactacttaataatgacaatctcctcagggaaggggcagcacatgcatttgcccagtataacatggatcagttcacgcctgtgaagatagaaggatatgaagatcaggtcttaattacagagcacggtgacctgggtaatagcagatttttagatccaagaaacaaaatttcctttaaatttgaccacttacggaaagaagcaagtgacccccagccagaagaagcagatggaggtctgaagtcttggagagaatcctgtgacagtgctttaagagcctatgtgaaagaccattattccaacggcttctgtactgtttatgctaaaactatcgatgggcaacagactattattgcatgtattgaaagccaccagtttcagcctaaaaacttctggaatggtcgttggagatcagagtggaagttcaccatcacaccacctacagcccaggtggttggcgtgcttaagattcaggttcactattatgaagatggcaatgttcagttggttagtcataaagatgtacaggattcactaactgtttcgaatgaagcccaaactgccaaggagtttattaaaatcatagagaatgcagaaaatgagtatcagacagcaattagtgaaaactatcaaacaatgtcagataccacattcaaggccttgcgccggcagcttccagttacccgcaccaaaatcgactggaacaagatactcagctacaagattggcaaagaaatgcagaatgcttaaaggctgaatgtaggattcttcagtatgtggaaagacaaggattcaacgtgtggtcatatgataaataagtgatttataaacaagagtgatattttgctagggctttcaaagttaaccggttttctagcctcatggaatactgttgaacctatagcgttgtcttgattcttttgtgttctctgccttgtaattttctgttactgctatatctacgtgtaaatctttttttctttttttttttttttttttggttaattctgccacatttaatgttggtgagagagtgatctatcctaatgacattttactgtttaaaaaagtttcctagccatgaagccctgctactgatttagacaaggtattatggtcattactttgtacccctatccttccaagcacttctggtacttcagtcgtttttactgatccaccaacacctaaagaggctatgctacagtctctagctaaatggaagacacattcatccttctccctctgactgctttgatcatcatttattgcatctcataactaattttctaaagtttggattgggacttttcaggtcctttttggagggcaaaggaagtgccagcttctctggggaacttgtttttaaatccaaagacttgaaccacattccctgcacatgaacatgtttgcttttatcccttctctcattgtctccttcccatcttagtaccattgtagttataaacatctgcattttttagaagcattttacccatttatttttttaaacattcaagaactgctgacgtactgtggatgtagagtataaaacttgaaaaatgcagatgttgaaggaataataggtatcttgtgctttaatactttatggcaggattgtactataagcaaatgaattaaacagctatgtaaatcataaagaaaaactaaaaatgaaccaaagtgaaaggataacttccaggcagtatctttctattgtaacctgttatttaaggaaatactagtgatttcttctaaataggatgtaaaacttctttcaaattactcttcctcagtcctgcctgccaagaactcaagtgtaactgtgataaaataacctttcccaggtatattggcaggtatgtgtgtaatctcagaatacacaggtgacatagatatgatatgacaactggtaatggtggattcatttacattgtttacacttctatgaccaggccttaagggaaggtcagttttttaaaaaaccaagtagtgtcttcctacctatctccagatacatgtcaaaaaaagaaaggtgtttgtgcttccgttttgtttctgctcagtaatatagtcaagcaagtttgttccaggtgacccattgagctgtgtatgcatttttgtttatttcaataaaatatatttgtattatttgtccttcatactatccatccataccacactatcttctgtatcaggtagtctaatagaaatatacctgttttgttctaaaattg

SEQ ID NO: 114057 - DNA, 5182 bp, Homo sapiens
  Payload ID: 2287
  Gene Symbol: CAPZA2
  Gene Name: capping protein (actin filament) muscle Z-line, alpha 2
  Uniprot ID: P47755
  ENST ID: ENST00000361183
  CDS Start-End: 140-1000
cccggggtgcgcgtgcgcggcggcctgagcggcgggcccctcccttagcgggggcgcgcggcgctgaggaccgcacggaaacggggaagtcaggtggccgctgccgccgccgccgccgcggtttgtcgccagaaggaagatggcggatctggaggagcagttgtctgatgaagagaaggtgcgtatagcagcaaaattcatcattcatgcccctcctggagaatttaatgaggttttcaatgatgttcggttactgcttaataatgacaatcttctcagggaaggagcagcccatgcatttgcacagtataacttggaccagtttactccagtaaaaattgaaggttatgaagatcaggtattgataacagaacatggcgacttgggaaatggaaagtttttggatccaaagaacagaatctgttttaaatttgatcacttaaggaaggaggcaactgatccaagaccctgtgaagtagaaaatgcagttgaatcatggagaacttcagtagaaactgctctgagagcttacgtaaaagaacattacccgaatggagtctgcactgtgtatggcaaaaaaatagatggacagcaaaccattattgcatgcatagaaagccatcagttccaagcaaaaaatttttggaatggtcgttggaggtcagaatggaagtttacaatcactccttcaaccactcaagtggttggcatcttgaaaattcaggttcattattatgaagatggtaatgttcagctagtgagtcataaagatatacaagattccctaacagtgtctaatgaagtgcaaacagcaaaagaatttataaagattgtagaagctgcagaaaatgaataccagactgccatcagtgagaattatcagacaatgtcggacactactttcaaagccttacgtcgacagttgccagttacacgcactaagattgattggaacaagatccttagctacaagattggcaaagagatgcagaatgcataagatgaacattgcatgaccggatcattttagtgtctttgcgttaaaaaatcattgcaaaagtattctgaactgtcaagctgcccagtcagatgggctgttgccatttaaaatcactgtaattaattagtttgattagagcacaaagcttagctaatcaaccattatttttcattttgtttgttctaagaggattgaaaatcagtttagtttaaatgtctttctgttaggcctttctttcttacaatgaagagatgattcttctagtttatggttaaaagtttttgaagtgtctcaaaaatattttactaactgtaaccctaaaattgatgtcttttggtttatgaaatcagtaatttttgatatttccccagttctttttaatggggtcaataatggacattctagtttaaggtggttgatggatttagccatatatgctgctaaagaaattgtctaccttttcttcctcacctgttccatttatgtaaagttgagattagagggaaagcattttctatatcaattgtgtttaaacctttcaagaaggttatttagctagcttagtgttgaactaaattttttttaaacaaggcaaggtctaatgctgttttgagattctgaaattaatgaaaatacttatttcagaaatgcatttaatgctttttttcttgtgacagttacgcaaatcagcttgaattccatatgtccctgagttatttttatcataaagccacaaatgtattataacaaggcaaattgtaatatatataatcctgaactcatgaccatgtctcggtttattttttttttcttggattgaaaagtactgaaattcaatgtgacattaaaatgcaaattttcctatttatttgagtagaaaatcacttaccagtgagcatatatattttaaaatactttctttggatattgtaattcttaactggttgtaaattagaaaagctgggattacatatggtgtgcggttacagtctaaattttttcatcctcctatgcatcataagcatgtttgtaatattttcaaaaatagttctactgatgctacaggaatttcaagcctgtggtgaatgttagtatttaccatagggagtgaagtggagttatggtttcattcaatagagtattgctgattatacttgagtggaatcctttcctcacgtactcccacagacgtctgggcctggaaattttttttttattttattttattgtttttttttttagaaaaacaccacttttattatgtacaataaaatatttcattagcttgaattgtatagatttttaaaaattcaatgaaagcatgttgtttaatttctttttaaaatcactgttgggctttgaaagcattgagaatataatatgaaattatgacattttgtctaaatcatcttttctttagttttaaaatacaagttttggcacattgggattcctaaagaaaatgaattggtaacattaattatctgttcctttttaaaatatatatatttgaaagtttgatgatggtgaactaaatactagatctaattgacaagcttagttgtatcagttaggccatcatgagtttctatcccatgaaagtcatcaatttcctatctctgttctagtctggaatgcattactgaaaatgtatgcaactgtttttaaggtgatttgcttgtgagacggaagatttatcaaaaataatttagaacaggctgggcgcggtggctcacatctgtaatcccagcactttgggaggccgaggcgggtggatcacggggtcaggagattgagaccaccctgactaacacagtgaaaccctgtctctactaaaaatacaaaaaattagccgggtgtggtgacaggcgcttgtagtcccagctactcgggaggctgaggcaggagaatggcgtgaacccgggaggcggagctcgcagtgagccgagatcgcgccactgcactccagcctgggtgacagagcaagactctgtctcaaaaaataataataataataataataatataatttagaacagtctgaaataatgatggcacagaatagtcttttatagtataagaatggcatttattaggcagggcacagtggctcacacctgtaatcccagcactttgggaggccgaggcgggtggatcacgaggtcaggagttcgagaccagcctgaccaacatgctgaaaccccgtctctactaaaaacaaaaaaaaattagccggggatggtgatgcgcgcctgtaatcccaactactcaggaggctgagacaggagaatcatttgaacccgggaggtggaggttgcagtgagcagagatcgagccactgtactccagcctgggtgacacagggagcctctgtctcaaaataataataataataaaagaatggcatttattaaagtgaaagaagaatggaaacccagagtatcctatagctcagggatgtaattttagtaggagacattatggctgctttgctgagtaggctgaagtgtggtggcaaaggcataatcagggagaacagctaggagactactgcagtaatctagttgagagagcatgctggcttggactgaggtggttgctgtagaggtggtataaagcagtgaggtctaggtatatcctaaaggtaaaatcagcaagacctggggagagtttggtcatggagtgtgagataaagagaaccatgtctggggctggagaaattgaggaagattcttgtaggagcaagttggtttggagaagaaggctggtcaggagctcagttttctattcaaaggagaaatatctcatgtagcagttagatacaggagacaggaactagaggaaagctctgggctagaagaatgggaaagtgcatgaacctggaaacaattttataggcagacaggatgaaggacctcaaggttagtgataatgaatttaaagtaaatgagaccaatgatgagcatggctgtatgtttttcttcaaccgtgtaaagctgtttgggtgcaggcatagagtagatgaaataaatttcaccagggctgtggttttgcccagagtgaatgaccacatgaagaggggcagggtatgatgatggtctgtggaatttcagctgggtaagcagggaagtgagggcttgagacggggggagggatagtgaaaatgtacaaccagtggattataggtgtgttaaagtaggggaactagaaagaatgacctggaaatgtaagaagtgggccgggcgcagtggctcatgcctgtaatcccagcactttaggaggctgaggtgggtggatcatgaggtccagagatcaagaccatcctggccaatatggtgcaaccccatctctactaaaaatacaaaaattagctgggcgtggtggtgtgcctgtagtcccagctactagggaggctgaggcaggagaatcgcttgaacccaggatgcgaaggttgcagtgagccgagattgtgccactgcactccaggctggcgacagagcgagactctgtcccaaaaaaaaaaaaaagtggtgggctggccacgatggctcacgcctataatcccagcactttgggaggccacggcaagtggatcatttaaggtcaggagttcaagaccagtctggctaatatgatgaaaccccttctgtattaaaaatacaaatattagccgggcatggtggcacatgcctgtagtcccagctactcaggaggctgaggcaggagaatctttgaacccaggaagtgacagttacaacgagcggagactgtgccacttcactgcagcctgggtgacagggtgagagtctgtctcaaaaaaagaaaaaggaaatgtaagaagtggtgattggagaatggtgtgcttaattaaaattgaggttttgaggagttactagtaatgacaaatatgaccaacggagtgactggctgaggggagagaggagaggacttaagcaactgtgccactcagcattggaaaggtcacctctgtgacattaaaatcaagaattctgatagaagtaagagttctggcatgagtggtgcttttccagagtacacttggatatatgattacattttaataagttatataaatatgcagatattcatgcggcttttcctcatttgggattttggaaactaaaatagtagtaagagcattaaaaaaaagatgtcctggaa

SEQ ID NO: 114058 - DNA, 1214 bp, Homo sapiens
  Payload ID: 2287
  Gene Symbol: CAPZA2
  Gene Name: capping protein (actin filament) muscle Z-line, alpha 2
  ENST ID: ENST00000426421
  CDS Start-End: 13-537
gccagaaggaagatggcggatctggaggagcagttgtctgatgaagagaaggtgcgtatagcagcaaaattcatcattcatgcccctcctggagaatttaatgaggttttcaatgatgttcggttactgcttaataatgacaatcttctcagggaaggagcagcccatgcatttgcacagtataacttggaccagtttactccagtaaaaattgaaggttatgaagatcaggtattgataacagaacatggcgacttgggaaatggaaagtttttggatccaaagaacagaatctgttttaaatttgatcacttaaggaaggaggcaactgatccaagaccctgtgaagtagaaaatgcagttgaatcatggagaacttcagtagaaactgctctgagagcttacgtaaaagaacattacccgaatggagtctgcactgtgtatggcaaaaaaatagatggacagcaaaccattattgcatgcatagaaagccatcagttccaagcaaaaaatttttgctgctgtttttatttttaaggaatggtcgttggaggtcagaatggaagtttacaatcactccttcaaccactcaagtggttggcatcttgaaaattcaggttcattattatgaagatggtaatgttcagctagtgagtcataaagatatacaagattccctaacagtgtctaatgaagtgcaaacagcaaaagaatttataaagattgtagaagctgcagaaaatgaataccagactgccatcagtgagaattatcagacaatgtcggacactactttcaaagccttacgtcgacagttgccagttacacgcactaagattgattggaacaagatccttagctacaagattggcaaagagatgcagaatgcataagatgaacattgcatgaccggatcattttagtgtctttgcgttaaaaaatcattgcaaaagtattctgaactgtcaagctgcccagtcagatgggctgttgccatttaaaatcactgtaattaattagtttgattagagcacaaagcttagctaatcaaccattatttttcattttgtttgttctaagaggattgaaaatcagtttagtttaaatgtctttctgttaggcctttctttcttacaatgaagagatgattcttctagtttatggttaaaagtttttgaagtgtctcaaaaatattttactaactgtaaccctaa

SEQ ID NO: 114059 - DNA, 814 bp, Homo sapiens
  Payload ID: 2287
  Gene Symbol: CAPZA2
  Gene Name: capping protein (actin filament) muscle Z-line, alpha 2
  ENST ID: ENST00000449080
  CDS Start-End: 26-139
gccgcggtttgtcgccagaaggaagatggcggatctggaggagcagttgtctgatgaagagaagactaagtcagtgctacactttgaggattttgaaagcagagggcctggaaagttggccaatttttttttaaagtaaatgaaggtgcgtatagcagcaaaattcatcattcatgcccctcctggagaatttaatgaggttttcaatgatgttcggttactgcttaataatgacaatcttctcagggaaggagcagcccatgcatttgcacagtataacttggaccagtttactccagtaaaaattgaaggttatgaagatcaggtattgataacagaacatggcgacttgggaaatggaaagtttttggatccaaagaacagaatctgttttaaatttgatcacttaaggaaggaggcaactgatccaagaccctgtgaagtagaaaatgcagttgaatcatggagaacttcagtagaaactgctctgagagcttacgtaaaagaacattacccgaatggagtctgcactgtgtatggcaaaaaaatagatggacagcaaaccattattgcatgcatagaaagccatcagttccaagcaaaaaatttttggaatggtcgttggaggtcagaatggaagtttacaatcactccttcaaccactcaagtggttggcatcttgaaaattcaggttcattattatgaagatggtaatgttcagctagtgagtcataaagatatacaagattccctaacagtgtctaatgaagtgcaaacagcaaaagaatttataaagattgtagaagctgcagaa

SEQ ID NO: 114060 - DNA, 324 bp, Homo sapiens
  Payload ID: 2287
  Gene Symbol: CAPZA2
  Gene Name: capping protein (actin filament) muscle Z-line, alpha 2
  ENST ID: ENST00000484325
  CDS Start-End: 222-324
ctcaagatcgaggggcttcaggacagtgaacatagtcttgctctgtcacccaggctggagtacagtggcgcgacctcggctgactgcaacctccgtctcccgggttgcagggacagggacaacctccgcctctcgggttgcaatgacttctgcaactctcctgcctcagcctcccgagtagctggtattacaggtgcgtatagcagcaaaattcatcattcatgcccctcctggagaatttaatgaggttttcaatgatgttcggttactgcttaataatgacaatcttctcagggaaggagcagcccatgcatttgcacagta

SEQ ID NO: 114061 - DNA, 809 bp, Homo sapiens
  Payload ID: 2287
  Gene Symbol: CAPZA2
  Gene Name: capping protein (actin filament) muscle Z-line, alpha 2
  ENST ID: ENST00000490693
  CDS Start-End: 13-453
gccagaaggaagatggcggatctggaggagcagttgtctgatgaagagaaggtgcgtatagcagcaaaattcatcattcatgcccctcctggagaatttaatgaggttttcaatgatgttcggttactgcttaataatgacaatcttctcagggaaggagcagcccatgcatttgcacagtataacttggaccagtttactccagtaaaaattgaaggttatgaagatcaggtattgataacagaacatggcgacttgggaaatggaaagtttttggatccaaagaacagaatctgttttaaatttgatcacttaaggaaggaggcaactgatccaagaccctgtgaagtagaaaatgcagttgaatcatggagaacttcagtagaaactgctctgagagcttacgtaaaagaacattacccgaatggagtctgcactgtaagtcatcagtagcagctttgtgtgtgtgttttgtgtaaatgtgagtctttagcgtctcttaaaatttacagtaacttacagaattgacattgtataatttgtcatttttttccttaaatatttctaagaatgtttactattttttcaagaaattctggataataaatagatatactaggatggcttaaaatagagaaatggttgtaccttgatttaaatccatgtagaaattctaatacattgattaaaggagcaggatatggtgagattctgtaatcttatgttcatgactcgtctcagtttagatcaaagttatttttattaagtcacagaaatcttagaacaaataaaattacttggaagtaaaa

SEQ ID NO: 114062 - DNA, 164 bp, Homo sapiens
  Payload ID: 2287
  Gene Symbol: CAPZA2
  Gene Name: capping protein (actin filament) muscle Z-line, alpha 2
  ENST ID: ENST00000464223
  CDS Start-End: 62-164
ctcaagatcgaggggcttcaggacagtgaacatgtgcgtatagcagcaaaattcatcattcatgcccctcctggagaatttaatgaggttttcaatgatgttcggttactgcttaataatgacaatcttctcagggaaggagcagcccatgcatttgcacagta

SEQ ID NO: 114063 - DNA, 525 bp, Homo sapiens
  Payload ID: 2287
  Gene Symbol: CAPZA2
  Gene Name: capping protein (actin filament) muscle Z-line, alpha 2
  ENST ID: ENST00000628758
  CDS Start-End: 1-525
atgattgatgtcagataccagatagataacaaaaagatggtgcgtatagcagcaaaattcatcattcatgcccctcctggagaatttaatgaggttttcaatgatgttcggttactgcttaataatgacaatcttctcagggaaggagcagcccatgcatttgcacagtataacttggaccagtttactccagtaaaaattgaaggttatgaagatcaggtattgataacagaacatggcgacttgggaaatggaaagtttttggatccaaagaacagaatctgttttaaatttgatcacttaaggaaggaggcaactgatccaagaccctgtgaagtagaaaatgcagttgaatcatggagaacttcagtagaaactgctctgagagcttacgtaaaagaacattacccgaatggagtctgcactgtgtatggcaaaaaaatagatggacagcaaaccattattgcatgcatagaaagccatcagttccaagcaaaaaatttttgctgctgtttttatttttaa

SEQ ID NO: 114064 - DNA, 1087 bp, Homo sapiens
  Payload ID: 2288
  Gene Symbol: CAPZA3
  Gene Name: capping protein (actin filament) muscle Z-line, alpha 3
  Uniprot ID: Q96KX2
  ENST ID: ENST00000317658
  CDS Start-End: 169-1068
gacctcatcaggaggctcagaccttgccagactgcctgctttcatggatagacataaaaaccttcagcttgaatgttaacaccttgatgggaaaggtggctcatggaatgttttcttatcctttgaacactcctcatttcagaagctttgcttctgttgcaaccaaacatgacacttagcgtgctgagcaggaaggacaaggaaagagtaattcgcagactgttattacaggcccctccaggggaatttgtaaatgcctttgatgatctctgtctgcttatccgtgatgaaaaacttatgcaccaccaaggtgagtgtgcaggccaccaacactgccaaaaatattctgtaccactctgcatcgatggaaatccagtactcttgtctcaccacaatgtaatgggcgactaccgattttttgaccatcaaagcaaactttctttcaaatatgacctgcttcaaaatcagctgaaagacatccaaagtcatggtatcattcagaatgaggcagaatacctgagagttgttcttctgtgcgccttaaaactgtatgtgaatgaccactatccaaaaggaaattgcaacatgctgagaaaaactgtcaaaagtaaggagtacttgatagcttgcattgaagatcacaactatgaaacaggagagtgctggaacggactttggaaatctaaatggattttccaagttaacccatttctaacccaagtaacgggaagaatatttgtgcaagctcacttcttcaggtgtgtcaaccttcatattgaaatatccaaggacctgaaagaaagcttggaaatagttaaccaagctcaactggctctaagttttgcaaggcttgtggaagagcaagagaacaaatttcaagctgcagtcttggaagaattacaggagttatccaatgaagccctgagaaaaattctacgaagggatcttccagtgacccgcactcttattgactggcacaggatactctctgacttgaatctggtgatgtatcctaaattaggatatgtcatttattcaagaagtgtgttgtgcaactggataatataaagaattgctcctggtaact

SEQ ID NO: 114065 - DNA, 858 bp, Homo sapiens
  Payload ID: 2289
  Gene Symbol: CAPZB
  Gene Name: capping protein (actin filament) muscle Z-line, beta
  Uniprot ID: P47756
  ENST ID: ENST00000264202
  CDS Start-End: 40-858
actgacgccgggaccgggaccgccgccgccgccgccaccatgagtgatcagcagctggactgtgccttggacctaatgaggcgcctgcctccccagcaaatcgagaaaaacctcagcgacctgatcgacctggtccccagtctatgtgaggatctcctgtcttctgttgaccagccactgaaaattgccagagacaaggtggtgggaaaggattaccttttgtgtgactacaacagagatggggactcctataggtcaccatggagtaacaagtatgaccctcccttggaggatggggccatgccgtcagctcggctgagaaagctggaggtggaagccaacaatgcctttgaccagtatcgagacctgtattttgaaggtggcgtctcatctgtctacctctgggatctggatcatggctttgctggagtgatcctcataaagaaggctggagatggatcaaagaagatcaaaggctgctgggattccatccacgtggtagaagtgcaggagaaatccagcggtcgcaccgcccattacaagttgacctccacggtgatgctgtggctgcagaccaacaaatctggctctggcaccatgaacctcggaggcagccttaccagacagatggagaaggatgaaactgtgagtgactgctccccacacatagccaacatcgggcgcctggtagaggacatggaaaataaaatcagaagtacgctgaacgagatctactttggaaaaacaaaggatatcgtcaatgggctgaggtctgtgcagacttttgcagacaaatcaaaacaagaagctctgaagaatgacctggtggaggctttgaagagaaagcagcaatgctaa

SEQ ID NO: 114066 - DNA, 2068 bp, Homo sapiens
  Payload ID: 2289
  Gene Symbol: CAPZB
  Gene Name: capping protein (actin filament) muscle Z-line, beta
  ENST ID: ENST00000264203
  CDS Start-End: 495-1277
gtggaagcgccgggccctgctgcgggggggagagccactgacgccgggaccgggaccgccgccgccgccgccaccatgctccatgcctgaccgtgactcgcatctcgccaggccagtgcatttcctcttctggctgtcatcggaattttcaagtgtcaagaccccactttgttcctgttgtcctggttccggctttgggaagcatgacctttcaggcctgctcagagacaccgcagtgcactttgtgcgttatcagccttacagagactctacggtcaggagtttttgtggcaatggaactgctggggtttcatctgcaaatgaaaaccatctggccagctgcttgggtcagatggaaaccagatgggagaagtcaggagcgggcagcgagcagcctggggcagcgtccctagtcacgtcatgtttccacttcctcttgccccctcgcctcccctgcctgcaaaacgattgttattaacccatcacctcctccaatgcccaggcagttccaggatacagggttctctcgcccaggccttggccagcccagaagatgtgacccagaacctagaaagagtgatcagcagctggactgtgccttggacctaatgaggcgcctgcctccccagcaaatcgagaaaaacctcagcgacctgatcgacctggtccccagtctatgtgaggatctcctgtcttctgttgaccagccactgaaaattgccagagacaaggtggtgggaaaggattaccttttgtgtgactacaacagagatggggactcctataggtcaccatggagtaacaagtatgaccctcccttggaggatggggccatgccgtcagctcggctgagaaagctggaggtggaagccaacaatgcctttgaccagtatcgagacctgtattttgaaggtggcgtctcatctgtctacctctgggatctggatcatggctttgctggagtgatcctcataaagaaggctggagatggatcaaagaagatcaaaggctgctgggattccatccacgtggtagaagtgcaggagaaatccagcggtcgcaccgcccattacaagttgacctccacggtgatgctgtggctgcagaccaacaaatctggctctggcaccatgaacctcggaggcagccttaccagacagatggagaaggatgaaactgtgagtgactgctccccacacatagccaacatcgggcgcctggtagaggtctgtgcagacttttgcagacaaatcaaaacaagaagctctgaagaatgacctggtggaggctttgaagagaaagcagcaatgctaaacctctgtttcatgctaaccagacacgccgtgcactcgttagattcctttcttagaaaactcgttttctgctcccttccctcgtcccttccctccccgacaggtcacataacagctgcatcattgaccgcacagcgccatctctccctgagaataaagccgatagccaccctcctccggctccgagcctgcttctgccacacctcgctctcagttctctccacatttccatagagaccgtgtggtttttgttcacccgggccccccgtcttcctccctgtccccccatttataggcataaaatccactgtctgccagcctcccttccctcccacctttttggtacattggtgtaaaaaatgtaaaacaaaaaaattttatgaactaactgtggtgtgtgaaagagagaagaaaaactggaaatcttattccgtgtgtgtttgggagttgcttggggttgggggtcgtggggacaggggacagctctgggagcagaggtggccctcggtgccgtcctgcgcagactctcccgtcccacggaggccgcggggtgggggctggggggggtgccgccgaccgttccgctcttccggccaggtgcttttctgtcaatttctatggaatgcaaaaggaggtttttgttttattttgtttttttgtaaagcttaagaaaaaaatctacatcttatacttgagcctccatacttaaaaaaagaaaagaaaagaaatcaataaaaagaaactggggcgcagtt

SEQ ID NO: 114067 - DNA, 1686 bp, Homo sapiens
  Payload ID: 2289
  Gene Symbol: CAPZB
  Gene Name: capping protein (actin filament) muscle Z-line, beta
  Uniprot ID: P47756
  ENST ID: ENST00000375142
  CDS Start-End: 48-881
ggagagccactgacgccgggaccgggaccgccgccgccgccgccaccatgagtgatcagcagctggactgtgccttggacctaatgaggcgcctgcctccccagcaaatcgagaaaaacctcagcgacctgatcgacctggtccccagtctatgtgaggatctcctgtcttctgttgaccagccactgaaaattgccagagacaaggtggtgggaaaggattaccttttgtgtgactacaacagagatggggactcctataggtcaccatggagtaacaagtatgaccctcccttggaggatggggccatgccgtcagctcggctgagaaagctggaggtggaagccaacaatgcctttgaccagtatcgagacctgtattttgaaggtggcgtctcatctgtctacctctgggatctggatcatggctttgctggagtgatcctcataaagaaggctggagatggatcaaagaagatcaaaggctgctgggattccatccacgtggtagaagtgcaggagaaatccagcggtcgcaccgcccattacaagttgacctccacggtgatgctgtggctgcagaccaacaaatctggctctggcaccatgaacctcggaggcagccttaccagacagatggagaaggatgaaactgtgagtgactgctccccacacatagccaacatcgggcgcctggtagaggacatggaaaataaaatcagaagtacgctgaacgagatctactttggaaaaacaaaggatatcgtcaatgggctgagatctattgatgctatccctgacaaccaaaagtttaagcagttgcagagggagctctctcaagtgctgacccagcgccagatctacatccagcctgataattaagccgatccaggtctgtgcagacttttgcagacaaatcaaaacaagaagctctgaagaatgacctggtggaggctttgaagagaaagcagcaatgctaaacctctgtttcatgctaaccagacacgccgtgcactcgttagattcctttcttagaaaactcgttttctgctcccttccctcgtcccttccctccccgacaggtcacataacagctgcatcattgaccgcacagcgccatctctccctgagaataaagccgatagccaccctcctccggctccgagcctgcttctgccacacctcgctctcagttctctccacatttccatagagaccgtgtggtttttgttcacccgggccccccgtcttcctccctgtccccccatttataggcataaaatccactgtctgccagcctcccttccctcccacctttttggtacattggtgtaaaaaatgtaaaacaaaaaaattttatgaactaactgtggtgtgtgaaagagagaagaaaaactggaaatcttattccgtgtgtgtttgggagttgcttggggttgggggtcgtggggacaggggacagctctgggagcagaggtggccctcggtgccgtcctgcgcagactctcccgtcccacggaggccgcggggtgggggctggggggggtgccgccgaccgttccgctcttccggccaggtgcttttctgtcaatttctatggaatgcaaaaggaggtttttgttttattttgtttttttgtaaagcttaagaaaaaaatctacatcttatacttgagcctccatactta

SEQ ID NO: 114068 - DNA, 1568 bp, Homo sapiens
  Payload ID: 2289
  Gene Symbol: CAPZB
  Gene Name: capping protein (actin filament) muscle Z-line, beta
  ENST ID: ENST00000375144
  CDS Start-End: 35-817
gagtgatcagcagctggactgtgccttggacctaatgaggcgcctgcctccccagcaaatcgagaaaaacctcagcgacctgatcgacctggtccccagtctatgtgaggatctcctgtcttctgttgaccagccactgaaaattgccagagacaaggtggtgggaaaggattaccttttgtgtgactacaacagagatggggactcctataggtcaccatggagtaacaagtatgaccctcccttggaggatggggccatgccgtcagctcggctgagaaagctggaggtggaagccaacaatgcctttgaccagtatcgagacctgtattttgaaggtggcgtctcatctgtctacctctgggatctggatcatggctttgctggagtgatcctcataaagaaggctggagatggatcaaagaagatcaaaggctgctgggattccatccacgtggtagaagtgcaggagaaatccagcggtcgcaccgcccattacaagttgacctccacggtgatgctgtggctgcagaccaacaaatctggctctggcaccatgaacctcggaggcagccttaccagacagatggagaaggatgaaactgtgagtgactgctccccacacatagccaacatcgggcgcctggtagaggacatggaaaataaaatcagaagtacgctgaacgagatctactttggaaaaacaaaggatatcgtcaatgggctgaggtctgtgcagacttttgcagacaaatcaaaacaagaagctctgaagaatgacctggtggaggctttgaagagaaagcagcaatgctaaacctctgtttcatgctaaccagacacgccgtgcactcgttagattcctttcttagaaaactcgttttctgctcccttccctcgtcccttccctccccgacaggtcacataacagctgcatcattgaccgcacagcgccatctctccctgagaataaagccgatagccaccctcctccggctccgagcctgcttctgccacacctcgctctcagttctctccacatttccatagagaccgtgtggtttttgttcacccgggccccccgtcttcctccctgtccccccatttataggcataaaatccactgtctgccagcctcccttccctcccacctttttggtacattggtgtaaaaaatgtaaaacaaaaaaattttatgaactaactgtggtgtgtgaaagagagaagaaaaactggaaatcttattccgtgtgtgtttgggagttgcttggggttgggggtcgtggggacaggggacagctctgggagcagaggtggccctcggtgccgtcctgcgcagactctcccgtcccacggaggccgcggggtgggggctggggggggtgccgccgaccgttccgctcttccggccaggtgcttttctgtcaatttctatggaatgcaaaaggaggtttttgttttattttgtttttttgtaaagcttaagaaaaaaatctacatcttatacttgagcctccatacttaaaaaaagaaaagaaaagaaatcaataaaaagaaactggggcgca

SEQ ID NO: 114069 - DNA, 1462 bp, Homo sapiens
  Payload ID: 2289
  Gene Symbol: CAPZB
  Gene Name: capping protein (actin filament) muscle Z-line, beta
  ENST ID: ENST00000433834
  CDS Start-End: 386-1291
tccctgtacctggggcgcgccttctttgcagcctttggggagcgaggggagctctccatcagggatggggtggtcccggtgctgtgccttctcagttgccgcttctagggaggccgcctaggagccagcgagggaagggcgggcatcggtgtgcccagaaggcagcgcgctgctctgcgggcccttctcgaggctgccgccgtgggtgctgtgcgtgcgaagcattctgcagggcaggccggggtccacggcgcccgggcctgagtgggagccgaggggcgaggatgggtggcccacaggacaaggatgaacgcacaatcgcccttgtgaggccgtggccttggggggccaccaggccctggatccagcatatggcctggacacgatgcacccaagcaggcgcagcctccccttccctctgaactgtcagcttgcaagggttggaactgctgattatggaagtccctcggatcagagtgatcagcagctggactgtgccttggacctaatgaggcgcctgcctccccagcaaatcgagaaaaacctcagcgacctgatcgacctggtccccagtctatgtgaggatctcctgtcttctgttgaccagccactgaaaattgccagagacaaggtggtgggaaaggattaccttttgtgtgactacaacagagatggggactcctataggtcaccatggagtaacaagtatgaccctcccttggaggatggggccatgccgtcagctcggctgagaaagctggaggtggaagccaacaatgcctttgaccagtatcgagacctgtattttgaaggtggcgtctcatctgtctacctctgggatctggatcatggctttgctggagtgatcctcataaagaaggctggagatggatcaaagaagatcaaaggctgctgggattccatccacgtggtagaagtgcaggagaaatccagcggtcgcaccgcccattacaagttgacctccacggtgatgctgtggctgcagaccaacaaatctggctctggcaccatgaacctcggaggcagccttaccagacagatggagaaggatgaaactgtgagtgactgctccccacacatagccaacatcgggcgcctggtagaggacatggaaaataaaatcagaagtacgctgaacgagatctactttggaaaaacaaaggatatcgtcaatgggctgaggtctgtgcagacttttgcagacaaatcaaaacaagaagctctgaagaatgacctggtggaggctttgaagagaaagcagcaatgctaaacctctgtttcatgctaaccagacacgccgtgcactcgttagattcctttcttagaaaactcgttttctgctcccttccctcgtcccttccctccccgacaggtcacataacagctgcatcattgaccgcacagcgccatctctccctgagaataaagccgatagccaccc

SEQ ID NO: 114070 - DNA, 1442 bp, Homo sapiens
  Payload ID: 2290
  Gene Symbol: CAPG
  Gene Name: capping protein (actin filament), gelsolin-like
  Uniprot ID: P40121
  ENST ID: ENST00000263867
  CDS Start-End: 251-1297
gacggcctggcatacccactgcccaccccagtgactgctcttctgcttcaggcctgctggcctcccagcactgcctgcccctccctgtcgggggacatcgcctccacaccggctggggaaggagcccaggggtggggctggtgggtggggctggtggttggggcagccagagaagtaagagggaagtgagaagccgggtggggcaggctggaaggaagacgaacctacgaagcagagatctgaagacagcatgtacacagccattccccagagtggctctccattcccaggctcagtgcaggatccaggcctgcatgtgtggcgggtggagaagctgaagccggtgcctgtggcgcaagagaaccagggcgtcttcttctcgggggactcctacctagtgctgcacaatggcccagaagaggtttcccatctgcacctgtggataggccagcagtcatcccgggatgagcagggggcctgtgccgtgctggctgtgcacctcaacacgctgctgggagagcggcctgtgcagcaccgcgaggtgcagggcaatgagtctgacctcttcatgagctacttcccacggggcctcaagtaccaggaaggtggtgtggagtcagcatttcacaagacctccacaggagccccagctgccatcaagaaactctaccaggtgaaggggaagaagaacatccgtgccaccgagcgggcactgaactgggacagcttcaacactggggactgcttcatcctggacctgggccagaacatcttcgcctggtgtggtggaaagtccaacatcctggaacgcaacaaggcgagggacctggccctggccatccgggacagtgagcgacagggcaaggcccaggtggagattgtcactgatggggaggagcctgctgagatgatccaggtcctgggccccaagcctgctctgaaggagggcaaccctgaggaagacctcacagctgacaaggcaaatgcccaggccgcagctctgtataaggtctctgatgccactggacagatgaacctgaccaaggtggctgactccagcccatttgcccttgaactgctgatatctgatgactgctttgtgctggacaacgggctctgtggcaagatctatatctggaaggggcgaaaagcgaatgagaaggagcggcaggcagccctgcaggtggccgagggcttcatctcgcgcatgcagtacgccccgaacactcaggtggagattctgcctcagggccatgagagtcccatcttcaagcaatttttcaaggactggaaatgagggtgggcgtcttcctgccccatgctcccctgccccccaccacctgcctgcttgcttctctggctgcctggtcagtgcagaggtgccccctgcagatgttcaataaaggagacaagtgctttcccagctcttttcctgcaccacc

SEQ ID NO: 114071 - DNA, 1183 bp, Homo sapiens
  Payload ID: 2290
  Gene Symbol: CAPG
  Gene Name: capping protein (actin filament), gelsolin-like
  Uniprot ID: P40121
  ENST ID: ENST00000409670
  CDS Start-End: 72-1118
tccagggggcggggggcggctgagacagcgcccagggcctcggagcaaggcgttggcaggcaagtaacagcatgtacacagccattccccagagtggctctccattcccaggctcagtgcaggatccaggcctgcatgtgtggcgggtggagaagctgaagccggtgcctgtggcgcaagagaaccagggcgtcttcttctcgggggactcctacctagtgctgcacaatggcccagaagaggtttcccatctgcacctgtggataggccagcagtcatcccgggatgagcagggggcctgtgccgtgctggctgtgcacctcaacacgctgctgggagagcggcctgtgcagcaccgcgaggtgcagggcaatgagtctgacctcttcatgagctacttcccacggggcctcaagtaccaggaaggtggtgtggagtcagcatttcacaagacctccacaggagccccagctgccatcaagaaactctaccaggtgaaggggaagaagaacatccgtgccaccgagcgggcactgaactgggacagcttcaacactggggactgcttcatcctggacctgggccagaacatcttcgcctggtgtggtggaaagtccaacatcctggaacgcaacaaggcgagggacctggccctggccatccgggacagtgagcgacagggcaaggcccaggtggagattgtcactgatggggaggagcctgctgagatgatccaggtcctgggccccaagcctgctctgaaggagggcaaccctgaggaagacctcacagctgacaaggcaaatgcccaggccgcagctctgtataaggtctctgatgccactggacagatgaacctgaccaaggtggctgactccagcccatttgcccttgaactgctgatatctgatgactgctttgtgctggacaacgggctctgtggcaagatctatatctggaaggggcgaaaagcgaatgagaaggagcggcaggcagccctgcaggtggccgagggcttcatctcgcgcatgcagtacgccccgaacactcaggtggagattctgcctcagggccatgagagtcccatcttcaagcaatttttcaaggactggaaatgagggtgggcgtcttcctgccccatgctcccctgccccccaccacctgcctgcttgcttctctggct

SEQ ID NO: 114072 - DNA, 835 bp, Homo sapiens
  Payload ID: 2290
  Gene Symbol: CAPG
  Gene Name: capping protein (actin filament), gelsolin-like
  ENST ID: ENST00000409275
  CDS Start-End: 180-835
cttacacgcgtcctggcgtgtggctctcctgcgtcctcgtttttctcgtgagccctggatctggacagtgggcccggcgcgaggccctcaactccggctgggctcccggtggcactttctgccgaccctgagatgtacccgccacgcctgcgggactgacctctagatctgaagacagcatgtacacagccattccccagagtggctctccattcccaggctcagtgcaggatccaggcctgcatgtgtggcgggtggagaagctgaagccggtgcctgtggcgcaagagaaccagggcgtcttcttctcgggggactcctacctagtgctgcacaatggcccagaagaggtttcccatctgcacctgtggataggccagcagtcatcccgggatgagcagggggcctgtgccgtgctggctgtgcacctcaacacgctgctgggagagcggcctgtgcagcaccgcgaggtgcagggcaatgagtctgacctcttcatgagctacttcccacggggcctcaagtaccaggaaggtggtgtggagtcagcatttcacaagacctccacaggagccccagctgccatcaagaaactctaccaggtgaaggggaagaagaacatccgtgccaccgagcgggcactgaactgggacagcttcaacactggggactgcttcatcctggacctgggccagaacatcttcgcctggtgtggtggaaagtccaacatcctggaacgcaacaaggcgagggacctggccctggccatccgggacagtgagcgacagggcaaggcccaggtggagattgtcactgatggggaggagcctgctga

SEQ ID NO: 114073 - DNA, 1151 bp, Homo sapiens
  Payload ID: 2290
  Gene Symbol: CAPG
  Gene Name: capping protein (actin filament), gelsolin-like
  Uniprot ID: P40121
  ENST ID: ENST00000409724
  CDS Start-End: 105-1151
gactcaccgggggcggctcctggccgcgcacctccagggggcggggggcggctgagacagcgcccagggcctcggagcaaggcgttggcagatctgaagacagcatgtacacagccattccccagagtggctctccattcccaggctcagtgcaggatccaggcctgcatgtgtggcgggtggagaagctgaagccggtgcctgtggcgcaagagaaccagggcgtcttcttctcgggggactcctacctagtgctgcacaatggcccagaagaggtttcccatctgcacctgtggataggccagcagtcatcccgggatgagcagggggcctgtgccgtgctggctgtgcacctcaacacgctgctgggagagcggcctgtgcagcaccgcgaggtgcagggcaatgagtctgacctcttcatgagctacttcccacggggcctcaagtaccaggaaggtggtgtggagtcagcatttcacaagacctccacaggagccccagctgccatcaagaaactctaccaggtgaaggggaagaagaacatccgtgccaccgagcgggcactgaactgggacagcttcaacactggggactgcttcatcctggacctgggccagaacatcttcgcctggtgtggtggaaagtccaacatcctggaacgcaacaaggcgagggacctggccctggccatccgggacagtgagcgacagggcaaggcccaggtggagattgtcactgatggggaggagcctgctgagatgatccaggtcctgggccccaagcctgctctgaaggagggcaaccctgaggaagacctcacagctgacaaggcaaatgcccaggccgcagctctgtataaggtctctgatgccactggacagatgaacctgaccaaggtggctgactccagcccatttgcccttgaactgctgatatctgatgactgctttgtgctggacaacgggctctgtggcaagatctatatctggaaggggcgaaaagcgaatgagaaggagcggcaggcagccctgcaggtggccgagggcttcatctcgcgcatgcagtacgccccgaacactcaggtggagattctgcctcagggccatgagagtcccatcttcaagcaatttttcaaggactggaaatga

SEQ ID NO: 114074 - DNA, 1195 bp, Homo sapiens
  Payload ID: 2290
  Gene Symbol: CAPG
  Gene Name: capping protein (actin filament), gelsolin-like
  Uniprot ID: P40121
  ENST ID: ENST00000409921
  CDS Start-End: 68-1069
aagtgagaagccgggtggggcaggctggaaggaagacgaacctacgaagcagagatctgaagacagcatgtacacagccattccccagagtggctctccattcccaggctcagtgcaggatccaggcctgcatgtgtggcgggtggagaagctgaagccggtgcctgtggcgcaagagaaccagggcgtcttcttctcgggggactcctacctagtgctgcacaatggcccagaagaggtttcccatctgcacctgtggataggccagcagtcatcccgggatgagcagggggcctgtgccgtgctggctgtgcacctcaacacgctgctgggagagcggcctgtgcagcaccgcgaggtgcagggcaatgagtctgacctcttcatgagctacttcccacggggcctcaagtaccaggaaggtggtgtggagtcagcatttcacaagacctccacaggagccccagctgccatcaagaaactctaccaggtgaaggggaagaagaacatccgtgccaccgagcgggcactgaactgggacagcttcaacactggggactgcttcatcctggacctgggccagaacatcttcgcctggtgtggtggaaagtccaacatcctggaacgcaacaaggcgagggacctggccctggccatccgggacagtgagcgacagggcaaggcccaggtcctgggccccaagcctgctctgaaggagggcaaccctgaggaagacctcacagctgacaaggcaaatgcccaggccgcagctctgtataaggtctctgatgccactggacagatgaacctgaccaaggtggctgactccagcccatttgcccttgaactgctgatatctgatgactgctttgtgctggacaacgggctctgtggcaagatctatatctggaaggggcgaaaagcgaatgagaaggagcggcaggcagccctgcaggtggccgagggcttcatctcgcgcatgcagtacgccccgaacactcaggtggagattctgcctcagggccatgagagtcccatcttcaagcaatttttcaaggactggaaatgagggtgggcgtcttcctgccccatgctcccctgccccccaccacctgcctgcttgcttctctggctgcctggtcagtgcagaggtgccccctgcagatgttcaataaaggagacaagtgctttccca

SEQ ID NO: 114075 - DNA, 865 bp, Homo sapiens
  Payload ID: 2290
  Gene Symbol: CAPG
  Gene Name: capping protein (actin filament), gelsolin-like
  ENST ID: ENST00000439385
  CDS Start-End: 107-865
gctcccctcttcaactttagcactttctaatgctgacatctgtgattctgtgacattccccacttagaggaagttcgtctgcggtttcactggatctgaagacagcatgtacacagccattccccagagtggctctccattcccaggctcagtgcaggatccaggcctgcatgtgtggcgggtggagaagctgaagccggtgcctgtggcgcaagagaaccagggcgtcttcttctcgggggactcctacctagtgctgcacaatggcccagaagaggtttcccatctgcacctgtggataggccagcagtcatcccgggatgagcagggggcctgtgccgtgctggctgtgcacctcaacacgctgctgggagagcggcctgtgcagcaccgcgaggtgcagggcaatgagtctgacctcttcatgagctacttcccacggggcctcaagtaccaggaaggtggtgtggagtcagcatttcacaagacctccacaggagccccagctgccatcaagaaactctaccaggtgaaggggaagaagaacatccgtgccaccgagcgggcactgaactgggacagcttcaacactggggactgcttcatcctggacctgggccagaacatcttcgcctggtgtggtggaaagtccaacatcctggaacgcaacaaggcgagggacctggccctggccatccgggacagtgagcgacagggcaaggcccaggtggagattgtcactgatggggaggagcctgctgagatgatccaggtcctgggccccaagcctgctctgaaggagggcaaccctgaggaagacctcacagctgacaaggcaaatgcccaggccgcagctctgtataag

SEQ ID NO: 114076 - DNA, 452 bp, Homo sapiens
  Payload ID: 2290
  Gene Symbol: CAPG
  Gene Name: capping protein (actin filament), gelsolin-like
  ENST ID: ENST00000453973
  CDS Start-End: 1-312
ctcacagctgacaaggcaaatgcccaggccgcagctctgtataagatgaacctgaccaaggtggctgactccagcccatttgcccttgaactgctgatatctgatgactgctttgtgctggacaacgggctctgtggcaagatctatatctggaaggggcgaaaagcgaatgagaaggagcggcaggcagccctgcaggtggccgagggcttcatctcgcgcatgcagtacgccccgaacactcaggtggagattctgcctcagggccatgagagtcccatcttcaagcaatttttcaaggactggaaatgagggtgggcgtcttcctgccccatgctcccctgccccccaccacctgcctgcttgcttctctggctgcctggtcagtgcagaggtgccccctgcagatgttcaataaaggagacaagtgctttcccagctcttttcctgca

SEQ ID NO: 114077 - DNA, 930 bp, Homo sapiens
  Payload ID: 2290
  Gene Symbol: CAPG
  Gene Name: capping protein (actin filament), gelsolin-like
  ENST ID: ENST00000447219
  CDS Start-End: 172-930
agggggcggggggcggctgagacagcgcccagggcctcggagcaaggcgttggcaggagaggctttagcctagacagctgagtgtgaggaacagtgattcccattgatccttgttccctccgtgggtcacagagtccagaacttaagagccacccaagatctgaagacagcatgtacacagccattccccagagtggctctccattcccaggctcagtgcaggatccaggcctgcatgtgtggcgggtggagaagctgaagccggtgcctgtggcgcaagagaaccagggcgtcttcttctcgggggactcctacctagtgctgcacaatggcccagaagaggtttcccatctgcacctgtggataggccagcagtcatcccgggatgagcagggggcctgtgccgtgctggctgtgcacctcaacacgctgctgggagagcggcctgtgcagcaccgcgaggtgcagggcaatgagtctgacctcttcatgagctacttcccacggggcctcaagtaccaggaaggtggtgtggagtcagcatttcacaagacctccacaggagccccagctgccatcaagaaactctaccaggtgaaggggaagaagaacatccgtgccaccgagcgggcactgaactgggacagcttcaacactggggactgcttcatcctggacctgggccagaacatcttcgcctggtgtggtggaaagtccaacatcctggaacgcaacaaggcgagggacctggccctggccatccgggacagtgagcgacagggcaaggcccaggtggagattgtcactgatggggaggagcctgctgagatgatccaggtcctgggccccaagcctgctctgaaggagggcaaccctgaggaagacctcacagctgacaaggcaaatgcccaggccgcagctctgtataag

SEQ ID NO: 114078 - DNA, 839 bp, Homo sapiens
  Payload ID: 2290
  Gene Symbol: CAPG
  Gene Name: capping protein (actin filament), gelsolin-like
  ENST ID: ENST00000449030
  CDS Start-End: 81-839
gtggcacatttgattattttgcaaactctggaagaccttggctgagggtctaggtggactgtctgagatctgaagacagcatgtacacagccattccccagagtggctctccattcccaggctcagtgcaggatccaggcctgcatgtgtggcgggtggagaagctgaagccggtgcctgtggcgcaagagaaccagggcgtcttcttctcgggggactcctacctagtgctgcacaatggcccagaagaggtttcccatctgcacctgtggataggccagcagtcatcccgggatgagcagggggcctgtgccgtgctggctgtgcacctcaacacgctgctgggagagcggcctgtgcagcaccgcgaggtgcagggcaatgagtctgacctcttcatgagctacttcccacggggcctcaagtaccaggaaggtggtgtggagtcagcatttcacaagacctccacaggagccccagctgccatcaagaaactctaccaggtgaaggggaagaagaacatccgtgccaccgagcgggcactgaactgggacagcttcaacactggggactgcttcatcctggacctgggccagaacatcttcgcctggtgtggtggaaagtccaacatcctggaacgcaacaaggcgagggacctggccctggccatccgggacagtgagcgacagggcaaggcccaggtggagattgtcactgatggggaggagcctgctgagatgatccaggtcctgggccccaagcctgctctgaaggagggcaaccctgaggaagacctcacagctgacaaggcaaatgcccaggccgcagctctgtataag

SEQ ID NO: 114079 - DNA, 4334 bp, Homo sapiens
  Payload ID: 2291
  Gene Symbol: CAPRIN2
  Gene Name: caprin family member 2
  Uniprot ID: Q6IMN6
  ENST ID: ENST00000298892
  CDS Start-End: 752-3985
gtcggtgcctgcagggctctccgtggccgctcgggagaggtgctcttcgctcaggctcccccggagacttgagggggtgcgcgctggcgtgcatggggcctgttctgtccttggtttggggatgctcctaaggggggagaaagggatacctcgggtgcttggaggtcgagagacggatacgtaagtgcgcaagggccactgattagggcacgggaagggctcgctagaatgagctcttaaactggttgggtgtaagcggttttgggctagtctaaaccaaacaactgagaataaacgcggggttcctgcaggttgagagagtacctgtctgcaaatgtccagtagtgatggattgccttgtaggccccagagcaatcggggaagttagcattcttgttcaagaagctgctggttcacttagagctataaaagaatgttgtgagtttggattttcttccaaacgttcaggattgaggttagggctggtggtgagggatcatgtaaagaggtttgagtggctcagccttaggtcccggtgtggaaagcttattcttttggtgtcatcacgtggccatgggaattatttagaatgtgatctgccctcatgagaagaaaggagctctgaagccgttgcagttcttcctccctatgtggaaaatcgaatttctggaaacatcctccgtattgggagattttgcctatgtaaaggctatccttattggctagcggcactaattactttaaaagtaggatggaagtacaagtatctcaagcatcattgggtttcgagctcacttctgtggaaaagagtttaagggagtggtctagactttccagggaagttattgcctggctgtgtccctctagtcctaattttatacttaactttcccccacctccttcagcctcatctgtttcaatggtgcaactcttttcatccccttttggttaccagtcaccttcaggccattcagaggaggaaagagaggggaatatgaagtcagccaagccccaagtgaaccacagtcagcatggggaaagccagcgggccttgagccccctgcagtctactctgagttctgctgcatctccttcccaagcgtatgagacctatattgaaaatggactcatatgccttaaacacaaaattagaaacatcgagaaaaagaagctcaaactggaggattataaggatcgcctgaaaagtggagagcatcttaatccagaccagttggaagctgtagagaaatatgaagaagtgctacataatttggaatttgccaaggagcttcaaaaaaccttttctgggttgagcctagatctactaaaagcgcaaaagaaggcccagagaagggagcacatgctaaaacttgaggctgagaagaaaaagcttcgaactatacttcaagttcagtatgtattgcagaacttgacacaggagcacgtacaaaaagacttcaaagggggtttgaatggtgcagtgtatttgccttcaaaagaacttgactacctcattaagttttcaaaactgacctgccctgaaagaaatgaaagtctgagtgttgaagaccagatggagcagtcatccttgtacttttgggaccttttggaaggtagtgagaaagcagtggtaggaacgacatacaaacacttgaaggatctactgtctaaattgctgaactcaggctattttgaaagtatcccagttcccaaaaatgccaaggaaaaggaagtaccactggaggaagaaatgctaatacaatcagagaaaaaaacacaattatcgaagactgaatctgtcaaagagtcagagtctctaatggaatttgcccagccagagatacaaccacaagagtttcttaacagacgctatatgacagaagtagattattcaaacaaacaaggcgaagagcaaccttgggaagcagattatgctagaaaaccaaatctcccaaaacgttgggatatgcttactgaaccagatggtcaagagaagaaacaggagtcctttaagtcctgggaggcttctggtaagcaccaggaggtatccaagcctgcagtttccttagaacagaggaaacaagacacctcaaaactcaggtctactctgccggaagagcagaagaagcaggagatctccaaatccaagccatctcctagccagtggaagcaagatacacctaaatccaaagcagggtatgttcaagaggaacaaaagaaacaggagacaccaaagctgtggccagttcagctgcagaaagaacaagatccaaagaagcaaactccaaagtcttggacaccttccatgcagagcgaacagaacaccaccaagtcatggaccactcccatgtgtgaagaacaggattcaaaacagccagagactccaaaatcctgggaaaacaatgttgagagtcaaaaacactctttaacatcacagtcacagatttctccaaagtcctggggagtagctacagcaagcctcataccaaatgaccagctgctgcccaggaagttgaacacagaacccaaagatgtgcctaagcctgtgcatcagcctgtaggttcttcctctacccttccgaaggatccagtattgaggaaagaaaaactgcaggatctgatgactcagattcaaggaacttgtaactttatgcaagagtctgttcttgactttgacaaaccttcaagtgcaattccaacgtcacaaccgccttcagctactccaggtagccccgtagcatctaaagaacaaaatctgtccagtcaaagtgattttcttcaagagccgttacaggctacttcttctccagttacttgtagctcaaatgcttgcttggttactaccgatcaggcttcttctggatctgaaacagagtttatgacctcagagactcctgaggtatttaacgttaatgcacctctgcctccacgaaaagaacaagaaataaaagaatccccttattcacctggctacaatcaaagttttaccacagcaagtacacaaacaccaccccagtgccaactgccatctatacatgtagaacaaactgtccattctcaagagactgcaaattatcatcctgatggaactattcaagtaagcaatggtagccttgccttttacccagcacagacgaatgtgtttcccagacctactcagccatttgtcaatagccggggatctgttagaggatgtactcgtggtgggagattaataaccaattcctatcggtcccctggtggttataaaggttttgatacttatagaggactcccttcaatttccaatggaaattatagccagctgcagttccaagctagagagtattctggagcaccttattcccaaagggataatttccagcagtgttataagcgaggagggacatctggtggtccacgagcaaattcgagagcagggtggagtgattcttctcaggtgagcagcccagaaagagacaacgaaacctttaacagtggtgactctggacaaggagactcccgtagcatgacccctgtggatgtgccagtgacaaatccagcagccaccatactgccagtacacgtctaccctctgcctcagcagatgcgagttgccttctcagcagccagaacctctaatctggcccctggaactttagaccaacctattgtgtttgatcttcttctgaacaacttaggagaaacttttgatcttcagcttggtagatttaattgcccagtgaatggcacttacgttttcatttttcacatgctaaagctggcagtgaatgtgccactgtatgtcaacctcatgaagaatgaagaggtcttggtatcagcctatgccaatgatggtgctccagaccatgaaactgctagcaatcatgcaattcttcagctcttccagggagaccagatatggttacgtctgcacaggggagcaatttatggaagtagctggaaatattctacgttttcaggctatcttctttatcaagattgaaagtcagtacagtattgacaataaaaggatggtgttctaattagtgggattgaaggaaaagtagtctttgccctcatgactgattggtttaggaaaatgtttttgttcctagagggaggaggtccttacttttttgttttccttcctgaggtgaaaaatcaagctgaatgacaattagcactaatctggcactttataaattgtgatgtagcctcgctagtcaagctgtgaatgtatattgtttgcacttaatccttaactgtattaacgttcagcttactaaactgactgcctcaagtccaggcaagttacaatgccttgttgtgcctcaataaaaaagttacatgca

SEQ ID NO: 114080 - DNA, 4156 bp, Homo sapiens
  Payload ID: 2291
  Gene Symbol: CAPRIN2
  Gene Name: caprin family member 2
  Uniprot ID: Q6IMN6
  ENST ID: ENST00000395805
  CDS Start-End: 549-3266
tagggcacgggaagggctcgctagaatgagctcttaaactggttgggtgtaagcggttttgggctagtctaaaccaaacaactgagaataaacgcggggttcctgcaggttgagagagtacctgtctgcaaatgtccagtagtgatggattgccttgtaggccccagagcaatcggggaagttagcattcttgttcaagaagctgctggttcacttagagctataaaagaatgttgtgagtttggattttcttccaaacgttcaggattgaggttagggctggtggtgagggatcatgtaaagaggtttgagtggctcagccttaggtcccggtgtggaaagcttattcttttggtgtcatcacgtggccatgggaattatttagaatgtgatctgccctcatgagaagaaaggagctctgaagccgttgcagttcttcctccctatgtggaaaatcgaatttctggaaacatcctccgtattgggagattttgcctatgtaaaggctatccttattggctagcggcactaattactttaaaagtaggatggaagtacaagtatctcaagcatcattgggtttcgagctcacttctgtggaaaagagtttaagggagtggtctagactttccagggaagttattgcctggctgtgtccctctagtcctaattttatacttaactttcccccacctccttcagcctcatctgtttcaatggtgcaactcttttcatccccttttggttaccagtcaccttcaggccattcagaggaggaaagagaggggaatatgaagtcagccaagccccaagtgaaccacagtcagcatggggaaagccagcgggccttgagccccctgcagtctactctgagttctgctgcatctccttcccaagcgtatgagacctatattgaaaatggactcatatgccttaaacacaaaattagaaacatcgagaaaaagaagctcaaactggaggattataaggatcgcctgaaaagtggagagcatcttaatccagaccagttggaagctgtagagaaatatgaagaagtgctacataatttggaatttgccaaggagcttcaaaaaaccttttctgggttgagcctagatctactaaaagcgcaaaagaaggcccagagaagggagcacatgctaaaacttgaggctgagaagaaaaagcttcgaactatacttcaagttcagtatgtattgcagaacttgacacaggagcacgtacaaaaagacttcaaagggggtttgaatggtgcagtgtatttgccttcaaaagaacttgactacctcattaagttttcaaaactgacctgccctgaaagaaatgaaagtctgagtgttgaagaccagatggagcagtcatccttgtacttttgggaccttttggaaggtagtgagaaagcagtggtaggaacgacatacaaacacttgaaggatctactgtctaaattgctgaactcaggctattttgaaagtatcccagttcccaaaaatgccaaggaaaaggaagtaccactggaggaagaaatgctaatacaatcagagaaaaaaacacaattatcgaagactgaatctgtcaaagagtcagagtctctaatggaatttgcccagccagagatacaaccacaagagtttcttaacagacgctatatgacagaagtagattattcaaacaaacaaggcgaagagcaaccttgggaagcagattatgctagaaaaccaaatctcccaaaacgttgggatatgcttactgaaccagatggtcaagagaagaaacaggagtcctttaagtcctgggaggcttctggtaagcaccaggaggtatccaagcctgcagtttccttagaacagaggaaacaagacacctcaaaactcaggtctactctgccggaagagcagaagaagcaggagatctccaaatccaagccatctcctagccagtggaagcaagatacacctaaatccaaagcagggtatgttcaagaggaacaaaagaaacaggagacaccaaagctgtggccagttcagctgcagaaagaacaagatccaaagaagcaaactccaaagtcttggacaccttccatgcagagcgaacagaacaccaccaagtcatggaccactcccatgtgtgaagaacaggattcaaaacagccagagactccaaaatcctgggaaaacaatgttgagagtcaaaaacactctttaacatcacagtcacagatttctccaaagtcctggggagtagctacagcaagcctcataccaaatgaccagctgctgcccaggaagttgaacacagaacccaaagatgtgcctaagcctgtgcatcagcctgtaggttcttcctctacccttccgaaggatccagtattgaggaaagaaaaactgcaggatctgatgactcagattcaaggaacttgtaactttatgcaagagtctgttcttgactttgacaaaccttcaagtgcaattccaacgtcacaaccgccttcagctactccaggtagccccgtagcatctaaagaacaaaatctgtccagtcaaagtgattttcttcaagagccgttacaggcagcaattcccccaggcaagcaaccgtcttcactagcttctccaaatcctcccatggcaaagggctctgaacagggcttccagtcacctccagcaagtagtagttcagtaaccattaacacagcaccctttcaagccatgcagacagtatttaacgttaatgcacctctgcctccacgaaaagaacaagaaataaaagaatccccttattcacctggctacaatcaaagttttaccacagcaagtacacaaacaccaccccagtgccaactgccatctatacatgtagaacaaactgtccattctcaagagactgcacagacgaatgtgtttcccagacctactcagccatttgtcaatagccggggatctgttagaggatgtactcgtggtgggagattaataaccaattcctatcggtcccctggtggttataaaggttttgatacttatagaggactcccttcaatttccaatggaaattatagccagctgcagttccaagctagagagtattctggagcaccttattcccaaagggataatttccagcagtgttataagcgaggagggacatctggtggtccacgagcaaattcgagagctaactgcttcattatgagaaactcactgttgctaataaaacagcagggtggagtgattcttctcaggtgagcagcccagaaagagacaacgaaacctttaacagtggtgactctggacaaggagactcccgtagcatgacccctgtggatgtgccagtgacaaatccagcagccaccatactgccagtacacgtctaccctctgcctcagcagatgcgagttgccttctcagcagccagaacctctaatctggcccctggaactttagaccaacctattgtgtttgatcttcttctgaacaacttaggagaaacttttgatcttcagcttggtagatttaattgcccagtgaatggcacttacgttttcatttttcacatgctaaagctggcagtgaatgtgccactgtatgtcaacctcatgaagaatgaagaggtcttggtatcagcctatgccaatgatggtgctccagaccatgaaactgctagcaatcatgcaattcttcagctcttccagggagaccagatatggttacgtctgcacaggggagcaatttatggaagtagctggaaatattctacgttttcaggctatcttctttatcaagattgaaagtcagtacagtattgacaataaaaggatggtgttctaattagtgggattgaaggaaaagtagtctttgccctcatgactgattggtttaggaaaatgtttttgttcctagagggaggaggtccttacttttttgttttccttcctgaggtgaaaaatcaagctgaatgacaattagcactaatctggcactttataaattgtgatgtagcctcgctagtcaagctgtgaatgtatattgtttgcacttaatccttaactgtattaacgttcagcttactaaactgactgcctcaagtccaggcaagttacaatgccttgttgtgcctcaataaaaaagttacatgc

SEQ ID NO: 114081 - DNA, 3535 bp, Homo sapiens
  Payload ID: 2291
  Gene Symbol: CAPRIN2
  Gene Name: caprin family member 2
  Uniprot ID: Q6IMN6
  ENST ID: ENST00000417045
  CDS Start-End: 549-3431
tagggcacgggaagggctcgctagaatgagctcttaaactggttgggtgtaagcggttttgggctagtctaaaccaaacaactgagaataaacgcggggttcctgcaggttgagagagtacctgtctgcaaatgtccagtagtgatggattgccttgtaggccccagagcaatcggggaagttagcattcttgttcaagaagctgctggttcacttagagctataaaagaatgttgtgagtttggattttcttccaaacgttcaggattgaggttagggctggtggtgagggatcatgtaaagaggtttgagtggctcagccttaggtcccggtgtggaaagcttattcttttggtgtcatcacgtggccatgggaattatttagaatgtgatctgccctcatgagaagaaaggagctctgaagccgttgcagttcttcctccctatgtggaaaatcgaatttctggaaacatcctccgtattgggagattttgcctatgtaaaggctatccttattggctagcggcactaattactttaaaagtaggatggaagtacaagtatctcaagcatcattgggtttcgagctcacttctgtggaaaagagtttaagggagtggtctagactttccagggaagttattgcctggctgtgtccctctagtcctaattttatacttaactttcccccacctccttcagcctcatctgtttcaatggtgcaactcttttcatccccttttggttaccagtcaccttcaggccattcagaggaggaaagagaggggaatatgaagtcagccaagccccaagtgaaccacagtcagcatggggaaagccagcgggccttgagccccctgcagtctactctgagttctgctgcatctccttcccaagcgtatgagacctatattgaaaatggactcatatgccttaaacacaaaattagaaacatcgagaaaaagaagctcaaactggaggattataaggatcgcctgaaaagtggagagcatcttaatccagaccagttggaagctgtagagaaatatgaagaagtgctacataatttggaatttgccaaggagcttcaaaaaaccttttctgggttgagcctagatctactaaaagcgcaaaagaaggcccagagaagggagcacatgctaaaacttgaggctgagaagaaaaagcttcgaactatacttcaagttcagtatgtattgcagaacttgacacaggagcacgtacaaaaagacttcaaagggggtttgaatggtgcagtgtatttgccttcaaaagaacttgactacctcattaagttttcaaaactgacctgccctgaaagaaatgaaagtctgagtgttgaagaccagatggagcagtcatccttgtacttttgggaccttttggaaggtagtgagaaagcagtggtaggaacgacatacaaacacttgaaggatctactgtctaaattgctgaactcaggctattttgaaagtatcccagttcccaaaaatgccaaggaaaaggaagtaccactggaggaagaaatgctaatacaatcagagaaaaaaacacaattatcgaagactgaatctgtcaaagagtcagagtctctaatggaatttgcccagccagagatacaaccacaagagtttcttaacagacgctatatgacagaagtagattattcaaacaaacaaggcgaagagcaaccttgggaagcagattatgctagaaaaccaaatctcccaaaacgttgggatatgcttactgaaccagatggtcaagagaagaaacaggagtcctttaagtcctgggaggcttctggtaagcaccaggaggtatccaagcctgcagtttccttagaacagaggaaacaagacacctcaaaactcaggtctactctgccggaagagcagaagaagcaggagatctccaaatccaagccatctcctagccagtggaagcaagatacacctaaatccaaagcagggtatgttcaagaggaacaaaagaaacaggagacaccaaagctgtggccagttcagctgcagaaagaacaagatccaaagaagcaaactccaaagtcttggacaccttccatgcagagcgaacagaacaccaccaagtcatggaccactcccatgtgtgaagaacaggattcaaaacagccagagactccaaaatcctgggaaaacaatgttgagagtcaaaaacactctttaacatcacagtcacagatttctccaaagtcctggggagtagctacagcaagcctcataccaaatgaccagctgctgcccaggaagttgaacacagaacccaaagatgtgcctaagcctgtgcatcagcctgtaggttcttcctctacccttccgaaggatccagtattgaggaaagaaaaactgcaggatctgatgactcagattcaaggaacttgtaactttatgcaagagtctgttcttgactttgacaaaccttcaagtgcaattccaacgtcacaaccgccttcagctactccaggtagccccgtagcatctaaagaacaaaatctgtccagtcaaagtgattttcttcaagagccgttacaggctacttcttctccagttacttgtagctcaaatgcttgcttggttactaccgatcaggcttcttctggatctgaaacagagtttatgacctcagagactcctgaggcagcaattcccccaggcaagcaaccgtcttcactagcttctccaaatcctcccatggcaaagggctctgaacagggcttccagtcacctccagcaagtagtagttcagtaaccattaacacagcaccctttcaagccatgcagacagtatttaacgttaatgcacctctgcctccacgaaaagaacaagaaataaaagaatccccttattcacctggctacaatcaaagttttaccacagcaagtacacaaacaccaccccagtgccaactgccatctatacatgtagaacaaactgtccattctcaagagactgcaaattatcatcctgatggaactattcaagtaagcaatggtagccttgccttttacccagcacagacgaatgtgtttcccagacctactcagccatttgtcaatagccggggatctgttagaggatgtactcgtggtgggagattaataaccaattcctatcggtcccctggtggttataaaggttttgatacttatagaggactcccttcaatttccaatggaaattatagccagctgcagttccaagctagagagtattctggagcaccttattcccaaagggataatttccagcagtgttataagcgaggagggacatctggtggtccacgagcaaattcgagagctaactgcttcattatgagaaactcactgttgctaataaaacagcagggtggagtgattcttctcaggtgagcagcccagaaagagacaacgaaacctttaacagtggtgactctggacaaggagactcccgtagcatgacccctgtggatgtgccagtgacaaatccagcagcc

SEQ ID NO: 114082 - DNA, 4398 bp, Homo sapiens
  Payload ID: 2291
  Gene Symbol: CAPRIN2
  Gene Name: caprin family member 2
  Uniprot ID: Q6IMN6
  ENST ID: ENST00000454014
  CDS Start-End: 752-1588
gtcggtgcctgcagggctctccgtggccgctcgggagaggtgctcttcgctcaggctcccccggagacttgagggggtgcgcgctggcgtgcatggggcctgttctgtccttggtttggggatgctcctaaggggggagaaagggatacctcgggtgcttggaggtcgagagacggatacgtaagtgcgcaagggccactgattagggcacgggaagggctcgctagaatgagctcttaaactggttgggtgtaagcggttttgggctagtctaaaccaaacaactgagaataaacgcggggttcctgcaggttgagagagtacctgtctgcaaatgtccagtagtgatggattgccttgtaggccccagagcaatcggggaagttagcattcttgttcaagaagctgctggttcacttagagctataaaagaatgttgtgagtttggattttcttccaaacgttcaggattgaggttagggctggtggtgagggatcatgtaaagaggtttgagtggctcagccttaggtcccggtgtggaaagcttattcttttggtgtcatcacgtggccatgggaattatttagaatgtgatctgccctcatgagaagaaaggagctctgaagccgttgcagttcttcctccctatgtggaaaatcgaatttctggaaacatcctccgtattgggagattttgcctatgtaaaggctatccttattggctagcggcactaattactttaaaagtaggatggaagtacaagtatctcaagcatcattgggtttcgagctcacttctgtggaaaagagtttaagggagtggtctagactttccagggaagttattgcctggctgtgtccctctagtcctaattttatacttaactttcccccacctccttcagcctcatctgtttcaatggtgcaactcttttcatccccttttggttaccagtcaccttcaggccattcagaggaggaaagagaggggaatatgaagtcagccaagccccaagtgaaccacagtcagcatggggaaagccagcgggccttgagccccctgcagtctactctgagttctgctgcatctccttcccaagcgtatgagacctatattgaaaatggactcatatgccttaaacacaaaattagaaacatcgagaaaaagaagctcaaactggaggattataaggatcgcctgaaaagtggagagcatcttaatccagaccagttggaagctgtagagaaatatgaagaagtgctacataatttggaatttgccaaggagcttcaaaaaaccttttctgggttgagcctagatctactaaaagcgcaaaagaaggcccagagaagggagcacatgctaaaacttgaggctgagaagaaaaagcttcgaactatacttcaagttcagtatgtattgcagaacttgacacaggagcacgtacaaaaagacttcaaagggggtttgaatggtgcagtgtatttgccttcaaaagaacttgactacctcattaagttttcaaaactgacctgccctgaaagaaatgaaagtctgagacaaacacttgaaggatctactgtctaaattgctgaactcaggctattttgaaagtatcccagttcccaaaaatgccaaggaaaaggaagtaccactggaggaagaaatgctaatacaatcagagaaaaaaacacaattatcgaagactgaatctgtcaaagagtcagagtctctaatggaatttgcccagccagagatacaaccacaagagtttcttaacagacgctatatgacagaagtagattattcaaacaaacaaggcgaagagcaaccttgggaagcagattatgctagaaaaccaaatctcccaaaacgttgggatatgcttactgaaccagatggtcaagagaagaaacaggagtcctttaagtcctgggaggcttctggtaagcaccaggaggtatccaagcctgcagtttccttagaacagaggaaacaagacacctcaaaactcaggtctactctgccggaagagcagaagaagcaggagatctccaaatccaagccatctcctagccagtggaagcaagatacacctaaatccaaagcagggtatgttcaagaggaacaaaagaaacaggagacaccaaagctgtggccagttcagctgcagaaagaacaagatccaaagaagcaaactccaaagtcttggacaccttccatgcagagcgaacagaacaccaccaagtcatggaccactcccatgtgtgaagaacaggattcaaaacagccagagactccaaaatcctgggaaaacaatgttgagagtcaaaaacactctttaacatcacagtcacagatttctccaaagtcctggggagtagctacagcaagcctcataccaaatgaccagctgctgcccaggaagttgaacacagaacccaaagatgtgcctaagcctgtgcatcagcctgtaggttcttcctctacccttccgaaggatccagtattgaggaaagaaaaactgcaggatctgatgactcagattcaaggaacttgtaactttatgcaagagtctgttcttgactttgacaaaccttcaagtgcaattccaacgtcacaaccgccttcagctactccaggtagccccgtagcatctaaagaacaaaatctgtccagtcaaagtgattttcttcaagagccgttacaggctacttcttctccagttacttgtagctcaaatgcttgcttggttactaccgatcaggcttcttctggatctgaaacagagtttatgacctcagagactcctgaggcagcaattcccccaggcaagcaaccgtcttcactagcttctccaaatcctcccatggcaaagggctctgaacagggcttccagtcacctccagcaagtagtagttcagtaaccattaacacagcaccctttcaagccatgcagacagtatttaacgttaatgcacctctgcctccacgaaaagaacaagaaataaaagaatccccttattcacctggctacaatcaaagttttaccacagcaagtacacaaacaccaccccagtgccaactgccatctatacatgtagaacaaactgtccattctcaagagactgcaaattatcatcctgatggaactattcaagtaagcaatggtagccttgccttttacccagcacagacgaatgtgtttcccagacctactcagccatttgtcaatagccggggatctgttagaggatgtactcgtggtgggagattaataaccaattcctatcggtcccctggtggttataaaggttttgatacttatagaggactcccttcaatttccaatggaaattatagccagctgcagttccaagctagagagtattctggagcaccttattcccaaagggataatttccagcagtgttataagcgaggagggacatctggtggtccacgagcaaattcgagagcagggtggagtgattcttctcaggtgagcagcccagaaagagacaacgaaacctttaacagtggtgactctggacaaggagactcccgtagcatgacccctgtggatgtgccagtgacaaatccagcagccaccatactgccagtacacgtctaccctctgcctcagcagatgcgagttgccttctcagcagccagaacctctaatctggcccctggaactttagaccaacctattgtgtttgatcttcttctgaacaacttaggagaaacttttgatcttcagcttggtagatttaattgcccagtgaatggcacttacgttttcatttttcacatgctaaagctggcagtgaatgtgccactgtatgtcaacctcatgaagaatgaagaggtcttggtatcagcctatgccaatgatggtgctccagaccatgaaactgctagcaatcatgcaattcttcagctcttccagggagaccagatatggttacgtctgcacaggggagcaatttatggaagtagctggaaatattctacgttttcaggctatcttctttatcaagattgaaagtcagtacagtattgacaataaaaggatggtgttctaattagtgggattgaaggaaaagtagtctttgccctcatgactgattggtttaggaaaatgtttttgttcctagagggaggaggtccttacttttttgttttccttcctgaggtgaaaaatcaagctgaatgacaattagcactaatctggcactttataaattgtgatgtagcctcgctagtcaagctgtgaatgtatattgtttgcacttaatccttaactgtattaacgttcagcttactaaactgactgcctcaagtccaggcaagttacaatgccttgttgtgcctcaataaaaaagttacatgca

SEQ ID NO: 114083 - DNA, 3012 bp, Homo sapiens
  Payload ID: 2291
  Gene Symbol: CAPRIN2
  Gene Name: caprin family member 2
  ENST ID: ENST00000433722
  CDS Start-End: 1-2121
attaagttttcaaaactgacctgccctgaaagaaatgaaagtctgagtgttgaagaccagatggagcagtcatccttgtacttttgggaccttttggaaggtagtgagaaagcagtggtaggaacgacatacaaacacttgaaggatctactgtctaaattgctgaactcaggctattttgaaagtatcccagttcccaaaaatgccaaggaaaaggaagtaccactggaggaagaaatgctaatacaatcagagaaaaaaacacaattatcgaagactgaatctgtcaaagagtcagagtctctaatggaatttgcccagccagagatacaaccacaagagtttcttaacagacgctatatgacagaagtagattattcaaacaaacaaggcgaagagcaaccttgggaagcagattatgctagaaaaccaaatctcccaaaacgttgggatatgcttactgaaccagatggtcaagagaagaaacaggagtcctttaagtcctgggaggcttctggtaagcaccaggaggtatccaagcctgcagtttccttagaacagaggaaacaagacacctcaaaactcaggtctactctgccggaagagcagaagaagcaggagatctccaaatccaagccatctcctagccagtggaagcaagatacacctaaatccaaagcagggtatgttcaagaggaacaaaagaaacaggagacaccaaagctgtggccagttcagctgcagaaagaacaagatccaaagaagcaaactccaaagtcttggacaccttccatgcagagcgaacagaacaccaccaagtcatggaccactcccatgtgtgaagaacaggattcaaaacagccagagactccaaaatcctgggaaaacaatgttgagagtcaaaaacactctttaacatcacagtcacagatttctccaaagtcctggggagtagctacagcaagcctcataccaaatgaccagctgctgcccaggaagttgaacacagaacccaaagatgtgcctaagcctgtgcatcagcctgtaggttcttcctctacccttccgaaggatccagtattgaggaaagaaaaactgcaggatctgatgactcagattcaaggaacttgtaactttatgcaagagtctgttcttgactttgacaaaccttcaagtgcaattccaacgtcacaaccgccttcagctactccaggtagccccgtagcatctaaagaacaaaatctgtccagtcaaagtgattttcttcaagagccgttacaggctacttcttctccagttacttgtagctcaaatgcttgcttggttactaccgatcaggcttcttctggatctgaaacagagtttatgacctcagagactcctgaggcagcaattcccccaggcaagcaaccgtcttcactagcttctccaaatcctcccatggcaaagggctctgaacagggcttccagtcacctccagcaagtagtagttcagtaaccattaacacagcaccctttcaagccatgcagacagtatttaacgttaatgcacctctgcctccacgaaaagaacaagaaataaaagaatccccttattcacctggctacaatcaaagttttaccacagcaagtacacaaacaccaccccagtgccaactgccatctatacatgtagaacaaactgtccattctcaagagactgcaaattatcatcctgatggaactattcaagtaagcaatggtagccttgccttttacccagcacagacgaatgtgtttcccagacctactcagccatttgtcaatagccggggatctgttagaggatgtactcgtggtgggagattaataaccaattcctatcggtcccctggtggttataaaggttttgatacttatagaggactcccttcaatttccaatggaaattatagccagctgcagttccaagctagagagtattctggagcaccttattcccaaaggtgtttggaaacatctgagcctctttggttgctggggaaggccaggataatttccagcagtgttataagcgaggagggacatctggtggtccacgagcaaattcgagagcagggtggagtgattcttctcaggtgagcagcccagaaagagacaacgaaacctttaacagtggtgactctggacaaggagactcccgtagcatgacccctgtggatgtgccagtgacaaatccagcagccaccatactgccagtacacgtctaccctctgcctcagcagatgcgagttgccttctcagcagccagaacctctaatctggcccctggaactttagaccaacctattgtgtttgatcttcttctgaacaacttaggagaaacttttgatcttcagcttggtagatttaattgcccagtgaatggcacttacgttttcatttttcacatgctaaagctggcagtgaatgtgccactgtatgtcaacctcatgaagaatgaagaggtcttggtatcagcctatgccaatgatggtgctccagaccatgaaactgctagcaatcatgcaattcttcagctcttccagggagaccagatatggttacgtctgcacaggggagcaatttatggaagtagctggaaatattctacgttttcaggctatcttctttatcaagattgaaagtcagtacagtattgacaataaaaggatggtgttctaattagtgggattgaaggaaaagtagtctttgccctcatgactgattggtttaggaaaatgtttttgttcctagagggaggaggtccttacttttttgttttccttcctgaggtgaaaaatcaagctgaatgacaattagcactaatctggcactttataaattgtgatgtagcctcgctagtcaagctgtgaatgtatattgtttgcacttaatccttaactgtattaacgttcagcttactaaactgactgcctcaagtccaggcaagttacaatgccttgttgtgcctcaataaaaaagttacatgca

SEQ ID NO: 114084 - DNA, 2187 bp, Homo sapiens
  Payload ID: 2291
  Gene Symbol: CAPRIN2
  Gene Name: caprin family member 2
  ENST ID: ENST00000537108
  CDS Start-End: 82-2187
ctgggcgcgagcggctgagtcggctgggtctctggcgccgcagaggccgcgggcgaggaccgggaggaaagagaggggaatatgaagtcagccaagccccaagtgaaccacagtcagcatggggaaagccagcgggccttgagccccctgcagtctactctgagttctgctgcatctccttcccaagcgtatgagacctatattgaaaatggactcatatgccttaaacacaaaattagaaacatcgagaaaaagaagctcaaactggaggattataaggatcgcctgaaaagtggagagcatcttaatccagaccagttggaagctgtagagaaatatgaagaagtgctacataatttggaatttgccaaggagcttcaaaaaaccttttctgggttgagcctagatctactaaaagcgcaaaagaaggcccagagaagggagcacatgctaaaacttgaggctgagaagaaaaagcttcgaactatacttcaagttcagtatgtattgcagaacttgacacaggagcacgtacaaaaagacttcaaagggggtttgaatggtgcagtgtatttgccttcaaaagaacttgactacctcattaagttttcaaaactgacctgccctgaaagaaatgaaagtctgagtgttgaagaccagatggagcagtcatccttgtacttttgggaccttttggaaggtagtgagaaagcagtggtaggaacgacatacaaacacttgaaggatctactgtctaaattgctgaactcaggctattttgaaagtatcccagttcccaaaaatgccaaggaaaaggaagtaccactggaggaagaaatgctaatacaatcagagaaaaaaacacaattatcgaagactgaatctgtcaaagagtcagagtctctaatggaatttgcccagccagagatacaaccacaagagtttcttaacagacgctatatgacagaagtagattattcaaacaaacaaggcgaagagcaaccttgggaagcagattatgctagaaaaccaaatctcccaaaacgttgggatatgcttactgaaccagatggtcaagagaagaaacaggagtcctttaagtcctgggaggcttctggtaagcaccaggaggtatccaagcctgcagtttccttagaacagaggaaacaagacacctcaaaactcaggtctactctgccggaagagcagaagaagcaggagatctccaaatccaagccatctcctagccagtggaagcaagatacacctaaatccaaagcagggtatgttcaagaggaacaaaagaaacaggagacaccaaagctgtggccagttcagctgcagaaagaacaagatccaaagaagcaaactccaaagtcttggacaccttccatgcagagcgaacagaacaccaccaagtcatggaccactcccatgtgtgaagaacaggattcaaaacagccagagactccaaaatcctgggaaaacaatgttgagagtcaaaaacactctttaacatcacagtcacagatttctccaaagtcctggggagtagctacagcaagcctcataccaaatgaccagctgctgcccaggaagttgaacacagaacccaaagatgtgcctaagcctgtgcatcagcctgtaggttcttcctctacccttccgaaggatccagtattgaggaaagaaaaactgcaggatctgatgactcagattcaaggaacttgtaactttatgcaagagtctgttcttgactttgacaaaccttcaagtgcaattccaacgtcacaaccgccttcagctactccaggtagccccgtagcatctaaagaacaaaatctgtccagtcaaagtgattttcttcaagagccgttacaggctacttcttctccagttacttgtagctcaaatgcttgcttggttactaccgatcaggcttcttctggatctgaaacagagtttatgacctcagagactcctgaggcagcaattcccccaggcaagcaaccgtcttcactagcttctccaaatcctcccatggcaaagggctctgaacagggcttccagtcacctccagcaagtagtagttcagtaaccattaacacagcaccctttcaagccatgcagacagtatttaacgttaatgcacctctgcctccacgaaaagaacaagaaataaaagaa

SEQ ID NO: 114085 - DNA, 628 bp, Homo sapiens
  Payload ID: 2291
  Gene Symbol: CAPRIN2
  Gene Name: caprin family member 2
  ENST ID: ENST00000543380
  CDS Start-End: 424-628
cactgacattttgtacaggataattcttcgttgtaaagggctgtcctgtgcattttaagatgtttggcagcatccctggcctctaaccacaagataccggtagcactcttcacctcccttccccctcccaagttgtgataaccaaaaatatccctagatattgccaggtatctttgggggacaaaattgttccctgttgagaagctactgtgttggggacacatgatttagtagctcaaactggaggattataaggatcgcctgaaaagtggagagcatcttaatccagaccagttggaagctgtagagaaatatgaagaagtgctacataatttggaatttgccaaggagcttcaaaaaaccttttctgggttgagcctagatctactaaaagcgcaaaagaaggcccagagaagggagcacatgctaaaacttgaggctgagaagaaaaagcttcgaactatacttcaagttcagtatgtattgcagaacttgacacaggagcacgtacaaaaagacttcaaagggggtttgaatggtgcagtgtatttgccttcaaaagaacttgactacctcattaagttttcaaaactgacctgccctgaaagaaatgaaagtctgagtgttg

SEQ ID NO: 114086 - DNA, 569 bp, Homo sapiens
  Payload ID: 2291
  Gene Symbol: CAPRIN2
  Gene Name: caprin family member 2
  ENST ID: ENST00000540584
  CDS Start-End: 212-569
agacgcgagtgcggggtggcgccggtccacctccgcagcgctcctgcctcccccaggctttggaaggcgggcccgggctgcggcagcggcggcctcggctgcctggggaggtgaagtcgggctgcggcggcctcggtcggcgcggcggagggaggcggctgacccggcgaggtcaccttcaggccattcagaggaggaaagagaggggaatatgaagtcagccaagccccaagtgaaccacagtcagcatggggaaagccagcgggccttgagccccctgcagtctactctgagttctgctgcatctccttcccaagcgtatgagacctatattgaaaatggactcatatgccttaaacacaaaattagaaacatcgagaaaaagaagctcaaactggaggattataaggatcgcctgaaaagtggagagcatcttaatccagaccagttggaagctgtagagaaatatgaagaagtgctacataatttggaatttgccaaggagcttcaaaaaaccttttctgggttgagcctagatctactaaaagcgcaaaagaaggcccagagaa

SEQ ID NO: 114087 - DNA, 557 bp, Homo sapiens
  Payload ID: 2291
  Gene Symbol: CAPRIN2
  Gene Name: caprin family member 2
  ENST ID: ENST00000540436
  CDS Start-End: 178-557
gaggggagagggaggagacaggaggaggagacgcgagtgcggggtggcgccggtccacctccgcagcgctcctgcctcccccaggctttggaaggcgggcccgggctgcggcagcggcggcctcggctgcctggggagtcaccttcaggccattcagaggaggaaagagaggggaatatgaagtcagccaagccccaagtgaaccacagtcagcatggggaaagccagcgggccttgagccccctgcagtctactctgagttctgctgcatctccttcccaagcgtatgagacctatattgaaaatggactcatatgccttaaacacaaaattagaaacatcgagaaaaagaagctcaaactggaggattataaggatcgcctgaaaagtggagagcatcttaatccagaccagttggaagctgtagagaaatatgaagaagtgctacataatttggaatttgccaaggagcttcaaaaaaccttttctgggttgagcctagatctactaaaagcgcaaaagaaggcccagagaagggagcacatgctaaaacttga

SEQ ID NO: 114088 - DNA, 6543 bp, Homo sapiens
  Payload ID: 2291
  Gene Symbol: CAPRIN2
  Gene Name: caprin family member 2
  ENST ID: ENST00000537553
  CDS Start-End: 1-523
gtgtccctctagtcctaattttatacttaactttcccccacctccttcagcctcatctgtttcaatggtgcaactcttttcatccccttttggttaccagtcaccttcaggccattcagaggaggaaagagaggggaatatgaagtcagccaagccccaagtgaaccacagtcagcatggggaaagccagcgggccttgagccccctgcagtctactctgagttctgctgcatctccttcccaagcgtatgagacctatattgaaaatggactcatatgccttaaacacaaaattagaaacatcgagaaaaagaagctcaaactggaggattataaggatcgcctgaaaagtggagagcatcttaatccagaccagttggaagctgtagagaaatatgaagaagtgctacataatttggaatttgccaaggagcttcaaaaaaccttttctgggttgagcctagatgtgactactaaaagcgcaaaagaaggcccagagaagggagcacatgctaaaacttgaggctgagaagaaaaagcttcgaactatacttcaagttcagtatgtattgcagaacttgacacaggagcacgtacaaaaagacttcaaagggggtttgaatggtgcagtgtatttgccttcaaaagaacttgactacctcattaagttttcaaaactgacctgccctgaaagaaatgaaagtctgagacaaacacttgaaggatctactgtctaaattgctgaactcaggctattttgaaagtatcccagttcccaaaaatgccaaggaaaaggaagtaccactggaggaagaaatgctaatacaatcagagaaaaaaacacaattatcgaagactgaatctgtcaaagagtcagagtctctaatggaatttgcccagccagagatacaaccacaagagtttcttaacagacgctatatgacagaagtagattattcaaacaaacaaggcgaagagcaaccttgggaagcagattatgctagaaaaccaaatctcccaaaacgttgggatatgcttactgaaccagatggtcaagagaagaaacaggagtcctttaagtcctgggaggcttctggtaagcaccaggaggtatccaagcctgcagtttccttagaacagaggaaacaagacacctcaaaactcaggtctactctgccggaagagcagaagaagcaggagatctccaaatccaagccatctcctagccagtggaagcaagatacacctaaatccaaagcagggtatgttcaagaggaacaaaagaaacaggagacaccaaagctgtggccagttcagctgcagaaagaacaagatccaaagaagcaaactccaaagtcttggacaccttccatgcagagcgaacagaacaccaccaagtcatggaccactcccatgtgtgaagaacaggattcaaaacagccagagactccaaaatcctgggaaaacaatgttgagagtcaaaaacactctttaacatcacagtcacagatttctccaaagtcctggggagtagctacagcaagcctcataccaaatgaccagctgctgcccaggaagttgaacacagaacccaaagatgtgcctaagcctgtgcatcagcctgtaggttcttcctctacccttccgaaggatccagtattgaggaaagaaaaactgcaggatctgatgactcagattcaaggaacttgtaactttatgcaagagtctgttcttgactttgacaaaccttcaagtgcaattccaacgtcacaaccgccttcagctactccaggtagccccgtagcatctaaagaacaaaatctgtccagtcaaagtgattttcttcaagagccgttacaggctacttcttctccagttacttgtagctcaaatgcttgcttggttactaccgatcaggcttcttctggatctgaaacagagtttatgacctcagagactcctgaggtaaaagaccaattgtcttaatttcttttgtatcttaaagaatagcagaaccagtttatcttatgaattacaggcatgattagttgaatgatgtaacatttatactttattaatgtattgctttctatagatattgtgatcttggaacttttacaggtaactttattgtagctttgccatataaatagatttaatatggtattgccttatctagtgcaataaatgtccatttttaatctaaaaaaatgaaaagtgtaggtagcattaagtcaagttttccactatatttacactgaaggacttttaggagaaaagtctcttatttgtataaatgaaagctcaataactttattttattaatattagcacttattgagttggaatgagttacaatcttgttttggctaactttgtcaaaaatattttcggtcagatgcagtggctcacacctgcaatcccagcactttgggaggccgaggcaggtggatcacttgaggtcaggagttcaagaccagcctggccaacatggtgaagccccatctctactaaaaatacaaaaattagctgggtgtggtggctcatgcctctagtcccaggtactcaggaggccgaggacagagaattgcttgaacccaggaggcgggggttgcagagattgtgccactgcacttcagcctgggtgacaaagtgatacttcatctcaaaaaaaataaataaataaaaacattttaacagtattatgtttgtgctttcaatttcaattctaagttacagtttttactaagtttgagtaaatccttgagatggacatagtaggatgaattttgaggagtaatttagcaactatcaggtattttttgttaactgttatagaagaatatgtattcattatagaatataagaaaatatagataatccttagtttttatggtgctggcttgatctgaatttaaattatctcattcctcattttaagaagaggaagaagtgattgttaccaagtaactcacagctgtctgcttcacaatctagttgagattggtttttggtattttttttaagcctttggatttataatctgttatgtcaagaacttgtggcttccttaggtaaggattacttaaattggatcggagttgttttctgttttaggtagctgacttagaaacctactaactaataagtctttaaaatagagaaaaattaacactaaacaactaatccaagttttttcttaaatccaattctgatgtataaattttgaataatattaggttcttaactggaaattaccatttcagggtttgaaaaggactaggtgcgtataaaaagttcagcccctcatctgttagactgattattggtaagactctttcacttagtcagcaagctgtgcaaagcaaatactggtatgcatcctcagcaattgagatttgaaattgtaagcaaaagctattcttttgcattcctgtgtccaaatgtcatcctaaagaacttgctgacttatgccagtttgggttttagagtaagttaactgcttgttatatggcaggtgattggctgatgctgcatttctcctccccaggcagcaattcccccaggcaagcaaccgtcttcactagcttctccaaatcctcccatggcaaagggctctgaacagggcttccagtcacctccagcaagtagtagttcagtaaccattaacacagcaccctttcaagccatgcagacagtatttaacgttaatgcacctctgcctccacgaaaagaacaagaaataaaagaatccccttattcacctggctacaatcaaagttttaccacagcaagtacacaaacaccaccccagtgccaactgccatctatacatgtagaacaaactgtccattctcaagagactggtaagatctttgcatatgatatttggaagacttagagggacagccaattgaatggacagcaagtctaggaagtctgtagtgacactttagaagtattttcctgaccagtaagcattatttctttacatgttcctccagtgttgagaaaaacctaatgcccttttttgtgttaagtttacctattaattttaatttttgtagagatagaacttagatgacggatttaaccttgaagtaggtttgtatttttaaatctatttgctttgattaccacagacagtgattgaggtagatgggcactatctggctgcttatatgaaggttttgaaaccattctgttaatccttttaacaaatggttatctgtccttttctatcttataataaaagattgaagatatgacttagtatgctcattgtactgtttgcttagagatgggaggctattttgatttttcatgctgttctaaatcatgaaagaataggtaactttgtactcatttcttaatttaaatttaagaagcacttgtagattttttgtattggtatttcagatccctattgagttttttaactgaagtcggagcaaatgaattgagcattctgagtacttggctaatcaagtgatgaagaggtagtaatatgaattctgggacctaggcatagatgacctgattctgttctcccctctactgttgaaagacagggcaggtgacttacgtaagggatatttttgtcaggtgccttctcagatattaattagaatccattttcttttactccctcatctggagtatttagcctgctttttaaaaattgtcgtaaagtatacataacataaaaattaccattttaatcatttttaactatatagttctgtggcattaagtacaaccaaactgttgtgtaattattaccactgtccacctccagaacttttcatctccccccaactgaaactttgtaatcatttaatactaactcctcctcctcctctccccccagcccctggcaaccaccattctactttctgattctgaaaatgactgctctaggtacctcatataagtggtatacaatatttgtgcttttgaaactagcttattttacttggcatgtcttaagggttcattcatgttgtagcatgggtcaaaattttcttccttttttaggctgaataatattccattatatatatgaattacgtatttgagtcatgtagatgaattatatacatgaatatatgtatctcctatttatttttaaaggcagcaaattgtattaatgattttgatatatattggcttttaagtataaagactattaccatttaactcttggaccctaaaatcgtttttcttaagcagcaaattatcatcctgatggaactattcaagtaagcaatggtagccttgccttttacccagcacagacgaatgtgtttcccagacctactcagccatttgtcaatagccggggatctgttagaggatgtactcgtggtgggagattaataaccaattcctatcggtcccctggtggttataaaggttttgatacttatagaggactcccttcaatttccaatggaaattatagccagctgcagttccaagctagagagtattctggagcaccttattcccaaagggataatttccagcagtgttataagcgaggagggacatctggtggtccacgagcaaattcgagagctaactgcttcattatgagaaactcactgttgctaataaaacagcagggtggagtgattcttctcaggtgagcagcccagaaagagacaacgaaacctttaacagtggtgactctggacaaggagactcccgtagcatgacccctgtggatgtgccagtgacaaatccagcagccaccatactgccagtacacgtctaccctctgcctcagcagatgcgagttgccttctcagcagccagaacctctaatctggcccctggaactttagaccaacctattgtgtttgatcttcttctgaacaacttaggagaaacttttgatcttcagcttggtagatttaattgcccagtgaatggcacttacgttttcatttttcacatgctaaagctggcagtgaatgtgccactgtatgtcaacctcatgaagaatgaagaggtcttggtatcagcctatgccaatgatggtgctccagaccatgaaactgctagcaatcatgcaattcttcagctcttccagggagaccagatatggttacgtctgcacaggggagcaatttatggaagtagctggaaatattctacgttttcaggctatcttctttatcaagattgaaagtcagtacagtattgacaataaaaggatggtgttctaattagtgggattgaaggaaaagtagtctttgccctcatgactgattggtttaggaaaatgtttttgttcctagagggaggaggtccttacttttttgttttccttcctgaggtgaaaaatcaagctgaatgacaattagcactaatctggcactttataaattgtgatgtagcctcgctagtcaagctgtgaatgtatattgtttgcacttaatccttaactgtattaacgttcagcttactaaactgactgcctcaagtccaggcaagttacaatgccttgttgtgcctcaataaaaaagttacatgcac

SEQ ID NO: 114089 - DNA, 770 bp, Homo sapiens
  Payload ID: 2291
  Gene Symbol: CAPRIN2
  Gene Name: caprin family member 2
  ENST ID: ENST00000542550
  CDS Start-End: 213-770
agtgcggggtggcgccggtccacctccgcagcgctcctgcctcccccaggctttggaaggcgggcccgggctgcggcagcggcggcctcggctgcctggggaggtgaagtcgggctgcggcggcctcggtcggcgcggcggagggaggcggctgacccggcgagggtgggcagtcaccttcaggccattcagaggaggaaagagaggggaatatgaagtcagccaagccccaagtgaaccacagtcagcatggggaaagccagcgggccttgagccccctgcagtctactctgagttctgctgcatctccttcccaagcgtatgagacctatattgaaaatggactcatatgccttaaacacaaaattagaaacatcgagaaaaagaagctcaaactggaggattataaggatcgcctgaaaagtggagagcatcttaatccagaccagttggaagctgtagagaaatatgaagaagtgctacataatttggaatttgccaaggagcttcaaaaaaccttttctgggttgagcctagatctactaaaagcgcaaaagaaggcccagagaagggagcacatgctaaaacttgaggctgagaagaaaaagcttcgaactatacttcaagttcagtatgtattgcagaacttgacacaggagcacgtacaaaaagacttcaaagggggtttgaatggtgcagtgtatttgccttcaaaagaacttgactacctcattaagttttcaaaactgacctgccctgaaagaaatgaa

SEQ ID NO: 114090 - DNA, 630 bp, Homo sapiens
  Payload ID: 2291
  Gene Symbol: CAPRIN2
  Gene Name: caprin family member 2
  ENST ID: ENST00000541765
  CDS Start-End: 379-630
ggctgagtcggctgggtctctggcgccgcagaggccgcgggcgaggaccgggaggggagagggaggagacaggaggaggagacgcgagtgcggggtggcgccggtccacctccgcagcgctcctgcctcccccaggctttggaaggcgggcccgggctgcggcagcggcggcctcggctgcctggggagctcaaactggaggattataaggatcgcctgaaaagtggagagcatcttaatccagaccagttggaagctgtagagaaatatgaagaagtgctacataatttggaatttgccaaggagcttcaaaaaaccttttctgggttgagcctagatctactaaaagcgcaaaagaaggcccagagaagggagcacatgctaaaacttgaggctgagaagaaaaagcttcgaactatacttcaagttcagtatgtattgcagaacttgacacaggagcacgtacaaaaagacttcaaagggggtttgaatggtgcagtgtatttgccttcaaaagaacttgactacctcattaagttttcaaaactgacctgccctgaaagaaatgaaagtctgagtgttgaagaccagatggagcagtcatccttgtacttttgggaccttttggaa

SEQ ID NO: 114091 - DNA, 3221 bp, Homo sapiens
  Payload ID: 2291
  Gene Symbol: CAPRIN2
  Gene Name: caprin family member 2
  ENST ID: ENST00000548676
  CDS Start-End: 1-408
gaggattataaggatcgcctgaaaagtggagagcatcttaatccagaccagttggaagctgtagagaaatatgaagaagtgctacataatttggaatttgccaaggagcttcaaaaaaccttttctgggttgagcctagatctactaaaagcgcaaaagaaggcccagagaagggagcacatgctaaaacttgaggctgagaagaaaaagcttcgaactatacttcaagttcagtatgtattgcagaacttgacacaggagcacgtacaaaaagacttcaaagggggtttgaatggtgcagtgtatttgccttcaaaagaacttgactacctcattaagttttcaaaactgacctgccctgaaagaaatgaaagtctgagacaaacacttgaaggatctactgtctaaattgctgaactcaggctattttgaaagtatcccagttcccaaaaatgccaaggaaaaggaagtaccactggaggaagaaatgctaatacaatcagagaaaaaaacacaattatcgaagactgaatctgtcaaagagtcagagtctctaatggaatttgcccagccagagatacaaccacaagagtttcttaacagacgctatatgacagaagtagattattcaaacaaacaaggcgaagagcaaccttgggaagcagattatgctagaaaaccaaatctcccaaaacgttgggatatgcttactgaaccagatggtcaagagaagaaacaggagtcctttaagtcctgggaggcttctggtaagcaccaggaggtatccaagcctgcagtttccttagaacagaggaaacaagacacctcaaaactcaggtctactctgccggaagagcagaagaagcaggagatctccaaatccaagccatctcctagccagtggaagcaagatacacctaaatccaaagcagggtatgttcaagaggaacaaaagaaacaggagacaccaaagctgtggccagttcagctgcagaaagaacaagatccaaagaagcaaactccaaagtcttggacaccttccatgcagagcgaacagaacaccaccaagtcatggaccactcccatgtgtgaagaacaggattcaaaacagccagagactccaaaatcctgggaaaacaatgttgagagtcaaaaacactctttaacatcacagtcacagatttctccaaagtcctggggagtagctacagcaagcctcataccaaatgaccagctgctgcccaggaagttgaacacagaacccaaagatgtgcctaagcctgtgcatcagcctgtaggttcttcctctacccttccgaaggatccagtattgaggaaagaaaaactgcaggatctgatgactcagattcaaggaacttgtaactttatgcaagagtctgttcttgactttgacaaaccttcaagtgcaattccaacgtcacaaccgccttcagctactccaggtagccccgtagcatctaaagaacaaaatctgtccagtcaaagtgattttcttcaagagccgttacaggctacttcttctccagttacttgtagctcaaatgcttgcttggttactaccgatcaggcttcttctggatctgaaacagagtttatgacctcagagactcctgaggcagcaattcccccaggcaagcaaccgtcttcactagcttctccaaatcctcccatggcaaagggctctgaacagggcttccagtcacctccagcaagtagtagttcagtaaccattaacacagcaccctttcaagccatgcagacagtatttaacgttaatgcacctctgcctccacgaaaagaacaagaaataaaagaatccccttattcacctggctacaatcaaagttttaccacagcaagtacacaaacaccaccccagtgccaactgccatctatacatgtagaacaaactgtccattctcaagagactgcagcaaattatcatcctgatggaactattcaagtaagcaatggtagccttgccttttacccagcacagacgaatgtgtttcccagacctactcagccatttgtcaatagccggggatctgttagaggatgtactcgtggtgggagattaataaccaattcctatcggtcccctggtggttataaaggttttgatacttatagaggactcccttcaatttccaatggaaattatagccagctgcagttccaagctagagagtattctggagcaccttattcccaaagggataatttccagcagtgttataagcgaggagggacatctggtggtccacgagcaaattcgagagcagggtggagtgattcttctcaggtgagcagcccagaaagagacaacgaaacctttaacagtggtgactctggacaaggagactcccgtagcatgacccctgtggatgtgccagtgacaaatccagcagccaccatactgccagtacacgtctaccctctgcctcagcagatgcgagttgccttctcagcagccagaacctctaatctggcccctggaactttagaccaacctattgtgtttgatcttcttctgaacaacttaggagaaacttttgatcttcagcttggtagatttaattgcccagtgaatggcacttacgttttcatttttcacatgctaaagctggcagtgaatgtgccactgtatgtcaacctcatgaagaatgaagaggtcttggtatcagcctatgccaatgatggtgctccagaccatgaaactgctagcaatcatgcaattcttcagctcttccagggagaccagatatggttacgtctgcacaggggagcaatttatggaagtagctggaaatattctacgttttcaggctatcttctttatcaagattgaaagtcagtacagtattgacaataaaaggatggtgttctaattagtgggattgaaggaaaagtagtctttgccctcatgactgattggtttaggaaaatgtttttgttcctagagggaggaggtccttacttttttgttttccttcctgaggtgaaaaatcaagctgaatgacaattagcactaatctggcactttataaattgtgatgtagcctcgctagtcaagctgtgaatgtatattgtttgcacttaatccttaactgtattaacgttcagcttactaaactgactgcctcaagtccaggcaagttacaatgccttgttgtgcctcaataaaaaagttacatgca

SEQ ID NO: 114092 - DNA, 5821 bp, Homo sapiens
  Payload ID: 2292
  Gene Symbol: CPS1
  Gene Name: carbamoyl-phosphate synthase 1, mitochondrial
  Uniprot ID: P31327
  ENST ID: ENST00000233072
  CDS Start-End: 197-4699
ggggttaagagaaggaggagctgtggctgaagacatttaatggcagaatgaatggaaattcaaagatcgctgtgcagtcagccttaaacactgactgcacccctcccagatttcttttacattaactaaaaagtcttatcacacaatctcataaaatttatgtaatttcatttaattttagccacaaatcatcaaaatgacgaggattttgacagctttcaaagtggtgaggacactgaagactggttttggctttaccaatgtgactgcacaccaaaaatggaaattttcaagacctggcatcaggctcctttctgtcaaggcacagacagcacacattgtcctggaagatggaactaagatgaaaggttactcctttggccatccatcctctgttgctggtgaagtggtttttaatactggcctgggagggtacccagaagctattactgaccctgcctacaaaggacagattctcacaatggccaaccctattattgggaatggtggagctcctgatactactgctctggatgaactgggacttagcaaatatttggagtctaatggaatcaaggtttcaggtttgctggtgctggattatagtaaagactacaaccactggctggctaccaagagtttagggcaatggctacaggaagaaaaggttcctgcaatttatggagtggacacaagaatgctgactaaaataattcgggataagggtaccatgcttgggaagattgaatttgaaggtcagcctgtggattttgtggatccaaataaacagaatttgattgctgaggtttcaaccaaggatgtcaaagtgtacggcaaaggaaaccccacaaaagtggtagctgtagactgtgggattaaaaacaatgtaatccgcctgctagtaaagcgaggagctgaagtgcacttagttccctggaaccatgatttcaccaagatggagtatgatgggattttgatcgcgggaggaccggggaacccagctcttgcagaaccactaattcagaatgtcagaaagattttggagagtgatcgcaaggagccattgtttggaatcagtacaggaaacttaataacaggattggctgctggtgccaaaacctacaagatgtccatggccaacagagggcagaatcagcctgttttgaatatcacaaacaaacaggctttcattactgctcagaatcatggctatgccttggacaacaccctccctgctggctggaaaccactttttgtgaatgtcaacgatcaaacaaatgaggggattatgcatgagagcaaacccttcttcgctgtgcagttccacccagaggtcaccccggggccaatagacactgagtacctgtttgattcctttttctcactgataaagaaaggaaaagctaccaccattacatcagtcttaccgaagccagcactagttgcatctcgggttgaggtttccaaagtccttattctaggatcaggaggtctgtccattggtcaggctggagaatttgattactcaggatctcaagctgtaaaagccatgaaggaagaaaatgtcaaaactgttctgatgaacccaaacattgcatcagtccagaccaatgaggtgggcttaaagcaagcggatactgtctactttcttcccatcacccctcagtttgtcacagaggtcatcaaggcagaacagccagatgggttaattctgggcatgggtggccagacagctctgaactgtggagtggaactattcaagagaggtgtgctcaaggaatatggtgtgaaagtcctgggaacttcagttgagtccattatggctacggaagacaggcagctgttttcagataaactaaatgagatcaatgaaaagattgctccaagttttgcagtggaatcgattgaggatgcactgaaggcagcagacaccattggctacccagtgatgatccgttccgcctatgcactgggtgggttaggctcaggcatctgtcccaacagagagactttgatggacctcagcacaaaggcctttgctatgaccaaccaaattctggtggagaagtcagtgacaggttggaaagaaatagaatatgaagtggttcgagatgctgatgacaattgtgtcactgtctgtaacatggaaaatgttgatgccatgggtgttcacacaggtgactcagttgttgtggctcctgcccagacactctccaatgccgagtttcagatgttgagacgtacttcaatcaatgttgttcgccacttgggcattgtgggtgaatgcaacattcagtttgcccttcatcctacctcaatggaatactgcatcattgaagtgaatgccagactgtcccgaagctctgctctggcctcaaaagccactggctacccattggcattcattgctgcaaagattgccctaggaatcccacttccagaaattaagaacgtcgtatccgggaagacatcagcctgttttgaacctagcctggattacatggtcaccaagattccccgctgggatcttgaccgttttcatggaacatctagccgaattggtagctctatgaaaagtgtaggagaggtcatggctattggtcgtacctttgaggagagtttccagaaagctttacggatgtgccacccatctatagaaggtttcactccccgtctcccaatgaacaaagaatggccatctaatttagatcttagaaaagagttgtctgaaccaagcagcacgcgtatctatgccattgccaaggccattgatgacaacatgtcccttgatgagattgagaagctcacatacattgacaagtggtttttgtataagatgcgtgatattttaaacatggaaaagacactgaaaggcctcaacagtgagtccatgacagaagaaaccctgaaaagggcaaaggagattgggttctcagataagcagatttcaaaatgccttgggctcactgaggcccagacaagggagctgaggttaaagaaaaacatccacccttgggttaaacagattgatacactggctgcagaatacccatcagtaacaaactatctctatgttacctacaatggtcaggagcatgatgtcaattttgatgaccatggaatgatggtgctaggctgtggtccatatcacattggcagcagtgtggaatttgattggtgtgctgtctctagtatccgcacactgcgtcaacttggcaagaagacggtggtggtgaattgcaatcctgagactgtgagcacagactttgatgagtgtgacaaactgtactttgaagagttgtccttggagagaatcctagacatctaccatcaggaggcatgtggtggctgcatcatatcagttggaggccagattccaaacaacctggcagttcctctatacaagaatggtgtcaagatcatgggcacaagccccctgcagatcgacagggctgaggatcgctccatcttctcagctgtcttggatgagctgaaggtggctcaggcaccttggaaagctgttaatactttgaatgaagcactggaatttgcaaagtctgtggactacccctgcttgttgaggccttcctatgttttgagtgggtctgctatgaatgtggtattctctgaggatgagatgaaaaaattcctagaagaggcgactagagtttctcaggagcacccagtggtgctgacaaaatttgttgaaggggcccgagaagtagaaatggacgctgttggcaaagatggaagggttatctctcatgccatctctgaacatgttgaagatgcaggtgtccactcgggagatgccactctgatgctgcccacacaaaccatcagccaaggggccattgaaaaggtgaaggatgctacccggaagattgcaaaggcttttgccatctctggtccattcaacgtccaatttcttgtcaaaggaaatgatgtcttggtgattgagtgtaacttgagagcttctcgatccttcccctttgtttccaagactcttggggttgacttcattgatgtggccaccaaggtgatgattggagagaatgttgatgagaaacatcttccaacattggaccatcccataattcctgctgactatgttgcaattaaggctcccatgttttcctggccccggttgagggatgctgaccccattctgagatgtgagatggcttccactggagaggtggcttgctttggtgaaggtattcatacagccttcctaaaggcaatgctttccacaggatttaagataccccagaaaggcatcctgataggcatccagcaatcattccggccaagattccttggtgtggctgaacaattacacaatgaaggtttcaagctgtttgccacggaagccacatcagactggctcaacgccaacaatgtccctgccaccccagtggcatggccgtctcaagaaggacagaatcccagcctctcttccatcagaaaattgattagagatggcagcattgacctagtgattaaccttcccaacaacaacactaaatttgtccatgataattatgtgattcggaggacagctgttgatagtggaatccctctcctcactaattttcaggtgaccaaactttttgctgaagctgtgcagaaatctcgcaaggtggactccaagagtcttttccactacaggcagtacagtgctggaaaagcagcatagagatgcagacaccccagccccattattaaatcaacctgagccacatgttatctaaaggaactgattcacaactttctcagagatgaatattgataactaaacttcatttcagtttactttgttatgccttaatattctgtgtcttttgcaattaaattgtcagtcacttcttcaaaaccttacagtccttcctaagttactcttcatgagatttcatccatttactaatactgtatttttggtggactaggcttgcctatgtgcttatgtgtagctttttactttttatggtgctgattaatggtgatcaaggtaggaaaagttgctgttctattttctgaactctttctatactttaagatactctatttttaaaacactatctgcaaactcaggacactttaacagggcagaatactctaaaaacttgataaaattaaatatagatttaatttatgaaccttccatcatgatgtttgtgtattgcttctttttggatcctcattctcacccatttggctaatccaggaatattgttatcccttcccattatattgaagttgagaaatgtgacagaggcatttagagtatggacttttcttttctttttctttttctttttttctttttgagatggagtcacactctccaggctggagtgcagtggcacaatctcggctcactgcaatttccgtctcccaagttcaagcgattctcctgctttagactatggatttctttaaggaatactggtttgcagttttgttttctggactatatcagcagatggtagacagtgtttatgtagatgtgttgttgtttttatcattggattttaacttggcccgagtgaaataatcagatttttgtcattcacactctcccccagttttggaataacttggaagtaaggttcattcccttaagacgatggattctgttgaactatggggtcccacactgcactattaattccacccactgtaagggcaaggacaccattccttctacatataagaaaaaagtctctccccaagggcagcctttgttacttttaaatattttctgttattacaagtgctctaattgtgaacttttaaataaaatactattaagaggtaa

SEQ ID NO: 114093 - DNA, 699 bp, Homo sapiens
  Payload ID: 2292
  Gene Symbol: CPS1
  Gene Name: carbamoyl-phosphate synthase 1, mitochondrial
  ENST ID: ENST00000417946
  CDS Start-End: 335-699
gctcttttaaaatagttgctttcttaggaaatgtagttgctttcttaacctcatcaaattcatgaagatttagccgaggcccatgctacccattatcttctaaatggccttcagaaatgatggagaaactgacacgttatgagtatttcctgccctacatggattttgaacttgaattcccagcctcgcttgcatctagacacaggcacgtgacccaagccccaccagtcagacaaacccaattgaaactttagttcaaaagcatccagtatgagggagcagtgaagtttgcattttcctgatgaaaatgttggaagagccacaaatcatcaaaatgacgaggattttgacagctttcaaagtggtgaggacactgaagactggttttggctttaccaatgtgactgcacaccaaaaatggaaattttcaagacctggcatcaggctcctttctgtcaaggcacagacagcacacattgtcctggaagatggaactaagatgaaaggttactcctttggccatccatcctctgttgctggtgaagtggtttttaatactggcctgggagggtacccagaagctattactgaccctgcctacaaaggacagattctcacaatggccaaccctattattgggaatggtggagctcctgatactactgctctggatgaactgggacttagcaaatatttgga

SEQ ID NO: 114094 - DNA, 5698 bp, Homo sapiens
  Payload ID: 2292
  Gene Symbol: CPS1
  Gene Name: carbamoyl-phosphate synthase 1, mitochondrial
  Uniprot ID: P31327
  ENST ID: ENST00000430249
  CDS Start-End: 56-4576
gaaatgtagttgctttcttaacctcatcaaattcatgaagatttagccgaggcccatgccacaaatcatcaaaatgacgaggattttgacagctttcaaagtggtgaggacactgaagactggttttggctttaccaatgtgactgcacaccaaaaatggaaattttcaagacctggcatcaggctcctttctgtcaaggcacagacagcacacattgtcctggaagatggaactaagatgaaaggttactcctttggccatccatcctctgttgctggtgaagtggtttttaatactggcctgggagggtacccagaagctattactgaccctgcctacaaaggacagattctcacaatggccaaccctattattgggaatggtggagctcctgatactactgctctggatgaactgggacttagcaaatatttggagtctaatggaatcaaggtttcaggtttgctggtgctggattatagtaaagactacaaccactggctggctaccaagagtttagggcaatggctacaggaagaaaaggttcctgcaatttatggagtggacacaagaatgctgactaaaataattcgggataagggtaccatgcttgggaagattgaatttgaaggtcagcctgtggattttgtggatccaaataaacagaatttgattgctgaggtttcaaccaaggatgtcaaagtgtacggcaaaggaaaccccacaaaagtggtagctgtagactgtgggattaaaaacaatgtaatccgcctgctagtaaagcgaggagctgaagtgcacttagttccctggaaccatgatttcaccaagatggagtatgatgggattttgatcgcgggaggaccggggaacccagctcttgcagaaccactaattcagaatgtcagaaagattttggagagtgatcgcaaggagccattgtttggaatcagtacaggaaacttaataacaggattggctgctggtgccaaaacctacaagatgtccatggccaacagagggcagaatcagcctgttttgaatatcacaaacaaacaggctttcattactgctcagaatcatggctatgccttggacaacaccctccctgctggctggaaaccactttttgtgaatgtcaacgatcaaacaaatgaggggattatgcatgagagcaaacccttcttcgctgtgcagttccacccagaggtcaccccggggccaatagacactgagtacctgtttgattcctttttctcactgataaagaaaggaaaagctaccaccattacatcagtcttaccgaagccagcactagttgcatctcgggttgaggtttccaaagtccttattctaggatcaggaggtctgtccattggtcaggctggagaatttgattactcaggatctcaagctgtaaaagccatgaaggaagaaaatgtcaaaactgttctgatgaacccaaacattgcatcagtccagaccaatgaggtgggcttaaagcaagcggatactgtctactttcttcccatcacccctcagtttgtcacagaggtcatcaaggcagaacagccagatgggttaattctgggcatgggtggccagacagctctgaactgtggagtggaactattcaagagaggtgtgctcaaggaatatggtgtgaaagtcctgggaacttcagttgagtccattatggctacggaagacaggcagctgttttcagataaactaaatgagatcaatgaaaagattgctccaagttttgcagtggaatcgattgaggatgcactgaaggcagcagacaccattggctacccagtgatgatccgttccgcctatgcactgggtgggttaggctcaggcatctgtcccaacagagagactttgatggacctcagcacaaaggcctttgctatgaccaaccaaattctggtggagaagtcagtgacaggttggaaagaaatagaatatgaagtggttcgagatgctgatgacaattgtgtcactgtctgtaacatggaaaatgttgatgccatgggtgttcacacaggtgactcagttgttgtggctcctgcccagacactctccaatgccgagtttcagatgttgagacgtacttcaatcaatgttgttcgccacttgggcattgtgggtgaatgcaacattcagtttgcccttcatcctacctcaatggaatactgcatcattgaagtgaatgccagactgtcccgaagctctgctctggcctcaaaagccactggctacccattggcattcattgctgcaaagattgccctaggaatcccacttccagaaattaagaacgtcgtatccgggaagacatcagcctgttttgaacctagcctggattacatggtcaccaagattccccgctgggatcttgaccgttttcatggaacatctagccgaattggtagctctatgaaaagtgtaggagaggtcatggctattggtcgtacctttgaggagagtttccagaaagctttacggatgtgccacccatctatagaaggtttcactccccgtctcccaatgaacaaagaatggccatctaatttagatcttagaaaagagttgtctgaaccaagcagcacgcgtatctatgccattgccaaggccattgatgacaacatgtcccttgatgagattgagaagctcacatacattgacaagtggtttttgtataagatgcgtgatattttaaacatggaaaagacactgaaaggcctcaacagtgagtccatgacagaagaaaccctgaaaagggcaaaggagattgggttctcagataagcagatttcaaaatgccttgggctcactgaggcccagacaagggagctgaggttaaagaaaaacatccacccttgggttaaacagattgatacactggctgcagaatacccatcagtaacaaactatctctatgttacctacaatggtcaggagcatgatgtcaattttgatgaccatggaatgatggtgctaggctgtggtccatatcacattggcagcagtgtggaatttgattggtgtgctgtctctagtatccgcacactgcgtcaacttggcaagaagacggtggtggtgaattgcaatcctgagactgtgagcacagactttgatgagtgtgacaaactgtactttgaagagttgtccttggagagaatcctagacatctaccatcaggaggcatgtggtggctgcatcatatcagttggaggccagattccaaacaacctggcagttcctctatacaagaatggtgtcaagatcatgggcacaagccccctgcagatcgacagggctgaggatcgctccatcttctcagctgtcttggatgagctgaaggtggctcaggcaccttggaaagctgttaatactttgaatgaagcactggaatttgcaaagtctgtggactacccctgcttgttgaggccttcctatgttttgagtgggtctgctatgaatgtggtattctctgaggatgagatgaaaaaattcctagaagaggcgactagagtttctcaggagcacccagtggtgctgacaaaatttgttgaaggggcccgagaagtagaaatggacgctgttggcaaagatggaagggttatctctcatgccatctctgaacatgttgaagatgcaggtgtccactcgggagatgccactctgatgctgcccacacaaaccatcagccaaggggccattgaaaaggtgaaggatgctacccggaagattgcaaaggcttttgccatctctggtccattcaacgtccaatttcttgtcaaaggaaatgatgtcttggtgattgagtgtaacttgagagcttctcgatccttcccctttgtttccaagactcttggggttgacttcattgatgtggccaccaaggtgatgattggagagaatgttgatgagaaacatcttccaacattggaccatcccataattcctgctgactatgttgcaattaaggctcccatgttttcctggccccggttgagggatgctgaccccattctgagatgtgagatggcttccactggagaggtggcttgctttggtgaaggtattcatacagccttcctaaaggcaatgctttccacaggatttaagataccccagaaaggcatcctgataggcatccagcaatcattccggccaagattccttggtgtggctgaacaattacacaatgaaggtttcaagctgtttgccacggaagccacatcagactggctcaacgccaacaatgtccctgccaccccagtggcatggccgtctcaagaaggacagaatcccagcctctcttccatcagaaaattgattagagatggcagcattgacctagtgattaaccttcccaacaacaacactaaatttgtccatgataattatgtgattcggaggacagctgttgatagtggaatccctctcctcactaattttcaggtgaccaaactttttgctgaagctgtgcagaaatctcgcaaggtggactccaagagtcttttccactacaggcagtacagtgctggaaaagcagcatagagatgcagacaccccagccccattattaaatcaacctgagccacatgttatctaaaggaactgattcacaactttctcagagatgaatattgataactaaacttcatttcagtttactttgttatgccttaatattctgtgtcttttgcaattaaattgtcagtcacttcttcaaaaccttacagtccttcctaagttactcttcatgagatttcatccatttactaatactgtatttttggtggactaggcttgcctatgtgcttatgtgtagctttttactttttatggtgctgattaatggtgatcaaggtaggaaaagttgctgttctattttctgaactctttctatactttaagatactctatttttaaaacactatctgcaaactcaggacactttaacagggcagaatactctaaaaacttgataaaattaaatatagatttaatttatgaaccttccatcatgatgtttgtgtattgcttctttttggatcctcattctcacccatttggctaatccaggaatattgttatcccttcccattatattgaagttgagaaatgtgacagaggcatttagagtatggacttttcttttctttttctttttctttttttctttttgagatggagtcacactctccaggctggagtgcagtggcacaatctcggctcactgcaatttccgtctcccaagttcaagcgattctcctgctttagactatggatttctttaaggaatactggtttgcagttttgttttctggactatatcagcagatggtagacagtgtttatgtagatgtgttgttgtttttatcattggattttaacttggcccgagtgaaataatcagatttttgtcattcacactctcccccagttttggaataacttggaagtaaggttcattcccttaagacgatggattctgttgaactatggggtcccacactgcactattaattccacccactgtaagggcaaggacaccattccttctacatataagaaaaaagtctctccccaagggcagcctttgttacttttaaatattttctgttattacaagtgctctaattgtgaacttttaaataaaatactattaagaggtaa

SEQ ID NO: 114095 - DNA, 4770 bp, Homo sapiens
  Payload ID: 2292
  Gene Symbol: CPS1
  Gene Name: carbamoyl-phosphate synthase 1, mitochondrial
  Uniprot ID: P31327
  ENST ID: ENST00000451903
  CDS Start-End: 499-3648
gagaataaacagcagcaggagaaggaggggaagggtgttggaggggagagagggcatgcatgcacatacatagatgattcagacggcttcagaaaagaaccacaaggaatgcttagaggagttttgtatttaatctaaatatttttacttttttgtgtgtgagctcttagttcattgttcaaacccatctttccaaataaattcttctggtgatatccagaaaaatctgaagtctattgtgacttccccacacccaggggcctccagtagcaaatcttcattgtcagaactctcagaaaagacttcgagtacctgtttgattcctttttctcactgataaagaaaggaaaagctaccaccattacatcagtcttaccgaagccagcactagttgcatctcgggttgaggtttccaaagtccttattctaggatcaggaggtctgtccattggtcaggctggagaatttgattactcaggatctcaagctgtaaaagccatgaaggaagaaaatgtcaaaactgttctgatgaacccaaacattgcatcagtccagaccaatgaggtgggcttaaagcaagcggatactgtctactttcttcccatcacccctcagtttgtcacagaggtcatcaaggcagaacagccagatgggttaattctgggcatgggtggccagacagctctgaactgtggagtggaactattcaagagaggtgtgctcaaggaatatggtgtgaaagtcctgggaacttcagttgagtccattatggctacggaagacaggcagctgttttcagataaactaaatgagatcaatgaaaagattgctccaagttttgcagtggaatcgattgaggatgcactgaaggcagcagacaccattggctacccagtgatgatccgttccgcctatgcactgggtgggttaggctcaggcatctgtcccaacagagagactttgatggacctcagcacaaaggcctttgctatgaccaaccaaattctggtggagaagtcagtgacaggttggaaagaaatagaatatgaagtggttcgagatgctgatgacaattgtgtcactgtctgtaacatggaaaatgttgatgccatgggtgttcacacaggtgactcagttgttgtggctcctgcccagacactctccaatgccgagtttcagatgttgagacgtacttcaatcaatgttgttcgccacttgggcattgtgggtgaatgcaacattcagtttgcccttcatcctacctcaatggaatactgcatcattgaagtgaatgccagactgtcccgaagctctgctctggcctcaaaagccactggctacccattggcattcattgctgcaaagattgccctaggaatcccacttccagaaattaagaacgtcgtatccgggaagacatcagcctgttttgaacctagcctggattacatggtcaccaagattccccgctgggatcttgaccgttttcatggaacatctagccgaattggtagctctatgaaaagtgtaggagaggtcatggctattggtcgtacctttgaggagagtttccagaaagctttacggatgtgccacccatctatagaaggtttcactccccgtctcccaatgaacaaagaatggccatctaatttagatcttagaaaagagttgtctgaaccaagcagcacgcgtatctatgccattgccaaggccattgatgacaacatgtcccttgatgagattgagaagctcacatacattgacaagtggtttttgtataagatgcgtgatattttaaacatggaaaagacactgaaaggcctcaacagtgagtccatgacagaagaaaccctgaaaagggcaaaggagattgggttctcagataagcagatttcaaaatgccttgggctcactgaggcccagacaagggagctgaggttaaagaaaaacatccacccttgggttaaacagattgatacactggctgcagaatacccatcagtaacaaactatctctatgttacctacaatggtcaggagcatgatgtcaattttgatgaccatggaatgatggtgctaggctgtggtccatatcacattggcagcagtgtggaatttgattggtgtgctgtctctagtatccgcacactgcgtcaacttggcaagaagacggtggtggtgaattgcaatcctgagactgtgagcacagactttgatgagtgtgacaaactgtactttgaagagttgtccttggagagaatcctagacatctaccatcaggaggcatgtggtggctgcatcatatcagttggaggccagattccaaacaacctggcagttcctctatacaagaatggtgtcaagatcatgggcacaagccccctgcagatcgacagggctgaggatcgctccatcttctcagctgtcttggatgagctgaaggtggctcaggcaccttggaaagctgttaatactttgaatgaagcactggaatttgcaaagtctgtggactacccctgcttgttgaggccttcctatgttttgagtgggtctgctatgaatgtggtattctctgaggatgagatgaaaaaattcctagaagaggcgactagagtttctcaggagcacccagtggtgctgacaaaatttgttgaaggggcccgagaagtagaaatggacgctgttggcaaagatggaagggttatctctcatgccatctctgaacatgttgaagatgcaggtgtccactcgggagatgccactctgatgctgcccacacaaaccatcagccaaggggccattgaaaaggtgaaggatgctacccggaagattgcaaaggcttttgccatctctggtccattcaacgtccaatttcttgtcaaaggaaatgatgtcttggtgattgagtgtaacttgagagcttctcgatccttcccctttgtttccaagactcttggggttgacttcattgatgtggccaccaaggtgatgattggagagaatgttgatgagaaacatcttccaacattggaccatcccataattcctgctgactatgttgcaattaaggctcccatgttttcctggccccggttgagggatgctgaccccattctgagatgtgagatggcttccactggagaggtggcttgctttggtgaaggtattcatacagccttcctaaaggcaatgctttccacaggatttaagataccccagaaaggcatcctgataggcatccagcaatcattccggccaagattccttggtgtggctgaacaattacacaatgaaggtttcaagctgtttgccacggaagccacatcagactggctcaacgccaacaatgtccctgccaccccagtggcatggccgtctcaagaaggacagaatcccagcctctcttccatcagaaaattgattagagatggcagcattgacctagtgattaaccttcccaacaacaacactaaatttgtccatgataattatgtgattcggaggacagctgttgatagtggaatccctctcctcactaattttcaggtgaccaaactttttgctgaagctgtgcagaaatctcgcaaggtggactccaagagtcttttccactacaggcagtacagtgctggaaaagcagcatagagatgcagacaccccagccccattattaaatcaacctgagccacatgttatctaaaggaactgattcacaactttctcagagatgaatattgataactaaacttcatttcagtttactttgttatgccttaatattctgtgtcttttgcaattaaattgtcagtcacttcttcaaaaccttacagtccttcctaagttactcttcatgagatttcatccatttactaatactgtatttttggtggactaggcttgcctatgtgcttatgtgtagctttttactttttatggtgctgattaatggtgatcaaggtaggaaaagttgctgttctattttctgaactctttctatactttaagatactctatttttaaaacactatctgcaaactcaggacactttaacagggcagaatactctaaaaacttgataaaattaaatatagatttaatttatgaaccttccatcatgatgtttgtgtattgcttctttttggatcctcattctcacccatttggctaatccaggaatattgttatcccttcccattatattgaagttgagaaatgtgacagaggcatttagagtatggacttttcttttctttttctttttctttttttctttttgagatggagtcacactctccaggctggagtgcagtggcacaatctcggctcactgcaatttccgtctcccaagttcaagcgattctcctgctttagactatggatttctttaaggaatactggtttgcagttttgttttctggactatatcagcagatggtagacagtgtttatgtagatgtgttgttgtttttatcattggattttaacttggcccgagtgaaataatcagatttttgtcattcacactctcccccagttttggaataacttggaagtaaggttcattcccttaagacgatggattctgttgaactatggggtcccacactgcactattaattccacccactgtaagggcaaggacaccattccttctacatataagaaaaaagtctctccccaagggcagcctttgttacttttaaatattttctgttattacaagtgctctaattgtgaacttttaaataaaatactattaagaggtaa

SEQ ID NO: 114096 - DNA, 546 bp, Homo sapiens
  Payload ID: 2292
  Gene Symbol: CPS1
  Gene Name: carbamoyl-phosphate synthase 1, mitochondrial
  ENST ID: ENST00000523702
  CDS Start-End: 75-546
aaaatagttgctttcttaggaaatgtagttgctttcttaacctcatcaaattcatgaagatttagccgaggcccatgccacaaatcatcaaaatgacgaggattttgacagctttcaaagtggtgaggacactgaagactggttttggctttaccaatgtgactgcacaccaaaaatggaaattttcaagacctggcatcaggctcctttctgtcaaggcacagacagcacacattgtcctggaagatggaactaagatgaaaggttactcctttggccatccatcctctgttgctggtgaagtggtttttaatactggcctgggagggtacccagaagctattactgaccctgcctacaaaggacagattctcacaatggccaaccctattattgggaatggtggagctcctgatactactgctctggatgaactgggacttagcaaatatttggagtctaatggaatcaaggtttcaggtttgctggtgctggattatagtaaagactacaaccactggctggctaccaagagtttagggcaat

SEQ ID NO: 114097 - DNA, 585 bp, Homo sapiens
  Payload ID: 2292
  Gene Symbol: CPS1
  Gene Name: carbamoyl-phosphate synthase 1, mitochondrial
  ENST ID: ENST00000518043
  CDS Start-End: 221-585
gctcttttaaaatagttgctttcttaggaaatgtagttgctttcttaacctcatcaaattcatgaagatttagccgaggcccatgctacccattatcttctaaatggccttcagaaatgatggagaaactgacacgttatgagtatttcctgccctacatggattttgaacttgaattcccagcctcgcttgcatctagacacagccacaaatcatcaaaatgacgaggattttgacagctttcaaagtggtgaggacactgaagactggttttggctttaccaatgtgactgcacaccaaaaatggaaattttcaagacctggcatcaggctcctttctgtcaaggcacagacagcacacattgtcctggaagatggaactaagatgaaaggttactcctttggccatccatcctctgttgctggtgaagtggtttttaatactggcctgggagggtacccagaagctattactgaccctgcctacaaaggacagattctcacaatggccaaccctattattgggaatggtggagctcctgatactactgctctggatgaactgggacttagcaaatatttgga

SEQ ID NO: 114098 - DNA, 1542 bp, Homo sapiens
  Payload ID: 2292
  Gene Symbol: CPS1
  Gene Name: carbamoyl-phosphate synthase 1, mitochondrial
  ENST ID: ENST00000619804
  CDS Start-End: 1-1542
atgacgaggattttgacagctttcaaagtggtgaggacactgaagactggttttggctttaccaatgtgactgcacaccaaaaatggaaattttcaagacctggcatcaggctcctttctgtcaaggcacagacagcacacattgtcctggaagatggaactaagatgaaaggttactcctttggccatccatcctctgttgctggtgaagtggtttttaatactggcctgggagggtacccagaagctattactgaccctgcctacaaaggacagattctcacaatggccaaccctattattgggaatggtggagctcctgatactactgctctggatgaactgggacttagcaaatatttggagtctaatggaatcaaggtttcaggtttgctggtgctggattatagtaaagactacaaccactggctggctaccaagagtttagggcaatggctacaggaagaaaaggttcctgcaatttatggagtggacacaagaatgctgactaaaataattcgggataagggtaccatgcttgggaagattgaatttgaaggtcagcctgtggattttgtggatccaaataaacagaatttgattgctgaggtttcaaccaaggatgtcaaagtgtacggcaaaggaaaccccacaaaagtggtagctgtagactgtgggattaaaaacaatgtaatccgcctgctagtaaagcgaggagctgaagtgcacttagttccctggaaccatgatttcaccaagatggagtatgatgggattttgatcgcgggaggaccggggaacccagctcttgcagaaccactaattcagaatgtcagaaagattttggagagtgatcgcaaggagccattgtttggaatcagtacaggaaacttaataacaggattggctgctggtgccaaaacctacaagatgtccatggccaacagagggcagaatcagcctgttttgaatatcacaaacaaacaggctttcattactgctcagaatcatggctatgccttggacaacaccctccctgctggctggaaaccactttttgtgaatgtcaacgatcaaacaaatgaggggattatgcatgagagcaaacccttcttcgctgtgcagttccacccagaggtcaccccggggccaatagacactgagtacctgtttgattcctttttctcactgataaagaaaggaaaagctaccaccattacatcagtcttaccgaagccagcactagttgcatctcgggttgaggtttccaaagtccttattctaggatcaggaggtctgtccattggtcaggctggagaatttgattactcaggatctcaagctgtaaaagccatgaaggaagaaaatgtcaaaactgttctgatgaacccaaacattgcatcagtccagaccaatgaggtgggcttaaagcaagcggatactgtctactttcttcccatcacccctcagtttgtcacagaggtcatcaaggcagaacagccagatgggttaattctgggcatgggtgccagacagctctga

SEQ ID NO: 114099 - DNA, 7265 bp, Homo sapiens
  Payload ID: 2293
  Gene Symbol: CAD
  Gene Name: carbamoyl-phosphate synthetase 2, aspartate transcarbamylase, and dihydroorotase
  Uniprot ID: P27708
  ENST ID: ENST00000264705
  CDS Start-End: 163-6840
gcgcgcccgaggctcctacgctgccgcgcccggcttctctccagcgccccgcgccgttagccacgtggaccgactccggcgcgccgtcctcacgtggttccagtggagtttgcagtccttcccgcttctccgtactcgcccccgcctctgagctcccttcccatggcggccctagtgttggaggacgggtcggtcctgcggggccagccctttggggccgccgtgtcgactgccggggaagtggtgtttcaaaccggcatggtcggctaccccgaggccctcactgatccctcctacaaggcacagatcttagtgctcacctatcctctgatcggcaactatggcatccccccagatgaaatggatgagttcggtctctgcaagtggtttgaatcctcgggcatccacgtagcagcactggtagtgggagagtgctgtcctactcccagccactggagtgccacccgcaccctgcatgagtggctgcagcagcatggcatccctggcttgcaaggagtagacactcgggagctgaccaagaagttgcgggaacaggggtctctgctggggaagctggtccagaatggaacagaaccttcatccctgccattcttggaccccaatgcccgccccctggtaccagaggtctccattaagactccacgggtattcaatacagggggtgcccctcggatccttgctttggactgtggcctcaagtataatcagatccgatgcctctgccagcgtggggctgaggtcactgtggtaccctgggaccatgcactagacagccaagagtatgagggtctcttcttaagtaatgggcctggtgaccctgcctcctatcccagtgtcgtatccacactgagccgtgttttatctgagcctaatccccgacctgtctttgggatctgcctgggacaccagctattggccttagccattggggccaagacttacaagatgagatatgggaaccgaggccataaccagccctgcttgttggtgggctctgggcgctgctttctgacatcccagaaccatgggtttgctgtggagacagactcactgccagcagactgggctcctctcttcaccaacgccaatgatggttccaatgaaggcattgtgcacaacagcttgcctttcttcagtgtccagtttcacccagagcaccaagctggcccttcagatatggaactgcttttcgatatctttctggaaactgtgaaagaggccacagctgggaaccctgggggccagacagttagagagcggctgactgagcgcctctgtccccctgggattcccactcccggctctggacttccaccaccacgaaaggttctgatcctgggctcagggggcctctccattggccaagctggagaatttgactactcgggctctcaggcaattaaggccctgaaggaggaaaacatccagacgttgctgatcaaccccaatattgccacagtgcagacctcccaggggctggccgacaaggtctattttcttcccataacacctcattatgtaacccaggtgatacgtaatgaacgccccgatggtgtgttactgacttttgggggccagactgctctgaactgtggtgtggagctgaccaaggccggggtgctggctcggtatggggtccgggtcctgggcacaccagtggagaccattgagctgaccgaggatcgacgggcctttgctgccagaatggcagagatcggagagcatgtggccccgagcgaggcagcaaattctcttgaacaggcccaggcagccgctgaacggctggggtaccctgtgctagtgcgtgcagcctttgccctgggtggcctgggctctggctttgcctctaacagggaggagctctctgctctcgtggccccagcttttgcccataccagccaagtgctagtagacaagtctctgaagggatggaaggagattgagtacgaggtggtgagagacgcctatggcaactgtgtcacggtgtgtaacatggagaacttggacccactgggcatccacactggtgagtccatagtggtggcccctagccagacactgaatgacagggagtatcagctcctgaggcagacagctatcaaggtgacccagcacctgggaattgttggggagtgcaatgtgcagtatgccttgaaccctgagtctgagcagtattacatcattgaagtgaatgccaggctctctcgcagctctgccctggccagtaaggccacaggttatccactggcttatgtggcagccaagctagcattgggcatccctttgcctgagctcaggaactctgtgacagggggtacagcagcctttgaacccagcgtggattattgtgtggtgaagattcctcgatgggaccttagcaagttcctgcgagtcagcacaaagattgggagctgcatgaagagcgttggtgaagtcatgggcattgggcgttcatttgaggaggccttccagaaggccctgcgcatggtggatgagaactgtgtgggctttgatcacacagtgaaaccagtcagcgatatggagttggagactccaacagataagcggatttttgtggtggcagctgctttgtgggctggttattcagtggaccgcctgtatgagctcacacgcatcgaccgctggttcctgcaccgaatgaagcgtatcatcgcacatgcccagctgctagaacaacaccgtggacagcctttgccgccagacctgctgcaacaggccaagtgtcttggcttctcagacaaacagattgcccttgcagttctgagcacagagctggctgttcgcaagctgcgtcaggaactggggatctgtccagcagtgaaacagattgacacagttgcagctgagtggccagcccagacaaattacctatacctaacgtattggggcaccacccatgacctcacctttcgaacacctcatgtcctagtccttggctctggcgtctaccgtattggctctagcgttgaatttgactggtgtgctgtaggctgcatccagcagctccgaaagatgggatataagaccatcatggtgaactataacccagagacagtcagcaccgactatgacatgtgtgatcgactctactttgatgagatctcttttgaggtggtgatggacatctatgagctcgagaaccctgaaggtgtgatcctatccatgggtggacagctgcccaacaacatggccatggcgttgcatcggcagcagtgccgggtgctgggcacctcccctgaagccattgactcggctgagaaccgtttcaagttttcccggctccttgacaccattggtatcagccagcctcagtggagggagctcagtgacctcgagtctgctcgccaattctgccagaccgtggggtacccctgtgtggtgcgcccctcctatgtgctgagcggtgctgctatgaatgtggcctacacggatggagacctggagcgcttcctgagcagcgcagcagccgtctccaaagagcatcccgtggtcatctccaagttcatccaggaggctaaggagattgacgtggatgccgtggcctctgatggtgtggtggcagccatcgccatctctgagcatgtggagaatgcaggtgtgcattcaggtgatgcgacgctggtgacccccccacaagatatcactgccaaaaccctggagcggatcaaagccattgtgcatgctgtgggccaggagctacaggtcacaggacccttcaatctgcagctcattgccaaggatgaccagctgaaagttattgaatgcaacgtacgtgtctctcgctccttccccttcgtttccaagacactgggtgtggacctagtagccttggccacgcgggtcatcatgggggaagaagtggaacctgtggggctaatgactggttctggagtcgtgggagtaaaggtgcctcagttctccttctcccgcttggcgggtgctgacgtggtgttgggtgtggaaatgaccagtactggggaggtggccggctttggggagagccgctgtgaggcatacctcaaggccatgctaagcactggctttaagatccccaagaagaatatcctgctgaccattggcagctataagaacaaaagcgagctgctcccaactgtgcggctactggagagcctgggctacagcctctatgccagtctcggcacagctgacttctacactgagcatggcgtcaaggtaacagctgtggactggcactttgaggaggctgtggatggtgagtgcccaccacagcggagcatcctggagcagctagctgagaaaaactttgagctggtgattaacctgtcaatgcgtggagctgggggccggcgtctctcttcctttgtcaccaagggctaccgcacccgacgcttggccgctgacttctccgtgcccctaatcatcgatatcaagtgcaccaaactctttgtggaggccctaggccagatcgggccagcccctcctttgaaggtgcatgttgactgtatgacctcccaaaagcttgtgcgactgccgggattgattgatgtccatgtgcacctgcgggaaccaggtgggacacataaggaggactttgcttcaggcacagccgctgccctggctgggggtatcaccatggtgtgtgccatgcctaatacccggccccccatcattgacgcccctgctctggccctggcccagaagctggcagaggctggcgcccggtgcgactttgcgctattccttggggcctcgtctgaaaatgcaggaaccttgggcaccgtggccgggtctgcagccgggctgaagctttacctcaatgagaccttctctgagctgcggctggacagcgtggtccagtggatggagcatttcgagacatggccctcccacctccccattgtggctcacgcagagcagcaaaccgtggctgctgtcctcatggtggctcagctcactcagcgctcagtgcacatatgtcacgtggcacggaaggaggagatcctgctaattaaagctgcaaaggcacggggcttgccagtgacctgcgaggtggctccccaccacctgttcctaagccatgatgacctggagcgcctggggcctgggaagggggaggtccggcctgagcttggctcccgccaggatgtggaagccctgtgggagaacatggctgtcatcgactgctttgcctcagaccatgctccccataccttggaggagaagtgtgggtccaggcccccacctgggttcccagggttagagaccatgctgccactactcctgacggctgtaagcgagggccggctcagcctggacgacctgctgcagcgattgcaccacaatcctcggcgcatctttcacctgcccccgcaggaggacacctatgtggaggtggatctggagcatgagtggacaattcccagccacatgcccttctccaaggcccactggacaccttttgaagggcagaaagtgaagggcaccgtccgccgtgtggtcctgcgaggggaggttgcctatatcgatgggcaggttctggtacccccgggctatggacaggatgtacggaagtggccacagggggctgttcctcagctcccaccctcagcccctgccactagtgagatgaccacgacacctgaaagaccccgccgtggcatcccagggcttcctgatggccgcttccatctgccgccccgaatccatcgagcctccgacccaggtttgccagctgaggagccaaaggagaagtcctctcggaaggtagccgagccagagctgatgggaacccctgatggcacctgctaccctccaccaccagtaccgagacaggcatctccccagaacctggggacccctggcttgctgcacccccagacctcacccctgctgcactcattagtgggccaacatatcctgtccgtccagcagttcaccaaggatcagatgtctcacctgttcaatgtggcacacacactgcgtatgatggtgcagaaggagcggagcctcgacatcctgaaggggaaggtcatggcctccatgttctatgaagtgagcacacggaccagcagctcctttgcagcagccatggcccggctgggaggtgctgtgctcagcttctcggaagccacatcgtccgtccagaagggcgaatccctggctgactccgtgcagaccatgagctgctatgccgacgtcgtcgtgctccggcacccccagcctggagcagtggagctggccgccaagcactgccggaggccagtgatcaatgctggggatggggtcggagagcaccccacccaggccctgctggacatcttcaccatccgtgaggagctgggaactgtcaatggcatgacgatcacgatggtgggtgacctgaagcacggacgcacagtacattccctggcctgcctgctcacccagtatcgtgtcagcctgcgctacgtggcacctcccagcctgcgcatgccacccactgtgcgggccttcgtggcctcccgcggcaccaagcaggaggaattcgagagcattgaggaggcgctgcctgacactgatgtgctctacatgactcgaatccagaaggaacgatttggctctacccaggagtacgaagcttgctttggtcagttcatcctcactccccacatcatgacccgggccaagaagaagatggtggtgatgcacccgatgccccgtgtcaacgagataagcgtggaagtggactcggatccccgcgcagcctacttccgccaggctgagaacggcatgtacatccgcatggctctgttagccaccgtgctgggccgtttctagggcctggcttcctcagcctcttctctttaggcccagctgctgggcaaggaattccagtgcctcctacgggggcagcacacttagatattcctggacatccagatagctcacatgtgctgaccacacttcaggctctggactggagctctctggcatgggggtggggcctcagatgctggggcccagtctgccccatcttcattcctgcaccttaaacctgtacagtcatttttctactgacttaataaacagccgagctgtcccttgatgctgagtgtagtagaacagagctttcttttagaaaattgagcagattcccaaattataagagcagcctcaccaggcagggctctggctagggctgcgtgcccacactcggcattttcacactcgtgactctttgggactcggcaggagcgtgttaa

SEQ ID NO: 114100 - DNA, 6900 bp, Homo sapiens
  Payload ID: 2293
  Gene Symbol: CAD
  Gene Name: carbamoyl-phosphate synthetase 2, aspartate transcarbamylase, and dihydroorotase
  ENST ID: ENST00000403525
  CDS Start-End: 145-6633
cgctgccgcgcccggcttctctccagcgccccgcgccgttagccacgtggaccgactccggcgcgccgtcctcacgtggttccagtggagtttgcagtccttcccgcttctccgtactcgcccccgcctctgagctcccttcccatggcggccctagtgttggaggacgggtcggtcctgcggggccagccctttggggccgccgtgtcgactgccggggaagtggtgtttcaaaccggcatggtcggctaccccgaggccctcactgatccctcctacaaggcacagatcttagtgctcacctatcctctgatcggcaactatggcatccccccagatgaaatggatgagttcggtctctgcaagtggtttgaatcctcgggcatccacgtagcagcactggtagtgggagagtgctgtcctactcccagccactggagtgccacccgcaccctgcatgagtggctgcagcagcatggcatccctggcttgcaaggagtagacactcgggagctgaccaagaagttgcgggaacaggggtctctgctggggaagctggtccagaatggaacagaaccttcatccctgccattcttggaccccaatgcccgccccctggtaccagaggtctccattaagactccacgggtattcaatacagggggtgcccctcggatccttgctttggactgtggcctcaagtataatcagatccgatgcctctgccagcgtggggctgaggtcactgtggtaccctgggaccatgcactagacagccaagagtatgagggtctcttcttaagtaatgggcctggtgaccctgcctcctatcccagtgtcgtatccacactgagccgtgttttatctgagcctaatccccgacctgtctttgggatctgcctgggacaccagctattggccttagccattggggccaagacttacaagatgagatatgggaaccgaggccataaccagccctgcttgttggtgggctctgggcgctgctttctgacatcccagaaccatgggtttgctgtggagacagactcactgccagcagactgggctcctctcttcaccaacgccaatgatggttccaatgaaggcattgtgcacaacagcttgcctttcttcagtgtccagtttcacccagagcaccaagctggcccttcagatatggaactgcttttcgatatctttctggaaactgtgaaagaggccacagctgggaaccctgggggccagacagttagagagcggctgactgagcgcctctgtccccctgggattcccactcccggctctggacttccaccaccacgaaaggttctgatcctgggctcagggggcctctccattggccaagctggagaatttgactactcgggctctcaggcaattaaggccctgaaggaggaaaacatccagacgttgctgatcaaccccaatattgccacagtgcagacctcccaggggctggccgacaaggtctattttcttcccataacacctcattatgtaacccaggtgatacgtaatgaacgccccgatggtgtgttactgacttttgggggccagactgctctgaactgtggtgtggagctgaccaaggccggggtgctggctcggtatggggtccgggtcctgggcacaccagtggagaccattgagctgaccgaggatcgacgggcctttgctgccagaatggcagagatcggagagcatgtggccccgagcgaggcagcaaattctcttgaacaggcccaggcagccgctgaacggctggggtaccctgtgctagtgcgtgcagcctttgccctgggtggcctgggctctggctttgcctctaacagggaggagctctctgctctcgtggccccagcttttgcccataccagccaagtgctagtagacaagtctctgaagggatggaaggagattgagtacgaggtggtgagagacgcctatggcaactgtgtcacgtattacatcattgaagtgaatgccaggctctctcgcagctctgccctggccagtaaggccacaggttatccactggcttatgtggcagccaagctagcattgggcatccctttgcctgagctcaggaactctgtgacagggggtacagcagcctttgaacccagcgtggattattgtgtggtgaagattcctcgatgggaccttagcaagttcctgcgagtcagcacaaagattgggagctgcatgaagagcgttggtgaagtcatgggcattgggcgttcatttgaggaggccttccagaaggccctgcgcatggtggatgagaactgtgtgggctttgatcacacagtgaaaccagtcagcgatatggagttggagactccaacagataagcggatttttgtggtggcagctgctttgtgggctggttattcagtggaccgcctgtatgagctcacacgcatcgaccgctggttcctgcaccgaatgaagcgtatcatcgcacatgcccagctgctagaacaacaccgtggacagcctttgccgccagacctgctgcaacaggccaagtgtcttggcttctcagacaaacagattgcccttgcagttctgagcacagagctggctgttcgcaagctgcgtcaggaactggggatctgtccagcagtgaaacagattgacacagttgcagctgagtggccagcccagacaaattacctatacctaacgtattggggcaccacccatgacctcacctttcgaacacctcatgtcctagtccttggctctggcgtctaccgtattggctctagcgttgaatttgactggtgtgctgtaggctgcatccagcagctccgaaagatgggatataagaccatcatggtgaactataacccagagacagtcagcaccgactatgacatgtgtgatcgactctactttgatgagatctcttttgaggtggtgatggacatctatgagctcgagaaccctgaaggtgtgatcctatccatgggtggacagctgcccaacaacatggccatggcgttgcatcggcagcagtgccgggtgctgggcacctcccctgaagccattgactcggctgagaaccgtttcaagttttcccggctccttgacaccattggtatcagccagcctcagtggagggagctcagtgacctcgagtctgctcgccaattctgccagaccgtggggtacccctgtgtggtgcgcccctcctatgtgctgagcggtgctgctatgaatgtggcctacacggatggagacctggagcgcttcctgagcagcgcagcagccgtctccaaagagcatcccgtggtcatctccaagttcatccaggaggctaaggagattgacgtggatgccgtggcctctgatggtgtggtggcagccatcgccatctctgagcatgtggagaatgcaggtgtgcattcaggtgatgcgacgctggtgacccccccacaagatatcactgccaaaaccctggagcggatcaaagccattgtgcatgctgtgggccaggagctacaggtcacaggacccttcaatctgcagctcattgccaaggatgaccagctgaaagttattgaatgcaacgtacgtgtctctcgctccttccccttcgtttccaagacactgggtgtggacctagtagccttggccacgcgggtcatcatgggggaagaagtggaacctgtggggctaatgactggttctggagtcgtgggagtaaaggtgcctcagttctccttctcccgcttggcgggtgctgacgtggtgttgggtgtggaaatgaccagtactggggaggtggccggctttggggagagccgctgtgaggcatacctcaaggccatgctaagcactggctttaagatccccaagaagaatatcctgctgaccattggcagctataagaacaaaagcgagctgctcccaactgtgcggctactggagagcctgggctacagcctctatgccagtctcggcacagctgacttctacactgagcatggcgtcaaggtaacagctgtggactggcactttgaggaggctgtggatggtgagtgcccaccacagcggagcatcctggagcagctagctgagaaaaactttgagctggtgattaacctgtcaatgcgtggagctgggggccggcgtctctcttcctttgtcaccaagggctaccgcacccgacgcttggccgctgacttctccgtgcccctaatcatcgatatcaagtgcaccaaactctttgtggaggccctaggccagatcgggccagcccctcctttgaaggtgcatgttgactgtatgacctcccaaaagcttgtgcgactgccgggattgattgatgtccatgtgcacctgcgggaaccaggtgggacacataaggaggactttgcttcaggcacagccgctgccctggctgggggtatcaccatggtgtgtgccatgcctaatacccggccccccatcattgacgcccctgctctggccctggcccagaagctggcagaggctggcgcccggtgcgactttgcgctattccttggggcctcgtctgaaaatgcaggaaccttgggcaccgtggccgggtctgcagccgggctgaagctttacctcaatgagaccttctctgagctgcggctggacagcgtggtccagtggatggagcatttcgagacatggccctcccacctccccattgtggctcacgcagagcagcaaaccgtggctgctgtcctcatggtggctcagctcactcagcgctcagtgcacatatgtcacgtggcacggaaggaggagatcctgctaattaaagctgcaaaggcacggggcttgccagtgacctgcgaggtggctccccaccacctgttcctaagccatgatgacctggagcgcctggggcctgggaagggggaggtccggcctgagcttggctcccgccaggatgtggaagccctgtgggagaacatggctgtcatcgactgctttgcctcagaccatgctccccataccttggaggagaagtgtgggtccaggcccccacctgggttcccagggttagagaccatgctgccactactcctgacggctgtaagcgagggccggctcagcctggacgacctgctgcagcgattgcaccacaatcctcggcgcatctttcacctgcccccgcaggaggacacctatgtggaggtggatctggagcatgagtggacaattcccagccacatgcccttctccaaggcccactggacaccttttgaagggcagaaagtgaagggcaccgtccgccgtgtggtcctgcgaggggaggttgcctatatcgatgggcaggttctggtacccccgggctatggacaggatgtacggaagtggccacagggggctgttcctcagctcccaccctcagcccctgccactagtgagatgaccacgacacctgaaagaccccgccgtggcatcccagggcttcctgatggccgcttccatctgccgccccgaatccatcgagcctccgacccaggtttgccagctgaggagccaaaggagaagtcctctcggaaggtagccgagccagagctgatgggaacccctgatggcacctgctaccctccaccaccagtaccgagacaggcatctccccagaacctggggacccctggcttgctgcacccccagacctcacccctgctgcactcattagtgggccaacatatcctgtccgtccagcagttcaccaaggatcagatgtctcacctgttcaatgtggcacacacactgcgtatgatggtgcagaaggagcggagcctcgacatcctgaaggggaaggtcatggcctccatgttctatgaagtgagcacacggaccagcagctcctttgcagcagccatggcccggctgggaggtgctgtgctcagcttctcggaagccacatcgtccgtccagaagggcgaatccctggctgactccgtgcagaccatgagctgctatgccgacgtcgtcgtgctccggcacccccagcctggagcagtggagctggccgccaagcactgccggaggccagtgatcaatgctggggatggggtcggagagcaccccacccaggccctgctggacatcttcaccatccgtgaggagctgggaactgtcaatggcatgacgatcacgatggtgggtgacctgaagcacggacgcacagtacattccctggcctgcctgctcacccagtatcgtgtcagcctgcgctacgtggcacctcccagcctgcgcatgccacccactgtgcgggccttcgtggcctcccgcggcaccaagcaggaggaattcgagagcattgaggaggcgctgcctgacactgatgtgctctacatgactcgaatccagaaggaacgatttggctctacccaggagtacgaagcttgctttggtcagttcatcctcactccccacatcatgacccgggccaagaagaagatggtggtgatgcacccgatgccccgtgtcaacgagataagcgtggaagtggactcggatccccgcgcagcctacttccgccaggctgagaacggcatgtacatccgcatggctctgttagccaccgtgctgggccgtttctagggcctggcttcctcagcctcttctctttaggcccagctgctgggcaaggaattccagtgcctcctacgggggcagcacacttagatattcctggacatccagatagctcacatgtgctgaccacacttcaggctctggactggagctctctggcatgggggtggggcctcagatgctggggcccagtctgccccatcttcattcctgcaccttaaacctgtacagtcatttttctactgacttaataaacagccgagctgtcccttg

SEQ ID NO: 114101 - DNA, 837 bp, Homo sapiens
  Payload ID: 2293
  Gene Symbol: CAD
  Gene Name: carbamoyl-phosphate synthetase 2, aspartate transcarbamylase, and dihydroorotase
  ENST ID: ENST00000456311
  CDS Start-End: 1-837
actcctgacggctgtaagcgagggccggctcagcctggacgacctgctgcagcgattgcaccacaatcctcggcgcatctttcacctgcccccgcaggaggacacctatgtggaggtggatctggagcatgagtggacaattcccagccacatgcccttctccaaggcccactggacaccttttgaagggcagaaagtgaagggcaccgtccgccgtgtggtcctgcgaggggaggttgcctatatcgatgggcaggttctggtacccccgggctatggacaggatgtacggaagtggccacagggggctgttcctcagctcccaccctcagcccctgccactagtgagatgaccacgacacctgaaagaccccgccgtggcatcccagggcttcctgatggccgcttccatctgccgccccgaatccatcgagcctccgacccaggtttgccagctgtgttcctccgcccaggagctgggatcccacggggcagcagagcgtgggctgaggagccaaaggagaagtcctctcggaaggtagccgagccagagctgatgggaacccctgatggcacctgctaccctccaccaccagtaccgagacaggcatctccccagaacctggggacccctggcttgctgcacccccagacctcacccctgctgcactcattagtgggccaacatatcctgtccgtccagcagttcaccaaggatcagatgtctcacctgttcaatgtggcacacacactgcgtatgatggtgcagaaggagcggagcctcgacatcctgaaggggaaggtcatggcctccatgttctatgaagtgagcacacg

SEQ ID NO: 114102 - DNA, 953 bp, Homo sapiens
  Payload ID: 2293
  Gene Symbol: CAD
  Gene Name: carbamoyl-phosphate synthetase 2, aspartate transcarbamylase, and dihydroorotase
  ENST ID: ENST00000428460
  CDS Start-End: 1-881
tggcctccatgttctatgaagtgagcacacggaccagcagctcctttgcagcagccatggcccggctgggaggtgctgtgctcagcttctcggaagccacatcgtccgtccagaagggcgaatccctggctgactccgtgcagaccatgagctgctatgccgacgtcgtcgtgctccggcacccccagcctggagcagtggagctggccgccaagcactgccggaggccagtgatcaatgctggggatggggtcggagagcaccccacccaggccctgctggacatcttcaccatccgtgaggagctgggaactgtcaatggcatgacgatcacgatggtgggtgacctgaagcacggacgcacagtacattccctggcctgcctgctcacccagtatcgtgtcagcctgcgctacgtggcacctcccagcctgcgcatgccacccactgtgcgggccttcgtggcctcccgcggcaccaagcaggtgagaccctcacagccctgcctggaagccatggagatgtgggttgggcagtcagagcccagcgctgcatccaccatggctctcctcaccctccaggaggaattcgagagcattgaggaggcgctgcctgacactgatgtgctctacatgactcgaatccagaaggaacgatttggctctacccaggagtacgaagcttgctttggtcagttcatcctcactccccacatcatgacccgggccaagaagaagatggtggtgatgcacccgatgccccgtgtcaacgagataagcgtggaagtggactcggatccccgcgcagcctacttccgccaggctgagaacggcatgtacatccgcatggctctgttagccaccgtgctgggccgtttctagggcctggcttcctcagcctcttctctttaggcccagctgctgggcaaggaattccagtgcctcctacggggg

SEQ ID NO: 114103 - DNA, 806 bp, Homo sapiens
  Payload ID: 2293
  Gene Symbol: CAD
  Gene Name: carbamoyl-phosphate synthetase 2, aspartate transcarbamylase, and dihydroorotase
  ENST ID: ENST00000458503
  CDS Start-End: 1-806
gcgtcaaggtaacagctgtggactggcactttgaggaggctgtggatggtgagtgcccaccacagcggagcatcctggagcagctagctgagaaaaactttgagctggtgattaacctgtcaatgcgtggagctgggggccggcgtctctcttcctttgtcaccaagggctaccgcacccgacgcttggccgctgacttctccgtgcccctaatcatcgatatcaagtgcaccaaactctttgtggagctgactgctttccacttgcaggccctaggccagatcgggccagcccctcctttgaaggtgcatgttgactgtatgacctcccaaaagcttgtgcgactgccgggattgattgatgtccatgtgcacctgcgggaaccaggtgggacacataaggaggactttgcttcaggcacagccgctgccctggctgggggtatcaccatggtgtgtgccatgcctaatacccggccccccatcattgacgcccctgctctggccctggcccagaagctggcagaggctggcgcccggtgcgactttgcgctattccttggggcctcgtctgaaaatgcaggaaccttgggcaccgtggccgggtctgcagccgggctgaagctttacctcaatgagaccttctctgagctgcggctggacagcgtggtccagtggatggagcatttcgagacatggccctcccacctccccattgtggctcacgcagagcagcaaaccgtggctgctgtcctcatggtggctcagctcactcagcgctcagtgcacatatgtcacgtggcacgg

SEQ ID NO: 114104 - DNA, 5709 bp, Homo sapiens
  Payload ID: 2294
  Gene Symbol: CHST11
  Gene Name: carbohydrate (chondroitin 4) sulfotransferase 11
  Uniprot ID: Q9NPF2
  ENST ID: ENST00000303694
  CDS Start-End: 440-1498
atatagatcgttggagcgcaatgaagtagcctttggagagaagggagagggcccgtcggacagccacagcggccagcgcagcggcagcggcggcggcaccaccatcaccgctcgcaccccagccgcccggcccgcgaccaggcagcggcggccgccggcgggatcggaggaggcggcggagcggcgaggaggaggagcaggagcgcgcagccagcgggtccacgcatctcagcacttccagaccaactccggcaccttccacacccctgcccgggctgggggctccgagagcggccgcgaagcgactccgatcctccctctgagccttgctcagctctgccccgcgcctcccgggctccggtccgcgcggcggggtccctgctcctgcgccccgggcgcgcttcccggacaccccggtccccgcagccaggacaaagccatgaagccagcgctgctggaagtgatgaggatgaacagaatctgccggatggtgctggccacttgcttgggatcctttatcctggtcatcttctatttccaaagtatgttgcacccagtcatgcggaggaatccctttggtgtggacatctgctgccggaaggggtcccgaagccccctgcaggaactctacaacccaatccagctggagctctcaaacactgctgtcctgcaccagatgcggcgggaccaggtgacagacacgtgccgagccaacagcgccacaagccgtaagcggagggtgctgacccccaacgacctgaagcacttggtggtggatgaggaccacgagctcatctactgctacgtgcccaaggtggcctgcaccaactggaagcggctcatgatggtcctgaccgggcgggggaagtacagcgaccccatggagatcccggccaacgaggcacacgtctccgccaacctgaagaccctgaaccagtacagcatcccagaaatcaaccaccgcttgaaaagctacatgaagttcctgtttgtccgggagcccttcgagaggctagtgtccgcctaccgcaacaagttcacccagaagtacaacatctccttccacaagcggtacggcaccaagatcatcaaacgccagcggaagaacgccacccaggaggccctgcgcaaaggggacgatgtcaaattcgaggagtttgtggcctatctcatcgacccacacacccagcgggaggagcctttcaacgaacactggcaaaccgtctactcactctgccatccctgccacatccactatgacctcgtgggcaagtacgagacactggaagaggattctaattacgtcctgcagctggcaggagtgggcagctacctgaagttccccacctatgcaaagtctacgagaactactgatgaaatgaccacagaattcttccagaacatcagctcagagcaccaaacgcagctgtacgaagtctacaaactcgattttttaatgttcaattactcagtgccaagctacctgaaattggaataaagggggtggggagagggagagaatcatgctttttaatttaagatttttatttgtcaaaagaattatatggatattgggttattttgtaaattaatatttctttggggatgatgctgcgagcagcatagtgagaattatttaaaatccttcgtagggaaggacagctgtctttgcaggggaaataggatgggtcgtccttgtctgtagaagtgaatactgcaacactgtctcaaaggtttcttgtgttctggtgaattccatgaattgtgcattccataaattctaattaatattatttatagttatttaaacatggtctcattatttctttttgtggcagcaaaattctaacatctttccagaagaaatctatgattcctgctttgcttgctacagctcatttgggggcatgaatgttctccttactaacctctcatggagtcatgtgataacagccattgtcatgtgtatggatgccaccattcttgaatttctgctagaaataagtaggttgctattgcacttagagtcatctttgcaagggactcattccaaaccaattccaatcgacctgaaagtcccttgcactaaagaaatgtgatttttttttaacccaaggagaaagttggttgtaacaatttttcaccagaattagcaatctgatagaataggcttttttaacaggaattttaaactggcggtgccagttgcagtgaaggtgaagtggctattgctttatattcgacaaatatttattgagcatctactatatactaggccctgaagatagagcgttgaacaaacccaatagtcttggccctcaaaaagctttatgtgacatagagcatccagctcgacaattagcaaacccctgatattattcatggacttgacatgaggtttggactattcatgagcaacagcagaaggtccatgacccctacaaatttacatttttctatggcccatatttgaaaacctcacattcggagcaggccactttatattcgtgagtgatcccaagctcactgaccaacagaaaagatgctaaaaaaatgtgtcctatcatgtgcctgctccaactgatgggtaatgtctgcctttaagccccagaatggattctccaggcacagtgtggaagagtgctgtggttgattagcaatgtctgccttgggtgaggaaaggggaacactcctcaagtgcctcctactgtcatctccattcagcctagcaccacatccccatgtagaagtgttgtcttctactgcttgccacgtacaagtgtgaaatgccaaggtgagactcgtacacttggggatttgcaatggtttttacccctcatgaaggtcagaggtggactatttgtacacatacacacatgcacaccctctcacgtcctccagaggctgaaagactatcagcatcttggtaactgccatgcatgagcagcaaggacagccttccataatccatgccccatttcctctggaagcctggaaacttttcatttcctgttccttgctaattaacatctaaacatgcttctcatttccagccattgctgatgcttctcagttgaagtttgagccacatccctcttacagctagtgaatgagttggtagcagctactgtatataataataataatagttttaataataggggagggtgggatggggtgtgggtaagttttgccttttgttttgtttttgatgccgtatatagtgaaggggtgaggatattctaaacaaacaaaaattgaataatttattcacagaaactattaagattgtattgtaaagctcacagcaagctcagtgggcagcagctgcaacatctcaccggggaaattattttatttaacgtgagtgagatgtgggccggagaaggtagctgaagctatttataaaacgttgtgtaccttcttccgagctctctcccctttgtgaagggcgcagcaactatacccttgatggatggagatttacgcaatgtgttttactgggtagagtgacagaccttggctgtccctggaattgagaatctggaccttatttccaggcagagaacactgtcctcagaaatgggacttctgataatgaaacaggttgtccaacattttctaatacgcattctacagaacacaggttccaggaggcatcaggttggtgtgatgcagactaagggttttgtggtcaaatatccttaagaaacaaagttaagtcagtttcctttctgcaaggacttttcagccttcaatgtgtgctgtgcatggtgaatccccaaaaataatccttgagtctgtagcatttcctgaacttacatgaccaggatactctattttgcagatcaccccacagagctagggttccaccgagtatactttgcttaggttgacttagcatatctgaggtcttcaaggataaaaactgccaccccaacacccttccattaaaaaaaaaatacaaaatagcaccacagtctccatctggtttatagcaacagaggtactttatttaatgaagcaatggttctaatcctggatactgccacggactacaattctatccctcccagagggagtggaggaagtcttgggtggtgtggacagaaggaagagaggagagggtgagtggggtatagggcccagggtggctccctactcctcaggctcaaaaggatgctcagtgggaacagatgatctcttgatgagtgcttcttcagtttcatagtttggaatcgttcactgtgtgctttttggggggttttcaatggaaattcacgttgctttgcatttctgtgtccgtctttggtcagttgtgcaagcctgctcactgtcatgtgaagatggcctttcatctggcttctctctcttaagtgagaaagattgtccttcaggggacatgacatcaataggtttctggaatgagggactctttctccccgtgttttgctttgtgttcacattttcttttctaatggcattgaaactttaaaaaaaatggattcaactgtttttgcagaatgtagaaagtattctgtgtccttggttaaagaaatccacttgtgaagtgtgcctggaaaatgaaagtttgtgttttttaaagaggaatatttgaaactgctttctatgcatgcttagctggagaaaagtacaggcaggcgtcccatctcccagccacttctcaaaggtgctgctgtgttttaaagaccaggtacagccagggcagtatttgcaaggacattcctgcttactttatccctttggttggaaagctctagatgattcccgcagctcctccagaccccgcctccctgccctccccagctggtctgggaagaggtggtctgctgacctgtggtatctcagaggggacgttcctcctcctccctgtgcaccaggtgggctgcaccctcctgcctattcaggatgtggatgccacaggagagcagcaggcagtggaaacttcagttgcactggttctcctggtggcaaaggcatgaagcacaggggtcgattaatccaggctactagaaagctccagagcaaagtgtgcgggtcccacaaatgcttggctggtggggtctggatcagtgctgagatagagttggcagaagaagcagaggcactctgcttgctttcctagccagtcctcccctacacacacacacacacacacacacacacacacacacaatctcagctgcgccattctgtgcaatcccagtgaccaaatcccttccttgcccacctctatgtcagcaggactgaccacatcactcccccgagttcccaccaccagcatttcctccaacctttttccatcacaaccagttagaaccctacaggcaacaaggccttctagaatccgcttaacccttggctgataacaggcaaatttcagtctgctacactttgttaggtccagaaggagctgcccatactactttcttatgagcatgctcagtatggcatatggacatgtaatgtcacatctttgtggagtgtgattttcttttttcacatatttgtatgcagtagagagcctgttgtagaaaacgctccctgtatcttgctgtactgttaaagaaagctgaattccacattgccaacaaaagcgtgaaaatgttcatgaaccttcctccaggaaaagccattcaagcctgattatttttctaagtaacttcaattaaattgaagaaaaaagaa

SEQ ID NO: 114105 - DNA, 756 bp, Homo sapiens
  Payload ID: 2294
  Gene Symbol: CHST11
  Gene Name: carbohydrate (chondroitin 4) sulfotransferase 11
  ENST ID: ENST00000546689
  CDS Start-End: 412-630
gcctttggagagaagggagagggcccgtcggacagccacagcggccagcgcagcggcagcggcggcggcaccaccatcaccgctcgcaccccagccgcccggcccgcgaccaggcagcggcggccgccggcgggatcggaggaggcggcggagcggcgaggaggaggagcaggagcgcgcagccagcgggtccacgcatctcagcacttccagaccaactccggcaccttccacacccctgcccgggctgggggctccgagagcggccgcgaagcgactccgatcctccctctgagccttgctcagctctgccccgcgcctcccgggctccggtccgcgcggcggggtccctgctcctgcgccccgggcgcgcttcccggacaccccggtccccgcagccaggacaaagccatgaagccagcgctgctggaagtgatgaggatgaacagaatctgccggatggtgctggccacttgcttgggatcctttatcctggtcatcttctatttccaaatcatgcggaggaatccctttggtgtggacatctgctgccggaaggggtcccgaagccccctgcaggaactctacaacccaatccaggtaagcttcaagcactctgtcagcatgtgaattttttttttttgtaggtatggatactaaaaactctaaaattgtggtctttgggggatttaaaacttcctttcacagcctggcattttaccttcagtggttgctttctccgtcaccctttttcta

SEQ ID NO: 114106 - DNA, 936 bp, Homo sapiens
  Payload ID: 2294
  Gene Symbol: CHST11
  Gene Name: carbohydrate (chondroitin 4) sulfotransferase 11
  ENST ID: ENST00000547956
  CDS Start-End: 445-678
ggaatatatagatcgttggagcgcaatgaagtagcctttggagagaagggagagggcccgtcggacagccacagcggccagcgcagcggcagcggcggcggcaccaccatcaccgctcgcaccccagccgcccggcccgcgaccaggcagcggcggccgccggcgggatcggaggaggcggcggagcggcgaggaggaggagcaggagcgcgcagccagcgggtccacgcatctcagcacttccagaccaactccggcaccttccacacccctgcccgggctgggggctccgagagcggccgcgaagcgactccgatcctccctctgagccttgctcagctctgccccgcgcctcccgggctccggtccgcgcggcggggtccctgctcctgcgccccgggcgcgcttcccggacaccccggtccccgcagccaggacaaagccatgaagccagcgctgctggaagtgatgaggatgaacagaatctgccggatggtgctggccacttgcttgggatcctttatcctggtcatcttctatttccaaagtatgttgcacccagtcatgcggaggaatccctttggtgtggacatctgctgccggaaggggtcccgaagccccctgcaggaactctacaacccaatccaggtaagcttcaagcactctgtcagcatgtgaattttttttttttgtaggtatggatactaaaaactctaaaattgtggtctttgggggatttaaaacttcctttcacagcctggcattttaccttcagtggttgctttctccgtcaccctttttctatgtagcatctctgaaaaatctagcaggggatgtttagaattagagaaatgcctaggtttagtgctaagcattcagacctgcccagggtttgaactcctgagattaacagtctcaagttcgagcaatgggact

SEQ ID NO: 114107 - DNA, 573 bp, Homo sapiens
  Payload ID: 2294
  Gene Symbol: CHST11
  Gene Name: carbohydrate (chondroitin 4) sulfotransferase 11
  ENST ID: ENST00000549016
  CDS Start-End: 99-573
atagatacctgaacacccgtgttcatagcagcatgagtcacggtggccagaaggtggaagcaaccctaatgcccatcagtggatgaatgaatagtgtcatgcggaggaatccctttggtgtggacatctgctgccggaaggggtcccgaagccccctgcaggaactctacaacccaatccagctggagctctcaaacactgctgtcctgcaccagatgcggcgggaccaggtgacagacacgtgccgagccaacagcgccacaagccgtaagcggagggtgctgacccccaacgacctgaagcacttggtggtggatgaggaccacgagctcatctactgctacgtgcccaaggtggcctgcaccaactggaagcggctcatgatggtcctgaccgggcgggggaagtacagcgaccccatggagatcccggccaacgaggcacacgtctccgccaacctgaagaccctgaaccagtacagcatcccagaaatcaaccaccgcttgaaaagctacatgaagttcctgtttgtccgggagcccttcgagaggctagtgtccgcctaccgcaaca

SEQ ID NO: 114108 - DNA, 5696 bp, Homo sapiens
  Payload ID: 2294
  Gene Symbol: CHST11
  Gene Name: carbohydrate (chondroitin 4) sulfotransferase 11
  Uniprot ID: Q9NPF2
  ENST ID: ENST00000549260
  CDS Start-End: 442-1485
atatatagatcgttggagcgcaatgaagtagcctttggagagaagggagagggcccgtcggacagccacagcggccagcgcagcggcagcggcggcggcaccaccatcaccgctcgcaccccagccgcccggcccgcgaccaggcagcggcggccgccggcgggatcggaggaggcggcggagcggcgaggaggaggagcaggagcgcgcagccagcgggtccacgcatctcagcacttccagaccaactccggcaccttccacacccctgcccgggctgggggctccgagagcggccgcgaagcgactccgatcctccctctgagccttgctcagctctgccccgcgcctcccgggctccggtccgcgcggcggggtccctgctcctgcgccccgggcgcgcttcccggacaccccggtccccgcagccaggacaaagccatgaagccagcgctgctggaagtgatgaggatgaacagaatctgccggatggtgctggccacttgcttgggatcctttatcctggtcatcttctatttccaaatcatgcggaggaatccctttggtgtggacatctgctgccggaaggggtcccgaagccccctgcaggaactctacaacccaatccagctggagctctcaaacactgctgtcctgcaccagatgcggcgggaccaggtgacagacacgtgccgagccaacagcgccacaagccgtaagcggagggtgctgacccccaacgacctgaagcacttggtggtggatgaggaccacgagctcatctactgctacgtgcccaaggtggcctgcaccaactggaagcggctcatgatggtcctgaccgggcgggggaagtacagcgaccccatggagatcccggccaacgaggcacacgtctccgccaacctgaagaccctgaaccagtacagcatcccagaaatcaaccaccgcttgaaaagctacatgaagttcctgtttgtccgggagcccttcgagaggctagtgtccgcctaccgcaacaagttcacccagaagtacaacatctccttccacaagcggtacggcaccaagatcatcaaacgccagcggaagaacgccacccaggaggccctgcgcaaaggggacgatgtcaaattcgaggagtttgtggcctatctcatcgacccacacacccagcgggaggagcctttcaacgaacactggcaaaccgtctactcactctgccatccctgccacatccactatgacctcgtgggcaagtacgagacactggaagaggattctaattacgtcctgcagctggcaggagtgggcagctacctgaagttccccacctatgcaaagtctacgagaactactgatgaaatgaccacagaattcttccagaacatcagctcagagcaccaaacgcagctgtacgaagtctacaaactcgattttttaatgttcaattactcagtgccaagctacctgaaattggaataaagggggtggggagagggagagaatcatgctttttaatttaagatttttatttgtcaaaagaattatatggatattgggttattttgtaaattaatatttctttggggatgatgctgcgagcagcatagtgagaattatttaaaatccttcgtagggaaggacagctgtctttgcaggggaaataggatgggtcgtccttgtctgtagaagtgaatactgcaacactgtctcaaaggtttcttgtgttctggtgaattccatgaattgtgcattccataaattctaattaatattatttatagttatttaaacatggtctcattatttctttttgtggcagcaaaattctaacatctttccagaagaaatctatgattcctgctttgcttgctacagctcatttgggggcatgaatgttctccttactaacctctcatggagtcatgtgataacagccattgtcatgtgtatggatgccaccattcttgaatttctgctagaaataagtaggttgctattgcacttagagtcatctttgcaagggactcattccaaaccaattccaatcgacctgaaagtcccttgcactaaagaaatgtgatttttttttaacccaaggagaaagttggttgtaacaatttttcaccagaattagcaatctgatagaataggcttttttaacaggaattttaaactggcggtgccagttgcagtgaaggtgaagtggctattgctttatattcgacaaatatttattgagcatctactatatactaggccctgaagatagagcgttgaacaaacccaatagtcttggccctcaaaaagctttatgtgacatagagcatccagctcgacaattagcaaacccctgatattattcatggacttgacatgaggtttggactattcatgagcaacagcagaaggtccatgacccctacaaatttacatttttctatggcccatatttgaaaacctcacattcggagcaggccactttatattcgtgagtgatcccaagctcactgaccaacagaaaagatgctaaaaaaatgtgtcctatcatgtgcctgctccaactgatgggtaatgtctgcctttaagccccagaatggattctccaggcacagtgtggaagagtgctgtggttgattagcaatgtctgccttgggtgaggaaaggggaacactcctcaagtgcctcctactgtcatctccattcagcctagcaccacatccccatgtagaagtgttgtcttctactgcttgccacgtacaagtgtgaaatgccaaggtgagactcgtacacttggggatttgcaatggtttttacccctcatgaaggtcagaggtggactatttgtacacatacacacatgcacaccctctcacgtcctccagaggctgaaagactatcagcatcttggtaactgccatgcatgagcagcaaggacagccttccataatccatgccccatttcctctggaagcctggaaacttttcatttcctgttccttgctaattaacatctaaacatgcttctcatttccagccattgctgatgcttctcagttgaagtttgagccacatccctcttacagctagtgaatgagttggtagcagctactgtatataataataataatagttttaataataggggagggtgggatggggtgtgggtaagttttgccttttgttttgtttttgatgccgtatatagtgaaggggtgaggatattctaaacaaacaaaaattgaataatttattcacagaaactattaagattgtattgtaaagctcacagcaagctcagtgggcagcagctgcaacatctcaccggggaaattattttatttaacgtgagtgagatgtgggccggagaaggtagctgaagctatttataaaacgttgtgtaccttcttccgagctctctcccctttgtgaagggcgcagcaactatacccttgatggatggagatttacgcaatgtgttttactgggtagagtgacagaccttggctgtccctggaattgagaatctggaccttatttccaggcagagaacactgtcctcagaaatgggacttctgataatgaaacaggttgtccaacattttctaatacgcattctacagaacacaggttccaggaggcatcaggttggtgtgatgcagactaagggttttgtggtcaaatatccttaagaaacaaagttaagtcagtttcctttctgcaaggacttttcagccttcaatgtgtgctgtgcatggtgaatccccaaaaataatccttgagtctgtagcatttcctgaacttacatgaccaggatactctattttgcagatcaccccacagagctagggttccaccgagtatactttgcttaggttgacttagcatatctgaggtcttcaaggataaaaactgccaccccaacacccttccattaaaaaaaaaatacaaaatagcaccacagtctccatctggtttatagcaacagaggtactttatttaatgaagcaatggttctaatcctggatactgccacggactacaattctatccctcccagagggagtggaggaagtcttgggtggtgtggacagaaggaagagaggagagggtgagtggggtatagggcccagggtggctccctactcctcaggctcaaaaggatgctcagtgggaacagatgatctcttgatgagtgcttcttcagtttcatagtttggaatcgttcactgtgtgctttttggggggttttcaatggaaattcacgttgctttgcatttctgtgtccgtctttggtcagttgtgcaagcctgctcactgtcatgtgaagatggcctttcatctggcttctctctcttaagtgagaaagattgtccttcaggggacatgacatcaataggtttctggaatgagggactctttctccccgtgttttgctttgtgttcacattttcttttctaatggcattgaaactttaaaaaaaatggattcaactgtttttgcagaatgtagaaagtattctgtgtccttggttaaagaaatccacttgtgaagtgtgcctggaaaatgaaagtttgtgttttttaaagaggaatatttgaaactgctttctatgcatgcttagctggagaaaagtacaggcaggcgtcccatctcccagccacttctcaaaggtgctgctgtgttttaaagaccaggtacagccagggcagtatttgcaaggacattcctgcttactttatccctttggttggaaagctctagatgattcccgcagctcctccagaccccgcctccctgccctccccagctggtctgggaagaggtggtctgctgacctgtggtatctcagaggggacgttcctcctcctccctgtgcaccaggtgggctgcaccctcctgcctattcaggatgtggatgccacaggagagcagcaggcagtggaaacttcagttgcactggttctcctggtggcaaaggcatgaagcacaggggtcgattaatccaggctactagaaagctccagagcaaagtgtgcgggtcccacaaatgcttggctggtggggtctggatcagtgctgagatagagttggcagaagaagcagaggcactctgcttgctttcctagccagtcctcccctacacacacacacacacacacacacacacacacacacaatctcagctgcgccattctgtgcaatcccagtgaccaaatcccttccttgcccacctctatgtcagcaggactgaccacatcactcccccgagttcccaccaccagcatttcctccaacctttttccatcacaaccagttagaaccctacaggcaacaaggccttctagaatccgcttaacccttggctgataacaggcaaatttcagtctgctacactttgttaggtccagaaggagctgcccatactactttcttatgagcatgctcagtatggcatatggacatgtaatgtcacatctttgtggagtgtgattttcttttttcacatatttgtatgcagtagagagcctgttgtagaaaacgctccctgtatcttgctgtactgttaaagaaagctgaattccacattgccaacaaaagcgtgaaaatgttcatgaaccttcctccaggaaaagccattcaagcctgattatttttctaagtaacttcaattaaattgaagaaaaaagaa

SEQ ID NO: 114109 - DNA, 15979 bp, Homo sapiens
  Payload ID: 2295
  Gene Symbol: CHST12
  Gene Name: carbohydrate (chondroitin 4) sulfotransferase 12
  Uniprot ID: Q9NRB3
  ENST ID: ENST00000258711
  CDS Start-End: 136-1380
gggctgcctctggggggtccgctagtcgcggggcggcggcggcggctgcgggcgcgaggttcccagcaggatgccccggctctgcaggaagctgaagtgagaggcccggagagggcccagcccgcccggggcaggatgaccaaggcccggctgttccggctgtggctggtgctggggtcggtgttcatgatcctgctgatcatcgtgtactgggacagcgcaggcgccgcgcacttctacttgcacacgtccttctctaggccgcacacggggccgccgctgcccacgcccgggccggacagggacagggagctcacggccgactccgatgtcgacgagtttctggacaagtttctcagtgctggcgtgaagcagagcgaccttcccagaaaggagacggagcagccgcctgcgccggggagcatggaggagagcgtgagaggctacgactggtccccgcgcgacgcccggcgcagcccagaccagggccggcagcaggcggagcggaggagcgtgctgcggggcttctgcgccaactccagcctggccttccccaccaaggagcgcgcattcgacgacatccccaactcggagctgagccacctgatcgtggacgaccggcacggggccatctactgctacgtgcccaaggtggcctgcaccaactggaagcgcgtgatgatcgtgctgagcggaagcctgctgcaccgcggtgcgccctaccgcgacccgctgcgcatcccgcgcgagcacgtgcacaacgccagcgcgcacctgaccttcaacaagttctggcgccgctacgggaagctctcccgccacctcatgaaggtcaagctcaagaagtacaccaagttcctcttcgtgcgcgaccccttcgtgcgcctgatctccgccttccgcagcaagttcgagctggagaacgaggagttctaccgcaagttcgccgtgcccatgctgcggctgtacgccaaccacaccagcctgcccgcctcggcgcgcgaggccttccgcgctggcctcaaggtgtccttcgccaacttcatccagtacctgctggacccgcacacggagaagctggcgcccttcaacgagcactggcggcaggtgtaccgcctctgccacccgtgccagatcgactacgacttcgtggggaagctggagactctggacgaggacgccgcgcagctgctgcagctactccaggtggaccggcagctccgcttccccccgagctaccggaacaggaccgccagcagctgggaggaggactggttcgccaagatccccctggcctggaggcagcagctgtataaactctacgaggccgactttgttctcttcggctaccccaagcccgaaaacctcctccgagactgaaagctttcgcgttgctttttctcgcgtgcctggaacctgacgcacgcgcactccagtttttttatgacctacgattttgcaatctgggcttcttgttcactccactgcctctatccattgagtactgtatcgatattgttttttaagattaatatatttcaggtatttaatacgaaatgtggaagggaatgctggagtaaaatatcccctctcccctccgcccgcccacccgcccgcccgctcgcccgctcgcccgctcctgtggtttttctgagcgtgcgggcgccgggaggggatgctgaggctgatggagctgcctccagggctagggccactcaccggaggagggcggggcctgcacttgaagtcaggccgcacctgtctgtttttggaagggtagccgacaaatccttccagagggaaagttctttgtttaagtgttgtacttgaaaaggtcaatcttcagggcttcctgtttgaagtcaagtcagaggtaaaccggtcagttacagaagcaggatttctaggatttctaactccagctgttcccatactgtctagtttaaattatggctgttaaggccgggcgggtgactcaggcaggtaatcccagaactttgggaggcccagacagaaggatcgcttgaggtcaggaatttgagacctggccaacatggtgaaaccctgtctctactaaaaaaaaaaaaaaaaaaaaaaaaaaaaaaaaaaaaatgagtcgggtgtggtggtgtgcacctgtagtcccagctactcaggagttctgagatggaaagattgcttgaacccaggaggcagaggctgcagtgagctgagatcgcgacattgcactctagcctgggtgacagagtgagattccatctcaaaataaataaataaatattaatacattatggctattaaggctgggcacggtggctcatgcctgcaatcctggcactttgggaggctgaggggggaagatcacttgagcccaggagttcaagaccagcttgggcaacatagcaaggacctcatctctacaaaaaataaaaaggacgtggtggtgcacatctgtaaacccagctactcaggaggctgaggagggaggatcacttgagcccaggagttcaagatcagtttggaccacatagcgagaccctgtgtctacaaaaaataagaaaatcagccggacatgatggtgcacacctgtaatcccagctactcgggaggctgaggcaggaggatcgctggagcccaggagttcaaggctgcagtgacctatgatcgtgccactgcactccagcctgggcagcaaagtgagactctgtttctaaatagacagatagaagataggtagatagatagattaaatagaaagtaaactatggctgttgaggtttacagttggcaggagtggagtggtttggcgtttatctctagaccgtgctggatgacagtacccagtgtcaccaagaagaggctccgtgtgactgtctctgtggctttctggttggtttagctccagtgccttcaccctcaaggacacgactgaccttgaaccctcaggtttgatgggccctgtcttgataaaagtgtcagaggaggctctggaaacatctggctgaaactcctttgctatttctgcttctaagctgtagttggagagatggttgcaatcatttcgtggtgtcgggcaccctgcttgacctgtcttcctcgtgtgtggtatttgtcaccactgcccagtccctggttgctggccacgctcagttgggacataccctggtgtcctctgtgtgtggtgtccctgtgtttcccaggctcaggtgggcttgtgtgggtcttggcccccagtgcctgctagcctcaggtgtcccctgtgttagacacctcctgccttcctttctgaagcttcgctttcttttatttttgttttgttttgtttttggagacagggtctcgctctgtcatccgggctggaatacactggtgcaatcacagctcactgcagcttcaacctcctgggctcaagtgatcttcccatctcagactcccaagtagctggggttacaggtgagcgccagcctgcccagctagttttttattttcagcagagatgaggtctcactgtgttgcccaggctgctctcaaactcctgggctcaagtgaccctcctgcatcaccctcccaaagtgctgggattacaggcatgagccatcacacctggcccctccaagttttttattatgataaaaatgtttaattttaaacgtaccatcttaaccattgttaagtgcactgttgtgtggcattaagcacattcgtattgtcgtgccaccaccaccatcatctccagagctttctcatcttcccaaactgaaactctgtccccattcagcactcgctccccattggtagaaggcagcagcttccactctctgatttctactacccgagctccctcagaaatggagtcacacagtattggtccttttgggactgaagtacttcacctcatgcaatgtcctctaggttcatcggtgtcgtggcaggtgtcagaactaacttcctttctgaggcggaataatgtcccattgtgtggaagaggcatggtttgtttatctgttcatcagttggtggacactgagttgcttctgccttcctgcgaatgtgaattgaatgctgctgtgaacagggtgtcagtgaatctgctgagggcttgttttccgtattctgggcatggccctttgtgtctgcctttgctggagcacctccccgggatgcgtttgtttataggatgttcagacgaatgtcagaacccactgggcggttcactcactgaggggggcccgcgtcccctccatttctgcattcccagttcttggtatggttcctctgaggttcggttttcctgagcacctggggtgtttgcagggatgtggaggggttcctgcagaagacaccacccacatccacgcacctgctcagattcccgggccatggtcggggccaccgcccgtggggatgactccggatgggagtggcagaaaagggcctgctgggccgaggggaggcgtctccgggaagagagggaggtgtgagcggggagaacccactttgattcttcgctgtttgcctgatgcgcagcaccacactgcgtagagacctttggctctggttttttctttttccactgaaacacagcaaattatacattttatgaaaattggcatcgtacaactggaaaatttaaccataaacttaaaactcttttaccctgttggcccccatcctccagctgtgtccacactttgagcacagtcatgagaatgacttggttgggtgcggggtggtgtcacaaagccctgtctcttgtgtgatggctgcgcctcgaatcagtgggagggcacctcgcccgtttacagttgggcaatgcttgggctgggcggcctggctgctcctggactcgcctcccagcgtctgatgctgtgtattttccatctgccccaggaatttgacacaggtgtgacttgcaggttgtgtgggtgatgcctccctccctctttcctcttaaagcatctcatgcttcttcattcgctgatacttacaacccccagtggatatttagtggagtttgctgtagtgcttttgccatttatttggactattggaaaaatttcaggtttggttttggccctatgtcttgatggagggcaagggttaggatttcagtttatcttcccggtgaggtctgagcacgtctgtgccctgaggtgggtggtttggtgaaggtggggctttaacctagctctgccacttaggaatcagaacacacacacacacgcgcgcacacacacacacacacacacactctctctcacacacacatcgggatatttttcttgtttccttcttccagagggtgtaggagttgtgttccaagtttgttcctgcaaaccctccgatgaggccagctgcattcatcggggcctggatggccgcacctctctctccccgccctgtctcctgcactcaggtgagaggctggcagggctgccgtaggggtggagagtgaacgcagggtggctaagccctcgtccctgtgagggacagtgacacggatgggagcagccatctgagctggaagctgtggacatggtccttgtgtgggtccaagcaaagtgggtggcgtgtgcattttgtgaacacgtggtctgcttcctggtgcagaccaggtctccccagagggaccctcctgagctgagctgcccggggcacctgtccctggatgtgaactgccttggttgtaccttggtggggggacctttcctgaatgtgttggttcggcatggtgacaggtgtttccctgcggcagaatgttggggccacaccaacgtccccagagtcttctccctagagtctctgaaaggaagcctgggttcctggtggtgctcccctccatgtgtgctcacccgcctgtatggaggcagcccaggggagcggctgagactcttggcagagagctggggacgctctgttctcattggcagccccaccctgaagaataacagactcccaaatatcacacaggctgcagataccacccagcccccaaggatgccatcaccaggctggggcgctcccatgcccattatccaggggtaatttttgctcacttatttataagccacacatcctcttctatcctaccaaacctaagaatatcaaaagggaaagcttggcttgcatggacgtaattaacctaaaagtctttaaacgtttctcccgagtgttggagtgactgtttgcacacatctgttgtgttttgcctgtgtgcattcctcctcctggtcagagagcccgtctcttccgccctctcccttaccctaggagggctgagtcaggcctccctacccaggcccaagggcagatgcacctgagccattgtgtcccatggttgatacgggacggggctgatttcctgacctggacccctgagacccagtgctcttagctgtgagcctctgggaagaggttctggcaggtggaggggatggacgttacagtgctgtggccacctagaaaagccgtcccggaactgagaccaactgctgagggaggaagggccaccagatcgggggccgggccggggtgagcacctgaagccggctccacctgctcttctcagctgtgcgcctccaggaatttgcactcgcttcagctgatttgggttggatttctagcgtttcacatacaggatctagactcgcacacaactgcattaatatgttggtgtttgataaactagggttgaaggagttccatcagtgaagagagaagccacgtgacctgaggatgcagggcactgttcacgtggacatgagccgtttcttagcatcatgagattttagaaacatgttcttactctgccaggacccagggataggtgaggctctcctattgggataccatttcaccagcagagagattaattggagaatgtgtaattttttcccctttggaaataatttgttcttttttttttttgacagagtttctttctgtcatccaggctggagtgcagtggtgtgatcatagctcactgcagcctcgacctcctgggctcaagtggtcctcccacctcagcctcccaagtagctgggactacaggcatgcaccaccatgcccggctaatttttacatttttggtagaggccgggtacggtggctcatgcctgtaatcccggcactttgggaggccgaggtgggtggatcacgaggtcaggagatcaagaccatcctggataacatggtgaaaccccgtctctactaaaatacaaaaaaattagccgggcgtggtggtgggcgcctgtagtcccagctactcgggaggctgaggcaggagaatggcgtgaacccgggaggcggagcttgcagtgagcggagattggcgccactacactccagcctgggcgacagagcgagactccgtctcaaaaaaaaatttttttttttggtagatacggggtcttgctttgtcacccaggctggtctcaaactcctgagctcgagtgctccttctgcctcagcctcccaaagtgctgggattacaggcgtgggctgctgtgcccagcaggaataatttctcagtgcatctctgatggggaggctaatgaagaaaggacacctggtttgaaggcttctctgtgtctgtccgtgggcgctactgatctgagccaagcaccattccgcaggcatgcctgaaatgactcccatggctgtcatggtgccatctggagagcatttgctcactgtaatggtcccgtcacacttgtctgatgaggatctgttggttgactttgacagtgataaacgaacacagcctatctgggtgttttttgcacttatagtttgggggtttgaagtactggctagaagctggcggggtgtgtgtgtgcaggtgtgcgagtgcatgtgcaagtgtgcgtgcaagtgtgagtctgcacttgtgtgcaagagaatgtgtgtgtgtgtgtgtttggagatttggacttgaaaattctagctcaggtctttggggtagtgtttgacctgaactctgaaaggcagagggtcccagactttcctgggatgatgggaactgggcaccccagatgaggctcggttgtgagtaggagcggggtgggccaccgaagagaagacagagtgggcctgtagggccagcccgaggtacccacagtggagggtctacaggctgatttgggaggtggtggtttatacctgtagtcaccttctatcttagttaggaattcaccttcacacttccagaaactgccaagaagaatgccgccgctcaggtttatctggtagaataagctgtttgaacaaagatctggaggttgcacaatcctgtgtcattctggatttatcttggggtcgggagtcaacgatacttcttgtgctgtcgtttctccggccgtgtgaagttaccacctcgtgagtggtcataagttagcgtgtctaaatgcactttgaaatcctaggatgaaaaagccaggccctgtcttttttccttgtctaagcaccatccttgcttaggagagacacggctgtggctctcaggctgtggggcaatgttctgcttataatgtttcaagaggttcaaagcgtgcaggccccatgctccgtgagagccttgacctgggtcagcaggggcggctgggcttgactcgagaattcccacagggcccgagggaagagcagagcaagagggaggagcgcgtggagccctatgtggcctgcgatattggggtggcgtccaggcccgcctagatgggggagggagacaacagagctgccacctgctcaccgcagacccaggggcccaggaggagcggactaggaccggcagtgccttccagcctaggtctcctgcccctgggctggagttcatcttttaggcaaatttggaataggaaccttaaaaatgctttcttcactcgtttaaatagtaatgataagaatatggctgcagggggcagcttatgcctgtaatcccaccattttgggagctcaaggcaggagtattgcttgagcccagaagtttgagaccagtctgggcaacatagtggaaacttgtctctccaaaagctaaaagaaaaagccgtgcatggtggtatgcacctgtagtcccagctacttgggaggctgaggtgggaggatcgcttgagtctgggaggtcgaggctgctgtgagccatgattgcaccactgcattccagcctgggtgacagagcaagatcttgtcttaaaaaaaaaaaaaaaaaaaaaggtgttgtattttatcattagaaggccatcctgtttagaagagtgggtttctcataagaaaaaaaagaaaaaggttgaccttgtaagtatattttcttgggtgaattgtggtggtggtaatggttttaactggtgttaatttcagttcttttaaaagttgtggtaagatacatgcaacataaaatgtgccctcttccccatttttaagtgaacagttcagtggcattaagcacattcagtttgcctgccaccgttaccaccatccatctccaaaattctctccatttacaaaactgaaactctgtccctattaaacactagctccccattccccactgtgccgcccccccaaagcccctggcaccaaccattctacttcctgtctctgagtttgactagggacctcctgtaagtggatttgtacaatatttgtccttttgtgtctggcttcttcatgtagtataatgtcttcaaggttcattcatgttgtagtcaggatcaccttccttttaaaggttgaacgatatcccgttgtatggacagaccacattttatccattcacccagggatggacacctgggttgcttccatctctcggctcttgtgaataatgctgctgtgaacacgggtgtgcagatacctgttcaagtccctgctgttttcttttgagacggagtctcgctctgtctcccaggctggagtgcggtggcaccatctcagctcactgcaagctccgcctcccaggttcaggccattctcctgcctcagcctcccgagtagctgggactacaggtgcccaccaccacgcctggctaattttttgtatttttagtagagacggagtttcaccatgttagccaggatgctctggatctcctgacctcgtgatccacccacctcggcctcccaaactgctgggattacaggcatgagacaccacgccccgccgagtccctgcttttaattctttggggcagggatccccaaccccctggtgatggaccaatactggcctgcggccccttaggaactggactgcacagcaggaggtgagcggcaggtgagcgtgcattcccgccggagccccgcctcccgtcagatcagcggcggcattagattctcataggagcgggaaccctcctgtgaaccctgcataccagggttctccatgcaacaatctaatgcctgatgatctgaagtggaacaggtttttgttttttttttccagacagagtcttgctctttcgcctaggctggagtgcagtggcatgatctcggctcactgcaacccctgcttcctgggttcaagtggttctcctgcctcagcctcccaagtagctgggattacaggtgcccgccaccatggccagctaatttttttgtttatttgtttatttattattttttgaggtggagtcttgctgtcacccaggctggagtgcagtggtgcaatctcagctcactgcaacctctgccttctgggttcaagccattcttgtgcctcagcttcccgagtaggtggaattataggcgtgtgccaccatgcccagctaatttttgtatttttagtagaggcgggatttcaccatgttggccaggctggtctcactcttgacctcaagtgatctgcccgcctcggcctcccaaagtgttgggattacaggtgtgagccaccgtgctcagcctgaagtgaaacagtttcatcccaaaagcatatacctctgccccatccatggaaaaattgcctctcatgaaaccagtccctggtgccaaaaaggttggggaccgcggctctggagtatatgcctaggagtaggagtgtggggtcatatggtaatttatctttaatttttggaggaattgaatttcaattcttattattaccaaaaatacttaaaattcttacagatggcatgggaaagtagcacacagtcgggactctgcagccgagtttgcctccttgaatgcacacataacacaggaacaaagacagagctgcttccctcctgttgggtctctggcggacagtcaggtatgctgagggagacactgttctcaaactccaggccagggtggtttccggagggtccaccggtggtctcatctcttctctctcaaaccatggatggtgccttttaaagaaaatgacaccggccaggtgcggtggctcatggctgtaatcccagcactttgggaggccgaggcgggtggatcacctgaggtcggaagttcaacaccagcctggccaacatggtgaaaccccgtctctattaaaaatacaaaaattaggccgggcgcggtggctcacgcctgtaatcccagcactttgggaggccgaggcgggcggatcacgaggtcaggagatcgagaccatcccggctaaaacggtgaaaccccgtctctactaaaaatacaaaaaattagccgggcgtagtggcgggcgcctgtagtcccagctacttgggaggctgaggcaggagaatggcgtgaacccgggaggcggagcttgcagtgagccgagatcccgccactgcactccagcctgggcgacagagcgagactccgtctcaaaaaaaaaaaaaaaaaaaaaaaaatacaaaaattagctgggtgtggtggtgggcacctgtaatcccagctactgaggaggctgaggcatgagattcgcttgagcctgggaggcagaggttgcagtgagctgagatcgcgccattgcactccagcctgggcaacagagtgagactctgtctcaaaaaacaaacaaaaatcaaagtgccaacctctgggctgtcccctcctggcctgccttgttcctgagctcaccagggtccttcactctgtggcactggcctcagccagcaccaaggctgaaagagcccattcagaggccagaaagaaactgttaggctctgaagccgtgggccaggccaagacagagattctgaggcatggttctggaatgggtttttccgcccacaggcactcaaggaggacagcattgggagatggctgggtggagagtctgcgggaggctacaaggcaaaaatcccctactccccctgggctccttcacagtttgtgtgtcctcacagagcaaggaagttctgtgagcctcattcaatcatctgaggttcttcccaggaaaattatagtgggaactctggctttgatgaaactgcttttttttcaaagcagtttgcaaaataaccggggccttaaaaaacaatctggatgaaatggtttttgccatttcaattggttctcttccaacgtgtcttccttccagtaggtttccagaatattttggtttcaaaatttgggggcacagatttgcaaagtggatttcaacatgtcgggtttcaaagggggctggctttgaaagtggtctgggcttctaaaaggtttgattgaaaactggtttggttctcagacattccagaagcttctcccggagtccagagcctcccagtggtgctttgggaagggggccaggcagggcgtcctggtgagtggacgtagggtgggcagggccacccttgtcctgggatgttgtggaggacttggcacgccctgtctcaggcctggctctggctctgggtggatgttttgcatcttcagaaaaaagctcctgtgggatatttctcctccagccgaccccgccccccagggcattcgagaaaagggtgcttgtctcttggtgagagggccacggttccttcagtttctccgttcctacgggcctctttctttttcctttttgagacggaatctcactgtgtcgcccaggctcactgcaacctatgcctcccgggttcaagtggttctcatgcttcagcctcctgagtagctgggattacaggtgtgtgccaccacatccagctaattttttgtatttttagtagagatggggttttcccatgttggccaggccggtctcgaactcctgacctcgtgatctgcccacgttggcctccaaagtgctaggattataagtgtgagccaccacaccaggcccgtttcatccctgcctcagcctgcatgccaagctccctgggtgcccgcccacaggtgtcaccctttaaggagaaagtggcctggggctggaaacaggactttgtagggaaggacagcgcgtgtgagaaaaggcctgttgatgggcacgccagggtttaatggacggctctttgaagtcatgggctgagccagaaggaattgtcatgatgtcagtctcatttccagatggggaaagggagacccaggctgcggtgacccactgaggcacaggatcagtgagaacccagccctggctttgcccagacctctcaagggcacttcgtgggaccattgccggccgttgtggcatctgtccctggccttgcccccatccgtctctgcacagcccaggtgggtccgagccagccccaggtctccagggtcccagcccagcctctagaagagccagcagcagggctggaagggagagcacatgctgggccttggggctgccttggacctcaggccgttgacaaggaaaagcggagagttgggaaaaaaggacaaatagctgagcgccagccgcagtctgggggacgggagcctcgtgcgactctcggagtgctggccagattggcagaggggaggagagaggaaaaacccaggctctgaggaaaaacctctccagcccagcgcgtggcctggcattaacccactgcagccccaggaagtggttccaccccaggcagccaacaaggcggtgcctgaactatgtctgtggatgacggagccacgacctgtccctcagggctcagcgctgcggctatgtccagggacccctggctgtgcccacgtcggggcttcccgttccttacctgccatgagaatgagatgtccagggacctccctgctccagctgggacctgtggggctttgtctgttgtcccgagcaccttggagatgtcatttctaacattttaacccaggaatccccccaccaagggacagagtgcaaggacatgatcgaacagaaaaagttctggtacaagatcaaccccgtggggtggtgagtgctgcagccccgggcctcacatcctgccgtccctgtgggagattggagcggtcccagtgcccaccgctgattctctggctccagcaacccctccaggtggatccgtcccacgcagcctggcctgaaacactgcccagccactgggtccagtaagacagagcctcgagtcattctgccaagaggatccagaaacacagactttttctggggtcctggaggcttctggcccatggggagcccctgggtcccagcgatccagccctgatgtgctgagggtgcagggcccagctgcagagcagaggagagtggcccccagggaccagcagcacgaaaggcacactgaggcacactggcaggcctgggctgcagagagcctgaaggtcatggggtagctggtggaagcaggaagaccccatacagcagcgaccactgaggctggtgctgcactttctcagggaattgagtgtgggctcccaccatcccggccactggcttcctccaaagcctcctcctcttacatcagcaaaccttctgttcggtgaccccctcagtgaccctctgtgcttgccttcgtggtcttcctcatggaggatttcgggtcagcgtgggggtcagaggtcatttcccataccccctcaaaggtacttcttgctgtggtccccacactctgacaccctcttctgaaatgaacacttttttgttgttgttgttgagacagagtcttgctctgtcgcccaggctggagtgcagtggcacaatcttagctcactgcaacctccacctcccaggttcaagcgattttcatgcctcagcttcccgagtagctgggattacaggcatgtgccaccaagcccagctaatttttgtatttttagtagagatgaggtttcaccatgttggccaggctggtctcgaacttctgacctcaagtgattcgcccgcctcggcctcccaaagtgctgggattacaagcatgagccactgcgcccggccacaaacacttttttttttttaaacaagtgaaaacaagtttattaacaaagttaagaaataaagaatggctattccatagggagagcagcctgaataaacactttttttgttgttgttgaggcagagcctcactctgtcgcccaggcaggagtgcagtggtgcgacctcagctctcagctccctgcaccgtccacctcctgggttcaagcgcttcttccccaagtagctgggactataggcacacaccaccatgcccggctaatttttctctttttagtagagacaggatttcgccatgtgggtcgggctggtctcgaactcctggtctcaagtgatccgccctcctcggccttccaaaatgctaggattacaggcatgagccgccgtgcctggccacaaacatattttaaatttgaacaataaaggaactggaccaggaagtgtggagttggggagaccctgctctcgccaggtgccttcccggcaggttgtctctgcctccccttgcaccccttgaatggcgggctccctctcccatagcccctgccaggctggataaccaacttcattcttatacccgtccgaatctgccccctgttaatggcacccaccagtccttgtccaaacctcgaagctcaggacctcacagagcaccacgtcctcttctgtgtcatatgcagctggatctcagtaaatggcaatgtcttctct

SEQ ID NO: 114110 - DNA, 921 bp, Homo sapiens
  Payload ID: 2295
  Gene Symbol: CHST12
  Gene Name: carbohydrate (chondroitin 4) sulfotransferase 12
  ENST ID: ENST00000432336
  CDS Start-End: 186-921
ggatccccagctcccgagggcccccgtgtgcctgctgtcacctgaacggggctccccggccccgccgaccgcagccctggagcctgcagacgccagcagcaccggcaggttcccagcaggatgccccggctctgcaggaagctgaagtgagaggcccggagagggcccagcccgcccggggcaggatgaccaaggcccggctgttccggctgtggctggtgctggggtcggtgttcatgatcctgctgatcatcgtgtactgggacagcgcaggcgccgcgcacttctacttgcacacgtccttctctaggccgcacacggggccgccgctgcccacgcccgggccggacagggacagggagctcacggccgactccgatgtcgacgagtttctggacaagtttctcagtgctggcgtgaagcagagcgaccttcccagaaaggagacggagcagccgcctgcgccggggagcatggaggagagcgtgagaggctacgactggtccccgcgcgacgcccggcgcagcccagaccagggccggcagcaggcggagcggaggagcgtgctgcggggcttctgcgccaactccagcctggccttccccaccaaggagcgcgcattcgacgacatccccaactcggagctgagccacctgatcgtggacgaccggcacggggccatctactgctacgtgcccaaggtggcctgcaccaactggaagcgcgtgatgatcgtgctgagcggaagcctgctgcaccgcggtgcgccctaccgcgacccgctgcgcatcccgcgcgagcacgtgcacaacgccagcgcgcacctgaccttcaacaagttctggcgccgctacgggaagctctcccgccacctcatgaaggtcaagctcaagaagtacaccaagttcctcttcgtgcgcg

SEQ ID NO: 114111 - DNA, 2131 bp, Homo sapiens
  Payload ID: 2295
  Gene Symbol: CHST12
  Gene Name: carbohydrate (chondroitin 4) sulfotransferase 12
  Uniprot ID: Q9NRB3
  ENST ID: ENST00000618655
  CDS Start-End: 192-1436
gctcctgcgccgggggcggggccggcgagggctgcctctggggggtccgctagtcgcggggcggcggcggcggctgcgggcgcgaggtgaggggcgcgaggtgagggtcgcgaggttcccagcaggatgccccggctctgcaggaagctgaagtgagaggcccggagagggcccagcccgcccggggcaggatgaccaaggcccggctgttccggctgtggctggtgctggggtcggtgttcatgatcctgctgatcatcgtgtactgggacagcgcaggcgccgcgcacttctacttgcacacgtccttctctaggccgcacacggggccgccgctgcccacgcccgggccggacagggacagggagctcacggccgactccgatgtcgacgagtttctggacaagtttctcagtgctggcgtgaagcagagcgaccttcccagaaaggagacggagcagccgcctgcgccggggagcatggaggagagcgtgagaggctacgactggtccccgcgcgacgcccggcgcagcccagaccagggccggcagcaggcggagcggaggagcgtgctgcggggcttctgcgccaactccagcctggccttccccaccaaggagcgcgcattcgacgacatccccaactcggagctgagccacctgatcgtggacgaccggcacggggccatctactgctacgtgcccaaggtggcctgcaccaactggaagcgcgtgatgatcgtgctgagcggaagcctgctgcaccgcggtgcgccctaccgcgacccgctgcgcatcccgcgcgagcacgtgcacaacgccagcgcgcacctgaccttcaacaagttctggcgccgctacgggaagctctcccgccacctcatgaaggtcaagctcaagaagtacaccaagttcctcttcgtgcgcgaccccttcgtgcgcctgatctccgccttccgcagcaagttcgagctggagaacgaggagttctaccgcaagttcgccgtgcccatgctgcggctgtacgccaaccacaccagcctgcccgcctcggcgcgcgaggccttccgcgctggcctcaaggtgtccttcgccaacttcatccagtacctgctggacccgcacacggagaagctggcgcccttcaacgagcactggcggcaggtgtaccgcctctgccacccgtgccagatcgactacgacttcgtggggaagctggagactctggacgaggacgccgcgcagctgctgcagctactccaggtggaccggcagctccgcttccccccgagctaccggaacaggaccgccagcagctgggaggaggactggttcgccaagatccccctggcctggaggcagcagctgtataaactctacgaggccgactttgttctcttcggctaccccaagcccgaaaacctcctccgagactgaaagctttcgcgttgctttttctcgcgtgcctggaacctgacgcacgcgcactccagtttttttatgacctacgattttgcaatctgggcttcttgttcactccactgcctctatccattgagtactgtatcgatattgttttttaagattaatatatttcaggtatttaatacgaaatgtggaagggaatgctggagtaaaatatcccctctcccctccgcccgcccacccgcccgcccgctcgcccgctcgcccgctcctgtggtttttctgagcgtgcgggcgccgggaggggatgctgaggctgatggagctgcctccagggctagggccactcaccggaggagggcggggcctgcacttgaagtcaggccgcacctgtctgtttttggaagggtagccgacaaatccttccagagggaaagttctttgtttaagtgttgtacttgaaaaggtcaatcttcagggcttcctgtttgaagtcaagtcagaggtaaaccggtcagttacagaagcaggatttctaggatttctaactccagctgttcccatactgtctagtttaaattatggctgttaaggccgggcgggtgactcaggcaggtaatcccagaactttgggaggcccagacagaaggatcgcttgaggtcaggaatttgagacctggccaacatggtgaaaccctgtctctact

SEQ ID NO: 114112 - DNA, 1789 bp, Homo sapiens
  Payload ID: 2296
  Gene Symbol: CHST13
  Gene Name: carbohydrate (chondroitin 4) sulfotransferase 13
  Uniprot ID: Q8NET6
  ENST ID: ENST00000319340
  CDS Start-End: 51-1076
gcccccagccgtatccagcggactgtcctccgccgcgcgcccggcacagcatggggaggcgctgctgccggcggcgcgtgctggcggccgcctgtctgggcgccgcgctcctgctcctatgcgccgcgccccgctccctgcgcccggcatttggaaacagagccctgggctccagctggcttggtggggagaagagaagccccctgcagaagctctatgacctggatcaggacccgcgctcgaccctggcgaaggtgcaccggcagcggcgcgacctgctgaacagcgcctgtagccgccactcacgccggcagcgcctgctacagccggaggacctgcggcacgtgctggtggacgacgcgcatggcctgctctactgctacgtgcccaaggtggcctgcaccaactggaagcgcgtgctgctggcgctgagcggccaagcccgcggcgacccgcgcgccatctccgcgcaagaggcgcacgcgcctggccgcctgccctcactggccgacttcagccccgccgagatcaaccggcgcctgcgcgcctacttggccttcctgttcgtgcgggagcccttcgagcgcctggcatcggcttaccgcaacaagctcgcgcgcccctacagcgccgccttccagaggcgctacggtgcacgcatcgttcagcgcctgcggccgcgcgcgctccccgacgcccgggcccgcggccacgacgtgcgcttcgcggagttcctggcctacctgctggacccgcgcacgcggcgtgaggagcccttcaacgagcactgggagcgcgcgcacgcgctctgccacccgtgtcgcctccgctacgacgtcgtgggcaagttcgagacgctggcggaggacgcggccttcgtgctgggcctggcgggcgcatccgacctgagcttccctgggccgccgcggccccggggagccgccgcctcccgcgacctggcagcgcgcctcttccgggacatcagccccttctaccagcggcgcctcttcgacctctacaagatggacttcctgcttttcaactactccgccccctcctacctgcggctgctctagcggtcctggaggtcctgtggccacgcggggcaagtgcctttccgacaagacccccggggaatgcaggtgctgccggccccaggacccctcttcaagagccactgcgtgcactcacctggccgccgggccagcgggcgcagggcacacctggccaggcttgggggcagcccatctcaggtggccctgcacgcgtgtgcctgcctcggcctgtcgcctgaggcctgcttcctccacttgctccagctgacaggcacctctccaggccccgtagatgggcaaggacttgataaccagggttttaggcttttaaaggccattttgggggtcagccctgcccctgaacctgttcatggtgcatcagaacataatgctgacaccggtgtcagtgtggcccgagcctgtgtcctccccacctcgcccaccctggcaaggacagctgcggccaaggacgaaagccctcccttggctggcctcacgatggggccgtcccgggagccaggtgggagctgccttccactgccatcgggtctcctctcctctcccacgcggctggccctacccaggcgccaccttcggtctcagtctggcaagacgctgggtcttcaggctccatgccaacagagcccctggtgcaatgcggtcacaggttttatgggactttggtgagctgggcggtcatggttttgaaataaatgtattttgttactttctga

SEQ ID NO: 114113 - DNA, 1146 bp, Homo sapiens
  Payload ID: 2296
  Gene Symbol: CHST13
  Gene Name: carbohydrate (chondroitin 4) sulfotransferase 13
  ENST ID: ENST00000615522
  CDS Start-End: 1-678
atggggaggcgctgctgccggcggcgcgtgctggcggccgcctgtctgggcgccgcgctcctgctcctatgcgccgcgccccgctccctgcgcccggcatttggaaacagagccctgggctccagctggcttggtggggagaagagaagccccctgcagaagctctatgacctggatcaggacccgcgctcgaccctggcgaaggtgcaccggcagcggcgcgacctgctgaacagcgcctgtagccgccactcacgccggcagcgcctgctacagccggaggacctgcggcacgtgctggtggacgacgcgcatggcctgctctactgctacgtgcccaaggtggcctgcaccaactggaagcgcgtgctgctggcgctgagcggccaagcccgcggcgacccgcgcgccatctccgcgcaagaggcgcacgcgcctggccgcctgccctcactggccgacttcagccccgccgagatcaaccggcgcctgcgcgcctacttggccttcctgttcgtgcgggagcccttcgagcgcctggcatcggcttaccgcaacaagctcgcgcgcccgcgctctgccacccgtgtcgcctccgctacgacgtcgtgggcaagttcgagacgctggcggaggacgcggccttcgtgctgggcctggcgggcgcatccgacctgagcttccctgggccgccgcggccccggggagccgccgcctcccgcgacctggcagcgcgcctcttccgggacatcagccccttctaccagcggcgcctcttcgacctctacaagatggacttcctgcttttcaactactccgccccctcctacctgcggctgctctagcggtcctggaggtcctgtggccacgcggggcaagtgcctttccgacaagacccccggggaatgcaggtgctgccggccccaggacccctcttcaagagccactgcgtgcactcacctggccgccgggccagcgggcgcagggcacacctggccaggcttgggggcagcccatctcaggtggccctgcacgcgtgtgcctgcctcggcctgtcgcctgaggcctgcttcctccacttgctccagctgacaggcacctctccaggccccgtagatgggcaaggacttgataaccagggtttta

SEQ ID NO: 114114 - DNA, 6970 bp, Homo sapiens
  Payload ID: 2297
  Gene Symbol: CHST3
  Gene Name: carbohydrate (chondroitin 6) sulfotransferase 3
  Uniprot ID: Q7LGC8
  ENST ID: ENST00000373115
  CDS Start-End: 438-1877
gccttggacgcggttcaggaatccgccgccgctagccggctcgggcctgagcggggagggcgccaggcaggacctctcgcaggctcgctgcgcaggacggcgcccgcctggcgccgcttcccttccagcgtgccgaccggccccgcagcgcctccatccctccggcccgccccggagaagacgcacagctcgggccgcgcgggcgccggggccgcggaaccgcttctgccgggatcttccaggaggaaagcgaagttgcgagcggatgctgcccgcgccggaccccagccgcggagggtcggggccgccggtggagtctcggcggccggggacaagggtgtcccccacctgaagacggcaagctgggtcctgagtgatgcccctcagctgagtgtccaaggctggcccgaggagcccccacggccccacctttccccatggagaaaggactcactttgccccaggactgccgggactttgtgcacagcctgaagatgagaagcaaatacgcccttttcttggtttttgtggtgatagtttttgtcttcatcgaaaaggaaaataaaatcatatcaagggtctcagacaagctgaagcagattccccaagctctagcagatgccaacagcaccgacccagccctgatcttagctgagaacgcatctctcttgtccctgagcgagctcgattcagccttctcccagcttcagagccgtctccgcaacctcagcttgcagctgggcgtggagccagccatggaggccgcaggggaggaagaggaagagcagagaaaggaggaggagccgcccagaccggccgtggcggggccccggcgccacgtgctgctcatggccaccacgcgcaccggctcctcgttcgtgggcgagttcttcaaccagcagggcaacatcttctacctcttcgagccgctgtggcacatcgagcgcacagtgtccttcgagccggggggcgccaacgccgcgggctcggccctggtgtaccgcgacgtgctcaagcagctcttcctgtgcgacctgtacgtgctggagcacttcatcacgccgctgcccgaggaccacctgactcagttcatgttccgccggggctccagccgctccctgtgcgaggaccccgtctgtacgcccttcgtcaagaaggtcttcgagaagtaccactgcaagaaccgccgctgcggccccctcaacgtgacgctggccgcagaggcctgccgccgcaaggagcacatggccctcaaggcggtgcgcatccggcagctggagttcctgcagccgctggccgaggacccccgcctggacctgcgcgtcatccagctggtgcgcgacccccgggccgtgctggcctcgcgcatggtggccttcgccggcaagtataagacctggaagaagtggctggacgacgagggccaggacggcctgagggaagaggaggtgcagcggctgcggggcaactgcgagagcatccgcctgtccgcggagctggggctgcggcagcccgcctggctgcggggccgctacatgctggtgcgctacgaggacgtggcacgcgggccgctgcagaaggcccgcgagatgtaccgcttcgccggcatccccctgaccccgcaggtggaagactggatccaaaagaacacgcaggcggcccacgacggcagcggcatctactccacgcagaagaactcctcggagcagttcgagaagtggcgcttcagcatgcccttcaagctggcccaggtggtgcaggccgcctgcggccctgccatgcgcctcttcggctacaaactggcgcgggacgccgccgccctcaccaaccgctcagtcagcctgctggaggagaggggcaccttctgggtcacgtaggggggccggggccccgtatgcccctcctcgtgaaaggcctgccccgtctttctgccgcagccctcgcagagggcgggtgcacagcgccatgagcgggcagcgcctcctgtagcagtagggcccccagccagcgctccagccaaagcggcggccccagggttaattgcggagaacaggacagtgcccggtccccttgagggccatcacacccagacccaacgggttgcagcctcctgagcaggcctaggcaggcccgggcctgttggcaagcttcgatctcacacacacagaaacatacattcgtgcctggagaccctgcaggccagagtccaaatatttaacaatcagaaggggcaaggctctgaccagtgacagtcagacctcctgctttatttggtgttaaccgtttcttgtctggatggtgaagtctggaatctgggtgggtccttggaggaggggctaggacagccgtgggtgtcaaaggtggcatttgaggctcgtttgaggtgacagtggctgtttaccaactagtacagagcgattcagcgttttcatgaatgggttggctgtgctggttactgatgaatatgggccccttatagagctgcaaaacacacacatgcgtatagacatacatacatgtacaccatacatagacaagcatcataaaggcacaagtgcacacacatctatgcagacaagcttcctcgctgcttatgcccacagggtttttctgtatgacacacctcagaggagcctgtgcttaacatttgtaggattatttcgagggcagggcaggggaaagaaacgcgttaaagggccatgacatgacacagttccctggccgggtttggactgaacagtggattcagaactgcagcgttcaaagcccctgcccgccttagattctcatggctacctcctctgacccatccacatccttgcggctggcaggcaggatgttttgaaatggtgcagccaaaggccccgtctagcttggctggctcccgaacatgtccatatttgaaggctgcctcaggcctggcaggcagaagcagctgtggtccctggaggcaaaaggcagctcacggggccttccatttccagccaggcctcatctggggtagggccaagaggaaagtacagagtgcccgtgggggagaagtcccaccaggatgccccccctcccctgagaagcccgccttctccctcgtggacaggagtcagccagttggttgctgtggttacagccagtgcctggaattcctccttagggccctgggaagagtattgcttaacgcaggatgtgctgggtgttttgtttcgggcttttatttatggcttggtgtctttcttgtttcatggctgtgtttttgcttttgtttctgtaggagcgcctcttccaagcagtggaggcctgagggcttgagggaggctggggaaaaccagcagggagcacttggctcctggcagagggagaggacaggaggaggagccttccccaggaggaacgaggagaggtggccacgtggcaggccacagtgccctatgggcttttctgtttgaaccccatgtgggatgaatctcaaagccaccagcgttcttgcctagtgtccagagcagcagagatttgcagccctcgcccctccctgagaagaagctggatttgaaaatccctcacaggccctaacatgtttcctgggtgggcaggggcctcatgacaagcgacaagtgtacccagagtagaaggccttccccactcccacctcaaacccaggagcagaactcagtatccagagcttacaaggagctgcaagggtttgccgagggctgcccagctctgcttctggtttcctggacaatttctctgtcagatacggcccattgtaaacccagagggctgcattttgggttgagtaatatggacaccatggaagtacaggatctgagtccaacattgccatgggggagggaagagtgtgtcctggcaggaagccaccattggagaaggtgaggccagtaaccatctcatgggattcgctataatcagcctatttgagctgctgggtctctgtcactgtggactccagtcattcaaggaggtctccactcttgggttttttttattttcttttcttttgctattttgcctgaacaccccaacactcttggttttagagtccaagagtaagttgtgcagagacatggttctaatttggagttcaaaggaacaccagctctgaaaacatgaccgtggggccaggatgtttctggcaggcccagaagtgctggccgttcttccccagcctccccactgctccctcctctgttccccatgtggaggtcggaggggctgggactggggagggggcagccacctccatccaaggctcttcctaggggccctgctaatgtggacagtagactttatccctccttcttactctgggccaagacctcccactccgccctctgaggatggtaccaagaatgggcctttgggacttctcaggacattgacaatgtgcacactgcaggttgacttaatttatttattttttgaaaagaagagacagaaaataccttattatctgcagggactcaaagctgtacccaaatcaagaaagacaaaataacaatagaaaccattcacacactccgttcatgcatggacaccagaagacgattcagaacacaagaggagaatgagctggagcgccagcaccacgatggccccaggacgttgtttaagatctgagatcccttggtttctctcttgttgatctgagatgctacatcagggcccttgctgctgtattacctctgcccgggtgtttgagacaggtcacaagcgcgtggatgtttcctggaagtgtattcccctggggctcagcgatgctctgggaacccttggggtttggggaaggacagtgtggtgtgactattggcttgaaacgttatggatatggttggagtcacccatgtggatatgattttcagcttggagctgggatggagaagatggaagcactggtggccgggcctctttttccagcgaggccagccctggcttctcctctgttccagcttgtctgccagaagccttcccctgcaaggtgcccacctgcccggagacagagggagcagctgaggcctctctccactggccgccagcctccctagcacaaggggaccattcagcaatgagtgtttactcatgttctttcttgttgatgagttctgcggcccagcatatagaaatggctcagaacgttccaggccttggtgagacacagcagcgtccaatgctcacaggctgtccccactctgcctgttcccatcttcccctcgggacctgtttataaattgaggaatggatgagggccctggagggtccttgggagtagttagtggagggcaggattctcaggtccccatagagagggaaagagaagaccagatgtgcatagaagccagtctctgtcacatacaccgcaggtggtcaccgagttattttccaaaagctgaggaacataaagcaaatttaggcttttgtccttctgcaatacatgcacttgaaaataaacagaaaagagatgtttaataacaagtttacttccggtctgctagcaccctcagcctgggagctactgccagaggctggcgtagtggggcagctgctgaccaaaccccacagaacagagggcaccaggcatcacacgacatctttccctcccatctctgccatctgtctgtctggcaatggaaggagcttcagcaggaggtccttcccagaaggttgattcttggcctgggtggtagaggagatatcctgaccctaaagtcttccagccccgggtcatcctctcctatactagggcctattgaccgtagaggccaggtgcggtggctcatacctgtaatcccagcagttggggaggccaaggtgggaggattgcttgagcccaagagttggagaccagcctgggcaacatggtgagaccaattgactgtagggcttgtcccttgctaagacaggagcagaagactggatggctgtgtcctcaaggcagtcccctcccatccccattcccaaagtcagaaagtgaagccagatctcaagggctgatacctgaggcaaggagagctaaggggagagaaattggggctgagtggaagcagatgcctgcacaagccaagtgtgtcttattgatctgtacaagctgatagaaggaccatctgctgaaatccagggctcctgagttggtgggtttgcttgtgaagcttctaggacaaggcgcagccagatggaagggagagggtccagggcttcctaaatgcagccgcatcacctgtcaactcgctgcagtttcagagacagtggaagctgctctttacctcaaaagcacaaagcagaattggcaacttcacttgtctcaagagctccaagatcctttggtctcgtgtcctttggcaccccgtaactggactggggacaaatttgttacgtgtttccaaggctacagacatggcgccatcctcacaggcctagctcatgtcatggatcaggtgctttgctggggggatacaatgacccatgtggtctgcgtcttctgccattggcttgaactgggcaccccctgaagtctccatctcagctgtatattctagtccaaattttcctggctcccctgctccctcccaggtcctgcacactgtctttttgccaacacctcagccctgtttgctatttcatgtctgcatggtacgagacaccccttcacggcatacactgccatggtatgtacatatgcatccacgtgtgtgtatgtgtagcatgtagctcattctgctcagcctctggcgccgttccacattgctcccagccccattgctgtcactgtcgtcccagatgtccttgccatggccacagacaatctgccgtctcctggaaacgctggggctgcccttcagagagctggcagccccagcagtcagggcctgctttgcagaatagaatgtgaacccaactcctgatggcctacttgacttatttaattaaagatgaaatcatgcaatgagcaaaacctgca

SEQ ID NO: 114115 - DNA, 2718 bp, Homo sapiens
  Payload ID: 2298
  Gene Symbol: CHST1
  Gene Name: carbohydrate (keratan sulfate Gal-6) sulfotransferase 1
  Uniprot ID: O43916
  ENST ID: ENST00000308064
  CDS Start-End: 672-1907
gctcggagctgtagccgccgctgccgccgctgctcttggctcggggacgcgggcgggcgctccgagaggctctggtgcctgcggctgctgctctcctccggcgcccggggctgcggcgctccgggtcccggcccctgtcccggcatctctcgggtccctgagccccggccccgggtcccgcgtccggccggagagaacgcactcagctgctcgagccgccccgggctcgcgcccccgggccatgaagaggggcccgtgaggcgcgcgcggagtcggaggaagaggagggaggagggaggccgaggaggagggcgcgggaggcggaggatgccgccgcggctgctgccgccgccgccacccgcgggtccccggcgaccctgactccagacccgaggatggagccggcgctgggcgctgcagctgctcccggcgcgtccccgaccaggtagctggtgtcacttcggtgtggttggaagaagactttctccccagctgcattcccggaggcgccctttcgacctggaggccgggtctgctggccacagggctgccgcactggctgggactgccagctgggcctggagacgctggtggctgtggactccccagcttggagcagtccctctttgacctcaccccttggagaagcagccccatgaaggtgcccagccatgcaatgttcctggaaggccgtcctcctccttgccctggcctccattgccatccagtacacggccatccgcaccttcaccgccaagtcctttcacacctgccccgggctggcagaggccgggctggccgagcgactgtgcgaggagagccccaccttcgcctacaacctctcccgcaagacccacatcctcatcctggccaccacgcgcagtggctcctccttcgtgggccagctcttcaaccagcacctggacgtcttctacctgtttgagcccctctaccacgtccagaacacgctcatcccccgcttcacccagggcaagagcccggccgaccggcgggtcatgctaggcgccagccgcgacctcctgcggagcctctacgactgcgacctctacttcctggagaactacatcaagccgccgccggtcaaccacaccaccgacaggatcttccgccgcggggccagccgggtcctctgctcccggcctgtgtgcgaccctccggggccagccgacctggtcctggaggagggggactgtgtgcgcaagtgcgggctactcaacctgaccgtggcggccgaggcgtgccgcgagcgcagccacgtggccatcaagacggtgcgcgtgcccgaggtgaacgacctgcgcgccctggtggaagacccgcgattaaacctcaaggtcatccagctggtccgagacccccgcggcattctggcttcgcgcagcgagaccttccgcgacacgtaccggctctggcggctctggtacggcaccgggaggaaaccctacaacctggacgtgacgcagctgaccacggtgtgcgaggacttctccaactccgtgtccaccggcctcatgcggcccccgtggctcaagggcaagtacatgttggtgcgctacgaggacctggctcggaaccctatgaagaagaccgaggagatctacgggttcctgggcatcccgctggacagccacgtggcccgctggatccagaacaacacgcggggcgaccccaccctgggcaagcacaaatacggcaccgtgcgaaactcggcggccacggccgagaagtggcgcttccgcctctcctacgacatcgtggcctttgcccagaacgcctgccagcaggtgctggcccagctgggctacaagatcgccgcctcggaggaggagctgaagaacccctcggtcagcctggtggaggagcgggacttccgccccttctcgtgacccgggcggtgcgggtgggggcgggaggcgcaaggtgtcggttttgataaaatggaccgtttttaactgttgccttattaacccctccctctcccacctcatcttcgtgtccttcctgcccccagctcaccccactcccttctgccccttttttgtctctgaaatttgcactacgtcttggacgggaatcactggggcagagggcgcctgaagtagggtcccgccccccccccccccattcagacacatggatgttgggtctctgtgcggacggtgacaatgtttacaagcaccacatttacacatccacacacgcacacgggcactcgcgaggcgacttctcaagcttttgaatgggtgagtggtcgggtatctagtttttgcactgtcttactattcaaggtaagaggatacaaacaagaggaccacttgtctctaatttatgaatggtgtccatcctttccccatccctgcctcctgcccctgacgcccatttccccccttagagcagcgaaactgccccctcctgcccgcccttgcctgtcggtgaggcaggtttttactgtgaggtgaacgtggacctgtttctgtttccagtctgtggtgatgctgtctgtctgtctgagtctcgtggccgcccctggaccagtgatgactgatgaatcttatgagcttctgattgatctcggggtccatctgtgatatttctttgtgccaaaaagaaaaaaaaagagtggatcagtttgctaaatgaacattgaaattgaaatgctttatctgtgttttctgtaaataaaagagtgcaataatc

SEQ ID NO: 114116 - DNA, 3574 bp, Homo sapiens
  Payload ID: 2299
  Gene Symbol: CHST14
  Gene Name: carbohydrate (N-acetylgalactosamine 4-0) sulfotransferase 14
  Uniprot ID: Q8NCH0
  ENST ID: ENST00000306243
  CDS Start-End: 217-1347
tccggcccgggtccctcgccgcgcccgccgcccgccgcccgcttcggcgccgcagcccgggagccggccacccctacacgcgccagggctgtcccctgccctcccctccccaactacccccggtcccagaccctcctcccgcccccagcccgagcccgccttccaggccgccctcggatcggccgggcccgcgcaggcccccaccccttgagcaccatgttcccccgcccgctgaccccgctggcggccccaaatggcgccgagcccctgggccgggcgctgaggcgggcccctctgggcagggcccgggcggggctgggtgggccgcccctgctgctgccgtccatgctgatgtttgcggtgatcgtggcctccagcgggctgctgctcatgatcgagcggggcatcctggccgagatgaagcccctgcccctgcacccgcccggccgcgagggcacagcctggcgcgggaaagcccccaagcctgggggcctgtccctcagggctggggacgcggacttgcaagtgcggcaggacgtccggaacaggaccctgcgggcggtgtgcggacagccaggcatgccccgggacccctgggacttgccggtggggcagcggcgcaccctgctgcgccacatcctcgtaagtgaccgttaccgcttcctctactgctacgtccccaaggtggcctgctctaactggaagcgggtgatgaaggtgctggcaggcgtcctggacagcgtggacgtccgcctcaagatggaccaccgcagtgacctggtgttcctggccgacctgcggcctgaggagattcgctaccgcctgcagcactactttaagttcctgtttgtgcgggagcccttggaacgcctcctctctgcctaccgcaacaagtttggcgagatccgagagtaccagcaacgctatggggctgagatagtgaggcggtacagggctggagcggggcccagccctgcaggcgacgatgtcacattccccgagttcctgagatacctggtggatgaggaccctgagcgcatgaatgagcattggatgcccgtgtaccacctgtgccagccttgtgccgtgcactatgactttgtgggctcctatgagaggctggaggctgatgcaaatcaggtgctggagtgggtacgggcaccacctcacgtccgatttccagctcgccaggcctggtaccggccagccagccccgaaagcctgcattaccacttgtgcagtgccccccgggccctgctgcaggatgtgctgcctaagtatatcctggacttctccctctttgcctacccactgcctaatgtcaccaaggaggcgtgtcagcagtgaccatgggtgtggggccagcagctggtggggactggtttcaacgccagctttctgtgcttctgcctgtcattcggagaaactctggctctggggcttggggcttctcaggatcctggatggcagagactgccctcagaagttccttgtccagggtgggcacccacagtgactcagaggacagggctaggcaggagacctgctgctcctcattggggggatctcttggggggcagacaccagtttgccaatgaagcaacacatctgatctaaagactggctccagaccccgggctgccaggattatgcagtccacttggtctaccttaatttaacctgtggccaaactcagagatggtaccagccaggggcaagcatgaccagagccagggaccctgtggctctgatcccccatttatccaccccatgtgcctcaggactagagtgagcaatcataccttataaatgacttttgtgcctttctgctccagtctcaaaatttcctacacctgccagttctttacatttttccaaggaaaggaaaacggaagcagggttcttgcctggtagctccaggacccagctctgcaggcacccaaagaccctctgtgcccagcctcttccttgagttctcggaacctcctccctaattctcccttccttccccacaaggcctttgaggttgtgactgtggctggtatatctggctgccatttttctgatgcatttatttaaaatttgtactttttgatagaacccttgtaagggctttgttttcctaatagctgactttttaataaagcagttttatatataaggcgagcatttctgtgatttcccttggagctcctgtgggcccagcagatctcctcgatgtctgtcttcccatgtcaggggaggcagcctgtagatagagaaagtaaggtataacttggttgggctggtccaatgggccgttgccattccatggagactttgggggctttctaataggctataccagatcacagactcagatcctgggatgtcaccaaagggcaagcccagttaggaatggcctcacgtccagagcatacctacatgtattattccctaaaaaagtaggtgggtaggagatacgggatcctcctcttattcaataagagttgaatgagaagttcccccagagcattttctttctttcttttttttttttttttttttgagatgaagtctcgatctgtcacccaggctgcagtgcagtagcaccatcttggctcactgcaacctctacctcctgggttctagcgattgcctcagcctcccaagtagctgggatgattacaggcacgcaccaccacacctggctaatttttgtatttttagtagagatggggtttcaccatgttggccaggctggttttgaactcctaacctcaggtgatctgcccacctcggcccctccaaagtgctaggattacaggcgtgagctaccacgcctggccccggaccattttcaaatgaaaaagaaaatttttgtgtgagcaaggagatttttttctggcactacaaggaaggcaggcaaggaggttgagtgagggtcaggctcttgttgacttaggtccagagaaagttgtggaaggaatacagttggagcagcagaggacagacttcagtatggcccattgcccccactgctctccagggatcccaggcccatcaggagttgctgggcccaagggagagttgcaaggccagagctggcccttctctgttagccctatttcacacacccccagtgggaactgctgtactttatagagacctgaggctatggtaagaggggggcccaaggaagggaggcagggagggcccccttgcaggtgctacctgtcgctagctttgctattgattggactttgtagaggaaaactaacactatttcccatatttgggatagggggcttctatgggcacttatggctctccactatgactcatcaggccatgttgcttccagaaggccttacctgaccccctgtctggctcagatgtccttcttcagagtccccttggctctggggactttacctagaccgatcaagtcccagccctattcctcaccagatgcctatctctcagagcctctgttttctccaatgtgtcgtgggaataaaaacacctatctcatgtagattgctaggagaggggaggattaatgaagacaaaatgaataaaagggcccatcccc

SEQ ID NO: 114117 - DNA, 1968 bp, Homo sapiens
  Payload ID: 2299
  Gene Symbol: CHST14
  Gene Name: carbohydrate (N-acetylgalactosamine 4-0) sulfotransferase 14
  ENST ID: ENST00000559991
  CDS Start-End: 129-1184
ctgtcccctgccctcccctccccaactacccccggtcccagaccctcctcccgcccccagcccgagcccgccttccaggccgccctcggatcggccgggcccgcgcaggcccccaccccttgagcaccatgttcccccgcccgctgaccccgctggcggccccaaatggcgccgagcccctgggccgggcgctgaggcgggcccctctgggcagggcccgggcggggctgggtgggccgcccctgctgctgccgtccatgctgatgtttgcggtgatcgtggcctccagcgggctgctgctcatgatcgagcggggcatcctggccgagatgaagcccctgcccctgcacccgcccggccgcgagggcacagcctggcgcgggaaagcccccaagcctgggggcctgtccctcagggctggggacgcggacttgcaagtgcggcaggacgtccggaacaggaccctgcgggcggtgtgcggacagccaggcatgccccgggacccctgggacttgccggtggggcagcggcgcaccctgctgcgccacatcctcgtgctggcaggcgtcctggacagcgtggacgtccgcctcaagatggaccaccgcagtgacctggtgttcctggccgacctgcggcctgaggagattcgctaccgcctgcagcactactttaagttcctgtttgtgcgggagcccttggaacgcctcctctctgcctaccgcaacaagtttggcgagatccgagagtaccagcaacgctatggggctgagatagtgaggcggtacagggctggagcggggcccagccctgcaggcgacgatgtcacattccccgagttcctgagatacctggtggatgaggaccctgagcgcatgaatgagcattggatgcccgtgtaccacctgtgccagccttgtgccgtgcactatgactttgtgggctcctatgagaggctggaggctgatgcaaatcaggtgctggagtgggtacgggcaccacctcacgtccgatttccagctcgccaggcctggtaccggccagccagccccgaaagcctgcattaccacttgtgcagtgccccccgggccctgctgcaggatgtgctgcctaagtatatcctggacttctccctctttgcctacccactgcctaatgtcaccaaggaggcgtgtcagcagtgaccatgggtgtggggccagcagctggtggggactggtttcaacgccagctttctgtgcttctgcctgtcattcggagaaactctggctctggggcttggggcttctcaggatcctggatggcagagactgccctcagaagttccttgtccagggtgggcacccacagtgactcagaggacagggctaggcaggagacctgctgctcctcattggggggatctcttggggggcagacaccagtttgccaatgaagcaacacatctgatctaaagactggctccagaccccgggctgccaggattatgcagtccacttggtctaccttaatttaacctgtggccaaactcagagatggtaccagccaggggcaagcatgaccagagccagggaccctgtggctctgatcccccatttatccaccccatgtgcctcaggactagagtgagcaatcataccttataaatgacttttgtgcctttctgctccagtctcaaaatttcctacacctgccagttctttacatttttccaaggaaaggaaaacggaagcagggttcttgcctggtagctccaggacccagctctgcaggcacccaaagaccctctgtgcccagcctcttccttgagttctcggaacctcctccctaattctcccttccttccccacaaggcctttgaggttgtgactgtggctggtatatctggctgccatttttctgatgcatttatttaaaatttgtactttttgatagaacccttgtaagggctttgttttcctaatagct

SEQ ID NO: 114118 - DNA, 2479 bp, Homo sapiens
  Payload ID: 2300
  Gene Symbol: CHST8
  Gene Name: carbohydrate (N-acetylgalactosamine 4-0) sulfotransferase 8
  Uniprot ID: Q9H2A9
  ENST ID: ENST00000262622
  CDS Start-End: 759-2033
gggactcgtcccagagtttgctgccgccgccgccgctgccattagagcggttttaattagctgcaggatttttaatgagctgaaatcaagaagagccccatctcagaagtaagcgagagccgcgcgcagggaagaactagtctgacaaaacagaaggaggtggtgctctcgggggactgggctgtaggctcccaccgatcgatcggcgacgagcagatgagttcccgaggccaggaggctgaggagggaagccagggctcagagaccagcgcccggtgcagagtccccgctgctgccaccgcggcagaaggcacggtgccggattcaaggtgacggcagtgcctggctccattctcctcaagttgccatagcagcctctctcccaacaagcagcttctccgggagccctcagccgggagggacgtcattgttctctcctgcccgtgtggtgcaaggagacccaccggacagagaactttcccgagcccggggtccgctgaccacgtgggtgcacccatgctgcctggagccaggcacagggacaggtccccacggccacagggaatcctctgggcagctgaggggagcgtccaggcccagaagcagctgcagccaagcgtgtccttggagccgtccatgcgtctgtccgcctgctgccggtcgccactggagatctcggcctgatggacgcctggtgtggacgatgagggaagaacgtgccccccacacccaagaggtgacccctgagccagccccggatgaccctgcgacctggaacaatgcggctggcctgcatgttctcttccatcctgctgttcggagctgcaggcctcctcctcttcatcagcctgcaggaccctacggagctcgccccccagcaggtgccaggaataaagttcaacatcaggccaaggcagccccaccacgacctcccaccaggcggctcccaggatggtgacttgaaggaacccacagagagggtcactcgggacttatccagtggggccccgaggggccgcaacctgccagcgcctgaccagcctcaacccccgctgcagaggggaacccgtctgcggctccgccagcgccgtcgccgtctgctcatcaagaaaatgccagctgcggcgaccatcccggccaacagctcggacgcgcccttcatccggccgggacccgggacgctggatggccgctgggtcagcctgcaccggagccagcaggagcgcaagcgggtgatgcaggaggcctgcgccaagtaccgggcgagcagcagccgccgggccgtcacgccccgccacgtgtcccgtatcttcgtggaggaccgccaccgcgtgctctactgcgaggtgcccaaggccggctgctccaattggaagcgggtgctcatggtgctggccggcctggcctcgtccactgccgacatccagcacaacaccgtccactatggcagcgctctcaagcgcctggacaccttcgaccgccagggtatcttgcaccgtctcagcacctacaccaagatgctctttgtccgcgagcccttcgagaggctggtgtccgccttccgcgacaagtttgagcaccccaacagctactatcacccggtcttcggcaaggccatcctggcccggtaccgcgccaatgcctctcgggaggccctgcggaccggctctggggtgcgttttcccgagttcgtccagtacctgctggacgtgcaccggcccgtggggatggacattcactgggaccatgtcagccggctctgcagcccctgcctcatcgactacgatttcgtaggcaagttcgagagcatggaggacgatgccaacttcttcctgagcctcatccgcgcgccgcggaacctgaccttcccccggttcaaggaccggcactcgcaggaggcgcggaccacagcgaggatcgcccaccagtacttcgcccaactctcggccctgcaaaggcagcgcacctacgacttctactacatggattacctgatgttcaactattccaagccctttgcagatctgtactgaggggcgccgcagctggccggggccgccctgccccggtcactcacctgtgctcccgggcatcctcctgtccctggctcctcatcctgggagcaacagggctctgaggacgtgaggagccatcgctgtgggaggcagcaggccccgggtggggggcagaggcgcccagccttggatggggaccccagcccctggcctgtacctgtttcctcattccttggctgagggagaggctgagaactgggcagacacccctggagctcagccgacagttttgatgagcagggaagtctgaggcccagaggacggggggcccagcggtaagggatgtcccgcactcccttagccattgccttggaccaaaccacgtggtttgcagcttttctacgagccaggggggaggttcccttggattaaggttccaaataaagcacatggtttccagagca

SEQ ID NO: 114119 - DNA, 2225 bp, Homo sapiens
  Payload ID: 2300
  Gene Symbol: CHST8
  Gene Name: carbohydrate (N-acetylgalactosamine 4-0) sulfotransferase 8
  Uniprot ID: Q9H2A9
  ENST ID: ENST00000434302
  CDS Start-End: 506-1780
ttcgctgggagccttcccggcgcgcaagccggatccggcagtgctgcggggaggagagaggacgaggcggcggcggcagcaggaggtgggggaccgatcgcgccgggggccgaagaggaacgccgccccgcgccctctcgctccccgcacgctccggctgccggccccacgctgctcgcccacagatcgcactgggttccgcttggagcgggcggaggcaccgggcccgagctgggtcggaggtcctctccgccgcctgcgcgccccaagcagaggatccgccgcggagaaccgctcccggactggaggcgcccgcggcctcgggtgcgtccgctgcgccaggtttaaaggtcaacaagaatatcttaccttaatttgacaagtacgcaagaaataatgcaagactcgtttatgttcagatctcggcctgatggacgcctggtgtggacgatgagggaagaacgtgccccccacacccaagaggtgacccctgagccagccccggatgaccctgcgacctggaacaatgcggctggcctgcatgttctcttccatcctgctgttcggagctgcaggcctcctcctcttcatcagcctgcaggaccctacggagctcgccccccagcaggtgccaggaataaagttcaacatcaggccaaggcagccccaccacgacctcccaccaggcggctcccaggatggtgacttgaaggaacccacagagagggtcactcgggacttatccagtggggccccgaggggccgcaacctgccagcgcctgaccagcctcaacccccgctgcagaggggaacccgtctgcggctccgccagcgccgtcgccgtctgctcatcaagaaaatgccagctgcggcgaccatcccggccaacagctcggacgcgcccttcatccggccgggacccgggacgctggatggccgctgggtcagcctgcaccggagccagcaggagcgcaagcgggtgatgcaggaggcctgcgccaagtaccgggcgagcagcagccgccgggccgtcacgccccgccacgtgtcccgtatcttcgtggaggaccgccaccgcgtgctctactgcgaggtgcccaaggccggctgctccaattggaagcgggtgctcatggtgctggccggcctggcctcgtccactgccgacatccagcacaacaccgtccactatggcagcgctctcaagcgcctggacaccttcgaccgccagggtatcttgcaccgtctcagcacctacaccaagatgctctttgtccgcgagcccttcgagaggctggtgtccgccttccgcgacaagtttgagcaccccaacagctactatcacccggtcttcggcaaggccatcctggcccggtaccgcgccaatgcctctcgggaggccctgcggaccggctctggggtgcgttttcccgagttcgtccagtacctgctggacgtgcaccggcccgtggggatggacattcactgggaccatgtcagccggctctgcagcccctgcctcatcgactacgatttcgtaggcaagttcgagagcatggaggacgatgccaacttcttcctgagcctcatccgcgcgccgcggaacctgaccttcccccggttcaaggaccggcactcgcaggaggcgcggaccacagcgaggatcgcccaccagtacttcgcccaactctcggccctgcaaaggcagcgcacctacgacttctactacatggattacctgatgttcaactattccaagccctttgcagatctgtactgaggggcgccgcagctggccggggccgccctgccccggtcactcacctgtgctcccgggcatcctcctgtccctggctcctcatcctgggagcaacagggctctgaggacgtgaggagccatcgctgtgggaggcagcaggccccgggtggggggcagaggcgcccagccttggatggggaccccagcccctggcctgtacctgtttcctcattccttggctgagggagaggctgagaactgggcagacacccctggagctcagccgacagttttgatgagcagggaagtctgaggcccagaggacggggggcccagcggtaagggatgtcccgcactcccttagccattgccttggaccaaaccacgtggtttgcagcttttctacgagccaggggggaggttcccttggattaaggttccaaataaagcacatggtttccagagc

SEQ ID NO: 114120 - DNA, 2133 bp, Homo sapiens
  Payload ID: 2300
  Gene Symbol: CHST8
  Gene Name: carbohydrate (N-acetylgalactosamine 4-0) sulfotransferase 8
  Uniprot ID: Q9H2A9
  ENST ID: ENST00000438847
  CDS Start-End: 413-1687
ccggcgcgcaagccggatccggcagtgctgcggggaggagagaggacgaggcggcggcggcagcaggaggtgggggaccgatcgcgccgggggccgaagaggaacgccgccccgcgccctctcgctccccgcacgctccggctgccggccccacgctgctcgcccacagatcgcactgggttccgcttggagcgggcggaggcaccgggcccgagctgggtcggaggtcctctccgccgcctgcgcgccccaagcagaggatccgccgcggagaaccgctcccggactggaggcgcccgcggcctcgggtgcgtccgctgcgccagatctcggcctgatggacgcctggtgtggacgatgagggaagaacgtgccccccacacccaagaggtgacccctgagccagccccggatgaccctgcgacctggaacaatgcggctggcctgcatgttctcttccatcctgctgttcggagctgcaggcctcctcctcttcatcagcctgcaggaccctacggagctcgccccccagcaggtgccaggaataaagttcaacatcaggccaaggcagccccaccacgacctcccaccaggcggctcccaggatggtgacttgaaggaacccacagagagggtcactcgggacttatccagtggggccccgaggggccgcaacctgccagcgcctgaccagcctcaacccccgctgcagaggggaacccgtctgcggctccgccagcgccgtcgccgtctgctcatcaagaaaatgccagctgcggcgaccatcccggccaacagctcggacgcgcccttcatccggccgggacccgggacgctggatggccgctgggtcagcctgcaccggagccagcaggagcgcaagcgggtgatgcaggaggcctgcgccaagtaccgggcgagcagcagccgccgggccgtcacgccccgccacgtgtcccgtatcttcgtggaggaccgccaccgcgtgctctactgcgaggtgcccaaggccggctgctccaattggaagcgggtgctcatggtgctggccggcctggcctcgtccactgccgacatccagcacaacaccgtccactatggcagcgctctcaagcgcctggacaccttcgaccgccagggtatcttgcaccgtctcagcacctacaccaagatgctctttgtccgcgagcccttcgagaggctggtgtccgccttccgcgacaagtttgagcaccccaacagctactatcacccggtcttcggcaaggccatcctggcccggtaccgcgccaatgcctctcgggaggccctgcggaccggctctggggtgcgttttcccgagttcgtccagtacctgctggacgtgcaccggcccgtggggatggacattcactgggaccatgtcagccggctctgcagcccctgcctcatcgactacgatttcgtaggcaagttcgagagcatggaggacgatgccaacttcttcctgagcctcatccgcgcgccgcggaacctgaccttcccccggttcaaggaccggcactcgcaggaggcgcggaccacagcgaggatcgcccaccagtacttcgcccaactctcggccctgcaaaggcagcgcacctacgacttctactacatggattacctgatgttcaactattccaagccctttgcagatctgtactgaggggcgccgcagctggccggggccgccctgccccggtcactcacctgtgctcccgggcatcctcctgtccctggctcctcatcctgggagcaacagggctctgaggacgtgaggagccatcgctgtgggaggcagcaggccccgggtggggggcagaggcgcccagccttggatggggaccccagcccctggcctgtacctgtttcctcattccttggctgagggagaggctgagaactgggcagacacccctggagctcagccgacagttttgatgagcagggaagtctgaggcccagaggacggggggcccagcggtaagggatgtcccgcactcccttagccattgccttggaccaaaccacgtggtttgcagcttttctacgagccaggggggaggttcccttggattaaggttccaaataaagcacatggtttccagagca

SEQ ID NO: 114121 - DNA, 1040 bp, Homo sapiens
  Payload ID: 2300
  Gene Symbol: CHST8
  Gene Name: carbohydrate (N-acetylgalactosamine 4-0) sulfotransferase 8
  ENST ID: ENST00000591231
  CDS Start-End: 506-1040
ttcgctgggagccttcccggcgcgcaagccggatccggcagtgctgcggggaggagagaggacgaggcggcggcggcagcaggaggtgggggaccgatcgcgccgggggccgaagaggaacgccgccccgcgccctctcgctccccgcacgctccggctgccggccccacgctgctcgcccacagatcgcactgggttccgcttggagcgggcggaggcaccgggcccgagctgggtcggaggtcctctccgccgcctgcgcgccccaagcagaggatccgccgcggagaaccgctcccggactggaggcgcccgcggcctcgggtgcgtccgctgcgccaggtttaaaggtcaacaagaatatcttaccttaatttgacaagtacgcaagaaataatgcaagactcgtttatgttcagatctcggcctgatggacgcctggtgtggacgatgagggaagaacgtgccccccacacccaagaggtgacccctgagccagccccggatgaccctgcgacctggaacaatgcggctggcctgcatgttctcttccatcctgctgttcggagctgcaggcctcctcctcttcatcagcctgcaggaccctacggagctcgccccccagcaggtgccaggaataaagttcaacatcaggccaaggcagccccaccacgacctcccaccaggcggctcccaggatggtgacttgaaggaacccacagagagggtcactcgggacttatccagtggggccccgaggggccgcaacctgccagcgcctgaccagcctcaacccccgctgcagaggggaacccgtctgcggctccgccagcgccgtcgccgtctgctcatcaagaaaatgccagctgcggcgaccatcccggccaacagctcggacgcgcccttcatccggccgggacccgggacgctggatggccgctgggtcagcctgcaccggagccagcaggagcgcaagcgggtgatgcaggaggcctgcgccaagtaccgggcgagcagcagccgccgggccgtcacgcccc

SEQ ID NO: 114122 - DNA, 1654 bp, Homo sapiens
  Payload ID: 2301
  Gene Symbol: CHST9
  Gene Name: carbohydrate (N-acetylgalactosamine 4-0) sulfotransferase 9
  ENST ID: ENST00000284224
  CDS Start-End: 98-1174
gggagagtggagaagagaagagaacaaaaagtaacttcaggatggggaccagtgaagtacttgcggcctgtacccagaatcaaaccccaagtttcacatgcctgaggatgtacgagaaaaaaaggaaaatcttctactcaattctgagagatctactaggctcttaacaaagaccagtcattcacaaggaggggatcaagctttaagtaagtccacagggtcaccaacagagaagttgattgaaaaacgtcaaggagctaagactgtttttaacaagttcagcaacatgaattggccagtggacattcaccctttaaacaaaagtttagtcaaagataataaatggaagaaaactgaggagacccaagagaaacgaaggtctttccttcaggagttttgcaagaaatacggtggggtgagtcatcatcagtcacatctttttcatacagtatccagaatctatgtagaagataaacacaaaatcttatattgtgaggtacctaaggctggctgttccaattggaaaagaattctgatggtactaaatggattggcttcctctgcatacaacatctcccacaatgctgtccactacgggaagcatttgaagaagctagatagctttgacctaaaagggatatatacccgcttaaatacttacaccaaagctgtgtttgttcgtgatcccatggaaagattagtatcagcctttagggacaaatttgaacaccccaatagttattaccatccagtattcggaaaggcaattatcaagaaatatcgaccaaatgcctgtgaagaagcattaattaatggatctggagtcaagttcaaagagtttatccactacttgctggattcccaccgtccagtaggaatggacattcactgggaaaaggtcagcaaactctgctatccgtgtttgatcaactatgattttgtagggaaatttgagactttggaagaagatgccaattactttttacagatgatcggtgctccaaaggagctgaaatttcccaactttaaggataggcactcttccgatgaaagaaccaatgctcaagtcgtgagacagtatttaaaggatctgactagaactgagagacaattaatctatgacttttattacttggactatttaatgtttaattatacaactccatttttgtagtttgcattcattttctaaaaccctgtatatacttaatgatgataagttcaaatcagctgtaatttttctataattctctgtatgacagaaatttaaccaagtgcagttgtcttgatttaatgtagatttttaccaaatagtatgacaccaattggcacaaagttataggaaaatcacctacaggagatgtaaacaacttgagttgctctaaaatgtttggaaaagagctgcttttgcattatgaattatattgttgaagcaataacctagccagctgttgcattagctaaagcagcctcttgcaatggtaggaaaaaaggatctcaaatagcatgagtgtatgtctatatcctgaaatttattgtctaaaatgcatgaatatatttttagcagtctgtggcatattaatcaaactgttgaattgttttcttacaccctggaaatctttctatcaactataatgataaatccattttgaag

SEQ ID NO: 114123 - DNA, 2043 bp, Homo sapiens
  Payload ID: 2301
  Gene Symbol: CHST9
  Gene Name: carbohydrate (N-acetylgalactosamine 4-0) sulfotransferase 9
  Uniprot ID: Q7L1S5
  ENST ID: ENST00000581714
  CDS Start-End: 230-1561
agtcttttctgtcttcagagcattagtgtgcacattaagtcttcagccttgttgagatagtgaatatttatgccgtatttgagaattaatattagcagaaatgtacaatgtagatttctttttaaaattctaggttactttatggaattgggctcttagagaacaagaaaagactgaagttttacgggaaaacaaatcatgtggtcttcagattctgaaataaggagaaatgcagccatctgaaatggtcatgaaccccaaacaagtcttcctctctgtgctgatatttggagtagctgggctactcctcttcatgtatttgcaagtctggattgaagaacaacatacagggagagtggagaagagaagagaacaaaaagtaacttcaggatggggaccagtgaagtacttgcggcctgtacccagaatcatgagtacagaaaaaatccaggaacatatcaccaaccagaaccccaagtttcacatgcctgaggatgtacgagaaaaaaaggaaaatcttctactcaattctgagagatctactaggctcttaacaaagaccagtcattcacaaggaggggatcaagctttaagtaagtccacagggtcaccaacagagaagttgattgaaaaacgtcaaggagctaagactgtttttaacaagttcagcaacatgaattggccagtggacattcaccctttaaacaaaagtttagtcaaagataataaatggaagaaaactgaggagacccaagagaaacgaaggtctttccttcaggagttttgcaagaaatacggtggggtgagtcatcatcagtcacatctttttcatacagtatccagaatctatgtagaagataaacacaaaatcttatattgtgaggtacctaaggctggctgttccaattggaaaagaattctgatggtactaaatggattggcttcctctgcatacaacatctcccacaatgctgtccactacgggaagcatttgaagaagctagatagctttgacctaaaagggatatatacccgcttaaatacttacaccaaagctgtgtttgttcgtgatcccatggaaagattagtatcagcctttagggacaaatttgaacaccccaatagttattaccatccagtattcggaaaggcaattatcaagaaatatcgaccaaatgcctgtgaagaagcattaattaatggatctggagtcaagttcaaagagtttatccactacttgctggattcccaccgtccagtaggaatggacattcactgggaaaaggtcagcaaactctgctatccgtgtttgatcaactatgattttgtagggaaatttgagactttggaagaagatgccaattactttttacagatgatcggtgctccaaaggagctgaaatttcccaactttaaggataggcactcttccgatgaaagaaccaatgctcaagtcgtgagacagtatttaaaggatctgactagaactgagagacaattaatctatgacttttattacttggactatttaatgtttaattatacaactccatttttgtagtttgcattcattttctaaaaccctgtatatacttaatgatgataagttcaaatcagctgtaatttttctataattctctgtatgacagaaatttaaccaagtgcagttgtcttgatttaatgtagatttttaccaaatagtatgacaccaattggcacaaagttataggaaaatcacctacaggagatgtaaacaacttgagttgctctaaaatgtttggaaaagagctgcttttgcattatgaattatattgttgaagcaataacctagccagctgttgcattagctaaagcagcctcttgcaatggtaggaaaaaaggatctcaaatagcatgagtgtatgtctatatcctgaaatttattgtctaaaatgcatgaatatatttttagcagtctgtggcatattaatcaaactgttgaattgttttcttacaccctggaaatctttctatcaactataatgataaatccattttgaagtg

SEQ ID NO: 114124 - DNA, 2033 bp, Homo sapiens
  Payload ID: 2301
  Gene Symbol: CHST9
  Gene Name: carbohydrate (N-acetylgalactosamine 4-0) sulfotransferase 9
  Uniprot ID: Q7L1S5
  ENST ID: ENST00000580774
  CDS Start-End: 260-484
cccgactccgagctgtccccgctcccggcgcggcgctccgctctcagccacctcacggctgccaggagtgcgcgggagtttgccccggagcgcggggaagtttcctccgaagctgcgctcctggaacagcagcacctgcaagcgcccggcagcggcccgcgaggttactttatggaattgggctcttagagaacaagaaaagactgaagttttacgggaaaacaaatcatgtggtcttcagattctgaaataaggagaaatgcagccatctgaaatggtcatgaaccccaaacaagtcttcctctctgtgctgatatttggagtagctgggctactcctcttcatgtatttgcaagtctggattgaagaacaacatacagggagagtggagaagagaagagaacaaaaagtaacttcaggatggggaccagtgaagtacttgcggcctgtacccagaatcaaaccccaagtttcacatgcctgaggatgtacgagaaaaaaaggaaaatcttctactcaattctgagagatctactaggctcttaacaaagaccagtcattcacaaggaggggatcaagctttaagtaagtccacagggtcaccaacagagaagttgattgaaaaacgtcaaggagctaagactgtttttaacaagttcagcaacatgaattggccagtggacattcaccctttaaacaaaagtttagtcaaagataataaatggaagaaaactgaggagacccaagagaaacgaaggtctttccttcaggagttttgcaagaaatacggtggggtgagtcatcatcagtcacatctttttcatacagtatccagaatctatgtagaagataaacacaaaatcttatattgtgaggtacctaaggctggctgttccaattggaaaagaattctgatggtactaaatggattggcttcctctgcatacaacatctcccacaatgctgtccactacgggaagcatttgaagaagctagatagctttgacctaaaagggatatatacccgcttaaatacttacaccaaagctgtgtttgttcgtgatcccatggaaagattagtatcagcctttagggacaaatttgaacaccccaatagttattaccatccagtattcggaaaggcaattatcaagaaatatcgaccaaatgcctgtgaagaagcattaattaatggatctggagtcaagttcaaagagtttatccactacttgctggattcccaccgtccagtaggaatggacattcactgggaaaaggtcagcaaactctgctatccgtgtttgatcaactatgattttgtagggaaatttgagactttggaagaagatgccaattactttttacagatgatcggtgctccaaaggagctgaaatttcccaactttaaggataggcactcttccgatgaaagaaccaatgctcaagtcgtgagacagtatttaaaggatctgactagaactgagagacaattaatctatgacttttattacttggactatttaatgtttaattatacaactccatttttgtagtttgcattcattttctaaaaccctgtatatacttaatgatgataagttcaaatcagctgtaatttttctataattctctgtatgacagaaatttaaccaagtgcagttgtcttgatttaatgtagatttttaccaaatagtatgacaccaattggcacaaagttataggaaaatcacctacaggagatgtaaacaacttgagttgctctaaaatgtttggaaaagagctgcttttgcattatgaattatattgttgaagcaataacctagccagctgttgcattagctaaagcagcctcttgcaatggtaggaaaaaaggatctcaaatagcatgagtgtatgtctatatcctgaaatttattgtctaaaatgcatgaatatatttttagcagtctgtggcatattaatcaaactgttgaattgttttcttacaccctggaaatctttctatcaactataatgataaatccattttgaag

SEQ ID NO: 114125 - DNA, 11388 bp, Homo sapiens
  Payload ID: 2301
  Gene Symbol: CHST9
  Gene Name: carbohydrate (N-acetylgalactosamine 4-0) sulfotransferase 9
  Uniprot ID: Q7L1S5
  ENST ID: ENST00000618847
  CDS Start-End: 279-1610
gtcagggccagggtgagcgcccgactccgagctgtccccgctcccggcgcggcgctccgctctcagccacctcacggctgccaggagtgcgcgggagtttgccccggagcgcggggaagtttcctccgaagctgcgctcctggaacagcagcacctgcaagcgcccggcagcggcccgcgaggttactttatggaattgggctcttagagaacaagaaaagactgaagttttacgggaaaacaaatcatgtggtcttcagattctgaaataaggagaaatgcagccatctgaaatggtcatgaaccccaaacaagtcttcctctctgtgctgatatttggagtagctgggctactcctcttcatgtatttgcaagtctggattgaagaacaacatacagggagagtggagaagagaagagaacaaaaagtaacttcaggatggggaccagtgaagtacttgcggcctgtacccagaatcatgagtacagaaaaaatccaggaacatatcaccaaccagaaccccaagtttcacatgcctgaggatgtacgagaaaaaaaggaaaatcttctactcaattctgagagatctactaggctcttaacaaagaccagtcattcacaaggaggggatcaagctttaagtaagtccacagggtcaccaacagagaagttgattgaaaaacgtcaaggagctaagactgtttttaacaagttcagcaacatgaattggccagtggacattcaccctttaaacaaaagtttagtcaaagataataaatggaagaaaactgaggagacccaagagaaacgaaggtctttccttcaggagttttgcaagaaatacggtggggtgagtcatcatcagtcacatctttttcatacagtatccagaatctatgtagaagataaacacaaaatcttatattgtgaggtacctaaggctggctgttccaattggaaaagaattctgatggtactaaatggattggcttcctctgcatacaacatctcccacaatgctgtccactacgggaagcatttgaagaagctagatagctttgacctaaaagggatatatacccgcttaaatacttacaccaaagctgtgtttgttcgtgatcccatggaaagattagtatcagcctttagggacaaatttgaacaccccaatagttattaccatccagtattcggaaaggcaattatcaagaaatatcgaccaaatgcctgtgaagaagcattaattaatggatctggagtcaagttcaaagagtttatccactacttgctggattcccaccgtccagtaggaatggacattcactgggaaaaggtcagcaaactctgctatccgtgtttgatcaactatgattttgtagggaaatttgagactttggaagaagatgccaattactttttacagatgatcggtgctccaaaggagctgaaatttcccaactttaaggataggcactcttccgatgaaagaaccaatgctcaagtcgtgagacagtatttaaaggatctgactagaactgagagacaattaatctatgacttttattacttggactatttaatgtttaattatacaactccatttttgtagtttgcattcattttctaaaaccctgtatatacttaatgatgataagttcaaatcagctgtaatttttctataattctctgtatgacagaaatttaaccaagtgcagttgtcttgatttaatgtagatttttaccaaatagtatgacaccaattggcacaaagttataggaaaatcacctacaggagatgtaaacaacttgagttgctctaaaatgtttggaaaagagctgcttttgcattatgaattatattgttgaagcaataacctagccagctgttgcattagctaaagcagcctcttgcaatggtaggaaaaaaggatctcaaatagcatgagtgtatgtctatatcctgaaatttattgtctaaaatgcatgaatatatttttagcagtctgtggcatattaatcaaactgttgaattgttttcttacaccctggaaatctttctatcaactataatgataaatccattttgaagtgatattttggacttaggcattttactttagattggaaggcattatgtgatttacaatatgagaatatagcagaaaaaccagatgaggctgtggctttttatattcaacagccaataaaaaatgcacaacatgctaagatcaaagcaacaaaaccaaccttcttcttccagaaaaacttaagggaattgattctgttttcttttgagccttccacaaagagacaaaatgaacacaagcactaaaggtctacatttctgaagcaggcagttgagaagcttaagtctcatcagatataaatgtgctcctaattctggtttaattgagcaggggggaaattgtttcaggatggaataatcatcaaaaacaaaagttgccattctgaatatggaactcaaacaataacaaagttttataagtatattatttgaatcaaagcatcatgtgcatagctttatatgtggaatacaccctaagaatagcttttgttttcagtttaattattcagcttaggaatgactttttaaaaactaatataccacttcaaagataggttatgttctagagaataaacataaaaagagcccctagaaatgtgtttaataggcttatgcataagtaaattaaggtattttctttttaagtttaaatattctatactaacaaagtcagataccattgcattcaaatattaaatcaaagtccttagaaaaataggtccatgtgtcacccttatgaatagttgtaatgcattttggaatttttttccaagggatcctaaattagatcccttggggaaaaaaaaagggatcattttggatgggaaacatttggatgggaaacctactttaattggtcgacttttaccccgagttaagaaaatcacaagtctttcaaaccctgcttaaatgcttttcctgaacatcttcctcttcctaagctatcatttttttcttatcagtaaatattcagtaatggctttcaaagaacagtaggtattaatagttgaatgttaatagaccaagatagttgcagtcatacttatttcattttgattttctatttcatggctgagtattcatgaattgcttcgctccttacacacacctgccgtgtcccatctgtgtctcctaaggagtaagtaaactgcaatgggctgagagatcaaaagtattaaaccttctaatccaaccttttactacttttccatgccattaactcttgcctctagaccatacacttaagctgtgctctcagtttttaagacgttttactctggagtaatctaaattacataatttaaaattttgctgcaccatgtagagtagattcctagtaatttagggaaattgaaattatctttttatggagagagaaaataaaaaatattccagaagcctgaaattttattcctaagaaacacaaaacttgctttatatgaaatccactataaagaataaaggcaatttcctcaaaagtattcctaaaactatataaggaacagacaaagaactttcaatagctttagaaggaaaaaaatggaaacaacagtcctacctctcttattggcatttgtaatgcattgggcagggtggaatgcatacctatataaatgtttggctttgatggtggagaggagggatgagtggaagaaaatgatacccagtgttctctacggaaagctgtattgtaccttttgctgtatatgttcctttcctgaccctttccaacgagcccgtgtcaccatgggtcattcttttcctaaatgggctctatgatgccaagtgacaccctgtgtagttgcaagttccaaaagccatgcatgtctttgccaagtaagaacaaactttttatgtacctgctcttcattttagatggcttattttcatgttaggaccaaagaagccagtcatcatcctggattacttgtgagtttaaagccaaactccatttttctctcctgacttatttggccttgcagaccagctcacattcacctttgtcatttctgcctgtgcataaatccaggtgggaacaccactgttctttaggaccatcacaatttcatgaatttaattcctaaaggcaagtgaccaaatccagactcatcttccagatgtccaaagttcccattttaacattaggtgcaattataagtcctccaattaaaccctaaggatcctatttgtttttataggcagcagtaacacaatgggcagaccccttcgctctgttattcccctgtctggaattactatcagggtaacaagttggcaattaaatccaaaaccacagttatgtaacctgtaaactatctatagatgtgcaatattgatgtgattgtgcccagaaactgccataaacttcaatggaaatgtatgtacaggacatccagttttcggattttctcaaacatttggaaatatccattaattcaatggaaatgtgatgccacttgctagatgtctataaaacattctgtaacagaaaataataatattattatcattagggaattagtagttctaattcaagaactacttgtatgtcatttttaattagaaagaggaaaaatacttttacattttattgatgtattattattcttatctcctaaaatgtatagtatttagcagaaggtatatataagaagatgcagagaattttgaatattagagtgccctttgaaaaaatcacttgctgaattaatagaacttgggattaggctaggactacagtaaacgtctccctcctgtgcattctcatgtggcctctcagggcatcccagcctctaggccttcatggggcgtggtgaagcagatgttttgcccagggctaaccctcccaagatgctctgatacttgaaaaaggattggccaaaggcgtttaattatagctcaactacctgagaaccttaggccaaggctaattcaatttagtcctacatttaggctcataccttctcaatctcaatcatgatcattatacagtaatcgtatgcatgatcctagctaacatttattcaatacttactgggtgtcaggcactcttcaagtagtttacatgcattaatttaatctccatagccagtctaacataggtaatattatgtagccctctccctttccatctatcataaaggaaagtaaagcagactatagctgagtaacttgcctaaggagacagagatgataagtaggtcagaagccaggatgaagccaagcagcaaataccactaccaaactctttgcttagaatattacaaaccaatatttacttttgctttccgttacctctattcaggataggtagaggcaaaaacaatatattggaatcctgaaattttttccatacaaatatgggtgtctgtgtgtgtgtgtgtgtgtgtgtgtgtgtgtgtgtgtgtatttagctagttagttatcacatttcaaatcagcttatttctttattcctgctgagttaaactgacaggttcaaagactttggaagaaattaggtttcctccccacaacttttttgtaatccttagttaatcatggaaacaatgtttttaagaagaaaaaatagtccctggaacaaatttagccttgtgaaaacaaaatatcatttctttgacaagaaattccagacagctacaagaccagtcaaggataagcagaatctaagaggaagaaagttcaggcgaactttccacacataggcccctgacagccactgcagatggtcacggttcagcaagctagtcacacacagtgagaaccactcctgctagaaacagagcaactgtgcattatccccttcttcctgagtctccttccctagtactagtttgtagtcagattaccctgagcctacacgggaagactgcagaaaagaatagaggagcaagctgacttaaaccgactgaaaaaacaccatgaaaccaggtgaaaataaataagctcttgctagaagatggcagacatttcccaggcctgtgatcattacctgaggaaggccaggtctggggagttcaacagaacattgcctcatatcatttcattctcagaatttcctagtcagtcacatcttagtttttcaccaggatcatatgcttccaggcaaaagtatttaaatccatttaagcagtcatctttttccatccctaaacctctcctcaagtctcacactatatttggaatgctcccctctctatatatctggacattcatttcttgttaactcaccaaggaatctcttgagattattcaatttcaaaatctcatctctttatgagctccctgataggcagaaaaagacagcagagttttcccctggtgtaacatgcatcagattattctcttaccaataaatgcaggcattcctttcctcgattttttttgtcagggaggttcgttaatttatttgttcatgtgctatttatctcactttttatgaatataaaatatctgttgttgtcattggaatgtcttaggtcttccaagaggaaaggaactgtgtctgttgaatgcactttgtaccatgtctagcaaggcactcagtggaaagcgttactttaacagatgcttttgatgctgttgtttaaaggttcctgtacaacttcttttagtgtagaattcgtatatttctgcctgtgaccttcaggcatctataggaccagaggatctgaaaggaaggtgctagagcagggcagctgagggaagggagctgagccacacaccttttctacactaatagtcatcccttgacctgaaggatagttgcagacacagaaatcttttacatttctaagaaatagcagttgcttgattgtttggggaagaaaattttgagaaaaatgcatgattctggtcaacataagagccatttactgaggatctactcagtagcagacacgggaaaaatactttgcatacattcatttaatgacatgaagagtaagtctaaccgtttccaaaagtagctttcaaaaaaatcaaagtcgagtatttttccacctatcatttcatgaatgagaaaactgagtatcaaagaggtttaataacagtctctctggctccaaagctgagaccatacattggcagcccacggggtagatctggctacagatatgtttggtttggctgacagtgcattttatttaacatctgaattagctgccaacattgggcctcattaatgacaggggatttgttaccctacattctatatgcccacctgaaaatagttggacagaggcaaggtcagtccctttagatgaggttggagatctctagttgttcacactcttcactaatccaccatcactcattcaccttacttgcctggcccctaagcatctcacttttcaagtcctgctctgaagagtgtattccttcccccgccaagcttccaaaggaaatcaactcctgaacattatccttgaccctatttgtgttgtgcaggtagtgaggttatcccattccgggtttccatatccttgctcacagtgctgcttgccctttggtcctatatccagtgggatctccaaacagtatttcattgtttggggaagtctcttttgaccaatgacaaagatgttgggagaaatccagtacctttttttggcatctttctgtcgtagccactgggtcccctggcaacgacattccttcccacctctttctgcagagatgagtcattctcccaggctcttggagctctagtatctagggacagaaactggctcccactgctgcctctagactgctgttctataaccttcatccaaaaatctcttctgttttgcaggtgtgcccgcttcctcaactctaaaaatcacctgcttcccagccttctccgaagattcttctttctgatttataacatgcctctccaccctacttcctgctattatctgggtgattgtagcaccccctgtaacattctactctcttgcttcttaatgctctgacaacctcctcctcctcctcttccctcctcttcctcctcctcctcctactcctcctactcctccccccacttctatacttagagaggtggagaaaacaggagaagggataactacgacttttgtcctcaaataccaggaaaactagtaaaacacacagtatctcattttatgcattcatttgctgaaaatatttccaaagtttagaaaaatgatttttggatgtactatataataaataaaaatgcactcagaatgctagagtgtctaccaacttaaaagaacaatattatttgtttgactgtgattatccttaggaaaaaataagccctgatttaacttatcaatttctgaaaaaaatagtgtatggacgacctgtatcagaattaacctaatttttgttaaaaacatattcccagaccccatccaagatacacagaattggaatctctatgaaaaccacctgaaaatttcctttttaataatctcttggggtacttctcgtgtgtgtgtgaattttttaagtcctggttgattataaatgataatacaacctgctcttttcattctgtcactgtgttgaaaagttaacaactctcagctcagagaattgtcagtgggtattggtaccaaagtcctctgtgggattttgaccagcactgaagcagaaacttggcgtccgaagtctgccaagtgcaagaactagagctgaaatgatgaagtgagggacggggacagcactgggcactgcccaaactttttgaaagctttcagaatgaaatggggaaatggaaactttcctctgtttgaaatataaaagacaaatgtgtactgaaggcaattttggcaactcaacttcacattgaacaagtgaagacaatatgagtttctccaataaaaactaaaaagctgttttcaaattgacctaagatgattgaaaatggaaaatatttgctatttggttattagtttgagagcaagtgccccaggaaatattttgcaatttaacttaaatggttataatgtatattttcttgaacttcattaaaggatttgtctctttttgcctttctattaggttgaaccatatgacattgccaacatttgactgactctgacatataaacacagccctttcatgtgggtccactaacagttctgctgctacctacccaattctaaccacattggctctcctcagaactattggaaatagcctctgaatagaagtcctgccttttttatttatttatttaaaaattacttcttttctctttgcatttttcttcttttgatattttcaattgtggcaaaatccacataacataaaattttatcaccttatcattttttggtatccttttaatgaatattttcctatccctccccatcttacctatttttttttttgagacagagtttcactcttgtcgcccaggctgcagtgcagtggcaccatctctgctcactgcaacctccacgtcctgggttcaagctattctcctgtctcagcctcccgagtagctgggactacaggtgcacagcaccacgcccagctaatttttgtatttttagtagagattgggtttcaccacattggccaggatggtctcgatctcttgacctcgtgacccatccgccacagcctcccaaagtgctgggattacaggcatgagccaccatgccttgccaccattttttaagtgtacagttcagcagcatttagtgtagttgtgcaagcatcaccactatcccatcacataccttccttccttgtgaaaaatggatactctgcacctattaaacaacttcactttttgccctcccccagttctggcaaccatcattctaccttttgtctctatgaatttgataacttaaaatacctcatataaatggaatcatacagcatgtgtctttttgtgactggcgtatttctcttagcataatgtcctcaaggttcatccatattgaaggacgtaccagaatttttttcttttcaaggctgaattgtattccattctcattgcctggcctcaatctctcaagactataacccattcccagcttaatcacctgatagctgcatcaaacccactattatccagccacatggaaccattacattctctgaaaacacctcttgctttttcccctattttgctcacactattacacgacctgaagtgtcctttattcctctttaaggacctccacatgggtgccccctccaagagttgcctgccccgcatgaccatcccacattcagctcgctctaccctctctgcttggggactctcttccactctccttgctttagctccaccattaggctgatggttccgaaatctttttctaggctatgtttctatcacgaactttgattcagattcccagtttcttgtgggactgcttcatctagatgtctcactggagcttccaactcaacatgaccaaagctgaactcatcacctaacccccaaacctgctttctccttatttggtggcaacaccatccatctactccatcttctgagttaggaacctagaagtcaaccccgatttctccctaagctgactcctcacagccacagaattcagaaagcccattaacttcactgcctgactttttctcaagcttctcctctcctcccatccattctgctaatatctaagttcagactctcaccttctcctgtctacaactctacgataatcttgaacttctctcccactctcatttccctcaatgccatcctccatacagctgcccttgtaatcactttaaaatgcaaatccaattccagttctgtttcccactatacattctatatcctgcatgatcccaattcttctccaggcatatttctggccattttctgcctcctggcttaatctccaacagcctagaatggacataataccctaacattggatagttttcttcctcctgggtctactcagcttgtccctctattagggcacccacctaccccccttcacctccccaacacttcctaatccctaaactaagctcagggaggcatttgtcatctctgcctggctcagatgagatgctctgccctgagtactatgagagattgggaagcaggattctatgtaggatggttaggagcctggggcttgtcatgagtaagaactgggtttgaattccgtatcctcaactttcaaatgttgggacctctgaaattgctttaacttctctcagtgccagttttctcatctgaaaactgaggatagaatacctacctagtaaggggggtatgggaaatgcatgtaaagtatttaataagtgctcaataaaataaaaccattgatttatctca

SEQ ID NO: 114126 - DNA, 4810 bp, Homo sapiens
  Payload ID: 2302
  Gene Symbol: CHST15
  Gene Name: carbohydrate (N-acetylgalactosamine 4-sulfate 6-O) sulfotransferase 15
  Uniprot ID: Q7LFX5
  ENST ID: ENST00000346248
  CDS Start-End: 644-2329
gtcccctccctgcgccccgccgcgtctcgggaggcggcgtgactcgggagttgccggcgcttcccggcggtggcggcgtctctggccggccttggtgcggcgagccgagcgaggcagctctgagccgcgcggaaatctggcattttttaaagtttgcgccccacaaagaggaaatattccaaaggtactcaggatgtaaaaggggagatcttcacagatgcctccgtggatggcatggcaatccatccatcaatgagaagaccatgatttcttttaattttctgtgtgtttccacattccccagtgagaattcttccacctttttttgtgccatgggaaaaacctgaagggcaggcagagctgctcccgaacttgtgaccttctctgaggttgcagcggctcttgtagaacatgactctgggacatcacttccttttgttttctttcggagctgaaccaaagaatgtgcaccctctttctctagtgctgtggtgtctgcttatttttgtatttgtgctttccatccatcttctgtgatcacaaggcattcttaaggttttctagcacgacttgcggacatccagactcgtggggggcccacccatggctcggtaagccagcagcccagggcactggcactaccatgaggcactgcattaattgctgcatacagctgttacccgacggcgcacacaagcagcaggtcaactgccaagggggcccccatcacggtcaccaggcgtgccccacgtgcaaaggagaaaacaaaattctgtttcgtgtggacagtaagcagatgaacttgcttgctgttctcgaagtgaggactgaagggaacgaaaactggggtgggtttttgcgcttcaaaaaggggaagcgatgtagcctcgtttttggactgataataatgaccttggtaatggcttcttacatcctttctggggcccaccaagagcttctgatctcatcacctttccattacggaggcttccccagcaaccccagcttgatggacagcgaaaacccaagtgacacaaaggagcatcaccaccaatcctctgtaaataatatttcatacatgaaggactatccaagcattaaattaattatcaacagcatcacaactaggattgagttcacgaccagacagctcccagacttagaagaccttaagaagcaggagttgcatatgttttcagtcatccccaacaaattccttccaaacagtaagagcccctgttggtacgaggagttctcggggcagaacaccaccgacccctacctcaccaactcctacgtgctctactccaagcgcttccgctccaccttcgacgccctgcgcaaggccttctggggccacctggcgcacgcgcacgggaagcacttccgcctgcgctgcctgccgcacttctacatcatagggcagcccaagtgcgggaccacagacctctatgaccgcctgcggctgcaccctgaggtcaagttctccgccatcaaggagccacactggtggacccggaagcgctttggaatcgtccgcctaagagatgggctgcgagaccgctatcccgtggaagattatctggacctctttgacctggccgcacaccagatccatcaaggactgcaggccagctctgcaaaggagcagagcaagatgaatacaatcattatcggggaggccagtgcctccacgatgtgggataataatgcctggacgttcttctacgacaacagcacggatggcgagccaccgtttctgacgcaggacttcatccacgcctttcagccaaatgccagactgattgtcatgctcagggaccctgtggagaggttgtactcagactatctctactttgcaagttcgaataaatccgcggacgacttccatgagaaagtgacagaagcactgcagctgtttgaaaattgcatgcttgattattcactgcgcgcctgcgtctacaacaacaccctcaacaacgccatgcctgtgaggctccaggttgggctctatgctgtgtaccttctggactggctcagcgtttttgacaagcaacagtttctcattcttcgcctggaagatcatgcatccaacgtcaagtacaccatgcacaaggtcttccagtttctgaacctagggcccttaagtgagaagcaggaggctttgatgaccaagagccccgcatccaatgcacggcgtcccgaggaccggaacctggggcccatgtggcccatcacacagaagattctgcgggatttctacaggcccttcaacgctaggctggcgcaggtcctcgcggatgaggcgtttgcgtggaagacgacgtgagagctgaattgttgctgcacgtgctgggcccgccaatgccgtcatcatcaggattttacaaatctctttgcggggaactgtttcactcatggtatggaaaaccccaggactctgccactctaggcacacatgaattataaccattttggaatttccttcgtgatgttcgagagctcagcaatggacccctcacagagctcctctatccgaggccattggagaccccagtttctcaagaattcagctctgctctgagcgtcctggagcttggggatgcagccagctggcctgcactgggtgtggagagaacacctagggaaggcagcctggccctgcccgcctccgccttctggagagcctctgggttctgagtcagcaagccagaggtcatgccacaggcctggctggaacttacacttcacgttccctttttttccccctagagatggggtctcgccgtgttgcacagactgtctgtattcaatggctatcttcacaggtgtgatcataccacattcacttctgaaacactcttgttgcgatcgctaacctcactgggacagagaaccgcagtctttcgagaatggaggctcttcattttttttttctcctttactccaaactcagccctccagtttcttcagatgtaaaccctgttaacgtcactgtttccaaaaggaaaaaaataagtcagtttttggcagcaccttcatctttctgacctcctcctattctgtccttgtggacttatgtttaacatagaaaatgaatgcgtttaaaacaaaaccactttctgcatttaaccagtcctggctctctctctgctgcctcttcatacgttttctcaagaacttcagtttataattggaagagaaatttttgctgttaatgccagaatgagcaacctcaaggaattgaacacttcttggaaaatctaggtaattcaagccctcatcaggtttacaagatcatcagagaaacagaggattttaatttttagttctggccggctacaggctccatttctctgccttcccattggaaatagtttatttccacattctccactgcgtgtggtcaaagttcctcacccagcaagggactatagatactcgtgtcccaattccaaaacacaatgcacaagctgaacttgggctgaacgtggcgtgttgagatttggaatgaggtttctaagagccgtgttcttcatggaattttccaggccacttggcagcttggtttaccgatggatgggctagagatcttgtcgtttcttggaagtcacagggaagattgaagagaacgcttgagcatccttggcaacagcccaggtgggacctggatgaagctttgcactcaagtattgtcaagggaagcttcctgtgaaccaaagttctcaggccaaggtctcgcccaccaaagccagaaagtgcaagcacccgtctacccagctctaacttgtatgtgtgagacagaccaggcttcgggggtaggaggatctgcagttgttcagccgtctttctgctggtgttgtctttctgccatcagagaagggacacacagcccgttcgaaggtgtgcagagggctctgagcgccaggatggccagggctgtttttgctactgaaggagcgtgtgtcctgaactcccacttgcagggacagtccccaccttctctatagccggcactgggagcagccgccagcagggaaatctggcctgagcacaaggatgctttagggagagatcacttcagtgtgtgtgtatatttatttgcagtacagtgcgcgcgtgtgtgtgtgtgtacgcgcacgtgtgggtgagtgcgtcttctgagtgggttctgttcagttgctaatgaggctcctccgctctggacacaacccttttatagattaatttctctgccaattaacttgtcattttcagtacatattttactattccacaccaaccataattacaacaagggatttttcttatgcactcctatgcatgtgaataacatgtggtgtaattctgcttcttacagaagtattactgaaggtattatttccaatattatttggtttattatgcggatcttttttatatatgcagtcccatcccttctgtgccactcaatgccatccagacatggtttttccctccaggggcctttctctccagagggcacttcggctgcctctgcttcctctcattcgaggcccggctcttgctgacagaataggttccgttctgggcggtggttctcgagcctgccattcaaaaccaaagcaaattggagcatttctcacaacatggtattgaagttcctttttgttctcaaaagttgtgaccgtgttaaattgtactcccttagtcctgtaaggtatgttaagtgaatcgcagttacgctgtacttttattaatatttaacataattaaagatggacccataagagtgacgcctgtggagcgcgtgctcttcctctgcagccaa

SEQ ID NO: 114127 - DNA, 4820 bp, Homo sapiens
  Payload ID: 2302
  Gene Symbol: CHST15
  Gene Name: carbohydrate (N-acetylgalactosamine 4-sulfate 6-O) sulfotransferase 15
  Uniprot ID: Q7LFX5
  ENST ID: ENST00000435907
  CDS Start-End: 652-2337
gtcactcccaaacttttcctcccagcgctcggggagtcaggttgacgcgccctggatgcggggctagaggctcggggctgggcgcgctcccgcggagccggagccgcagaggctcccgggctggactcaggcttctcaggaaatctggcattttttaaagtttgcgccccacaaagaggaaatattccaaaggtactcaggatgtaaaaggggagatcttcacagatgcctccgtggatggcatggcaatccatccatcaatgagaagaccatgatttcttttaattttctgtgtgtttccacattccccagtgagaattcttccacctttttttgtgccatgggaaaaacctgaagggcaggcagagctgctcccgaacttgtgaccttctctgaggttgcagcggctcttgtagaacatgactctgggacatcacttccttttgttttctttcggagctgaaccaaagaatgtgcaccctctttctctagtgctgtggtgtctgcttatttttgtatttgtgctttccatccatcttctgtgatcacaaggcattcttaaggttttctagcacgacttgcggacatccagactcgtggggggcccacccatggctcggtaagccagcagcccagggcactggcactaccatgaggcactgcattaattgctgcatacagctgttacccgacggcgcacacaagcagcaggtcaactgccaagggggcccccatcacggtcaccaggcgtgccccacgtgcaaaggagaaaacaaaattctgtttcgtgtggacagtaagcagatgaacttgcttgctgttctcgaagtgaggactgaagggaacgaaaactggggtgggtttttgcgcttcaaaaaggggaagcgatgtagcctcgtttttggactgataataatgaccttggtaatggcttcttacatcctttctggggcccaccaagagcttctgatctcatcacctttccattacggaggcttccccagcaaccccagcttgatggacagcgaaaacccaagtgacacaaaggagcatcaccaccaatcctctgtaaataatatttcatacatgaaggactatccaagcattaaattaattatcaacagcatcacaactaggattgagttcacgaccagacagctcccagacttagaagaccttaagaagcaggagttgcatatgttttcagtcatccccaacaaattccttccaaacagtaagagcccctgttggtacgaggagttctcggggcagaacaccaccgacccctacctcaccaactcctacgtgctctactccaagcgcttccgctccaccttcgacgccctgcgcaaggccttctggggccacctggcgcacgcgcacgggaagcacttccgcctgcgctgcctgccgcacttctacatcatagggcagcccaagtgcgggaccacagacctctatgaccgcctgcggctgcaccctgaggtcaagttctccgccatcaaggagccacactggtggacccggaagcgctttggaatcgtccgcctaagagatgggctgcgagaccgctatcccgtggaagattatctggacctctttgacctggccgcacaccagatccatcaaggactgcaggccagctctgcaaaggagcagagcaagatgaatacaatcattatcggggaggccagtgcctccacgatgtgggataataatgcctggacgttcttctacgacaacagcacggatggcgagccaccgtttctgacgcaggacttcatccacgcctttcagccaaatgccagactgattgtcatgctcagggaccctgtggagaggttgtactcagactatctctactttgcaagttcgaataaatccgcggacgacttccatgagaaagtgacagaagcactgcagctgtttgaaaattgcatgcttgattattcactgcgcgcctgcgtctacaacaacaccctcaacaacgccatgcctgtgaggctccaggttgggctctatgctgtgtaccttctggactggctcagcgtttttgacaagcaacagtttctcattcttcgcctggaagatcatgcatccaacgtcaagtacaccatgcacaaggtcttccagtttctgaacctagggcccttaagtgagaagcaggaggctttgatgaccaagagccccgcatccaatgcacggcgtcccgaggaccggaacctggggcccatgtggcccatcacacagaagattctgcgggatttctacaggcccttcaacgctaggctggcgcaggtcctcgcggatgaggcgtttgcgtggaagacgacgtgagagctgaattgttgctgcacgtgctgggcccgccaatgccgtcatcatcaggattttacaaatctctttgcggggaactgtttcactcatggtatggaaaaccccaggactctgccactctaggcacacatgaattataaccattttggaatttccttcgtgatgttcgagagctcagcaatggacccctcacagagctcctctatccgaggccattggagaccccagtttctcaagaattcagctctgctctgagcgtcctggagcttggggatgcagccagctggcctgcactgggtgtggagagaacacctagggaaggcagcctggccctgcccgcctccgccttctggagagcctctgggttctgagtcagcaagccagaggtcatgccacaggcctggctggaacttacacttcacgttccctttttttccccctagagatggggtctcgccgtgttgcacagactgtctgtattcaatggctatcttcacaggtgtgatcataccacattcacttctgaaacactcttgttgcgatcgctaacctcactgggacagagaaccgcagtctttcgagaatggaggctcttcattttttttttctcctttactccaaactcagccctccagtttcttcagatgtaaaccctgttaacgtcactgtttccaaaaggaaaaaaataagtcagtttttggcagcaccttcatctttctgacctcctcctattctgtccttgtggacttatgtttaacatagaaaatgaatgcgtttaaaacaaaaccactttctgcatttaaccagtcctggctctctctctgctgcctcttcatacgttttctcaagaacttcagtttataattggaagagaaatttttgctgttaatgccagaatgagcaacctcaaggaattgaacacttcttggaaaatctaggtaattcaagccctcatcaggtttacaagatcatcagagaaacagaggattttaatttttagttctggccggctacaggctccatttctctgccttcccattggaaatagtttatttccacattctccactgcgtgtggtcaaagttcctcacccagcaagggactatagatactcgtgtcccaattccaaaacacaatgcacaagctgaacttgggctgaacgtggcgtgttgagatttggaatgaggtttctaagagccgtgttcttcatggaattttccaggccacttggcagcttggtttaccgatggatgggctagagatcttgtcgtttcttggaagtcacagggaagattgaagagaacgcttgagcatccttggcaacagcccaggtgggacctggatgaagctttgcactcaagtattgtcaagggaagcttcctgtgaaccaaagttctcaggccaaggtctcgcccaccaaagccagaaagtgcaagcacccgtctacccagctctaacttgtatgtgtgagacagaccaggcttcgggggtaggaggatctgcagttgttcagccgtctttctgctggtgttgtctttctgccatcagagaagggacacacagcccgttcgaaggtgtgcagagggctctgagcgccaggatggccagggctgtttttgctactgaaggagcgtgtgtcctgaactcccacttgcagggacagtccccaccttctctatagccggcactgggagcagccgccagcagggaaatctggcctgagcacaaggatgctttagggagagatcacttcagtgtgtgtgtatatttatttgcagtacagtgcgcgcgtgtgtgtgtgtgtacgcgcacgtgtgggtgagtgcgtcttctgagtgggttctgttcagttgctaatgaggctcctccgctctggacacaacccttttatagattaatttctctgccaattaacttgtcattttcagtacatattttactattccacaccaaccataattacaacaagggatttttcttatgcactcctatgcatgtgaataacatgtggtgtaattctgcttcttacagaagtattactgaaggtattatttccaatattatttggtttattatgcggatcttttttatatatgcagtcccatcccttctgtgccactcaatgccatccagacatggtttttccctccaggggcctttctctccagagggcacttcggctgcctctgcttcctctcattcgaggcccggctcttgctgacagaataggttccgttctgggcggtggttctcgagcctgccattcaaaaccaaagcaaattggagcatttctcacaacatggtattgaagttcctttttgttctcaaaagttgtgaccgtgttaaattgtactcccttagtcctgtaaggtatgttaagtgaatcgcagttacgctgtacttttattaatatttaacataattaaagatggacccataagagtgacgcctgtggagcgcgtgctcttcctctgcagccaagc

SEQ ID NO: 114128 - DNA, 3553 bp, Homo sapiens
  Payload ID: 2302
  Gene Symbol: CHST15
  Gene Name: carbohydrate (N-acetylgalactosamine 4-sulfate 6-O) sulfotransferase 15
  Uniprot ID: Q7LFX5
  ENST ID: ENST00000628426
  CDS Start-End: 604-2124
gactcgggagttgccggcgcttcccggcggtggcggcgtctctggccggccttggtgcggcgagccgagcgaggcagctctgagccgcgcggaaatctggcattttttaaagtttgcgccccacaaagaggaaatattccaaaggtactcaggatgtaaaaggggagatcttcacagatgcctccgtggatggcatggcaatccatccatcaatgagaagaccatgatttcttttaattttctgtgtgtttccacattccccagtgagaattcttccacctttttttgtgccatgggaaaaacctgaagggcaggcagagctgctcccgaacttgtgaccttctctgaggttgcagcggctcttgtagaacatgactctgggacatcacttccttttgttttctttcggagctgaaccaaagaatgtgcaccctctttctctagtgctgtggtgtctgcttatttttgtatttgtgctttccatccatcttctgtgatcacaaggcattcttaaggttttctagcacgacttgcggacatccagactcgtggggggcccacccatggctcggtaagccagcagcccagggcactggcactaccatgaggcactgcattaattgctgcatacagctgttacccgacggcgcacacaagcagcaggtcaactgccaagggggcccccatcacggtcaccaggcgtgccccacgtgcaaaggagaaaacaaaattctgtttcgtgtggacagtaagcagatgaacttgcttgctgttctcgaagtgaggactgaagggaacgaaaactggggtgggtttttgcgcttcaaaaaggggaagcgatgtagcctcgtttttggactgataataatgaccttggtaatggcttcttacatcctttctggggcccaccaagagcttctgatctcatcacctttccattacggaggcttccccagcaaccccagcttgatggacagcgaaaacccaagtgacacaaaggagcatcaccaccaatcctctgtaaataatatttcatacatgaaggactatccaagcattaaattaattatcaacagcatcacaactaggattgagttcacgaccagacagctcccagacttagaagaccttaagaagcaggagttgcatatgttttcagtcatccccaacaaattccttccaaacagtaagagcccctgttggtacgaggagttctcggggcagaacaccaccgacccctacctcaccaactcctacgtgctctactccaagcgcttccgctccaccttcgacgccctgcgcaaggccttctggggccacctggcgcacgcgcacgggaagcacttccgcctgcgctgcctgccgcacttctacatcatagggcagcccaagtgcgggaccacagacctctatgaccgcctgcggctgcaccctgaggtcaagttctccgccatcaaggagccacactggtggacccggaagcgctttggaatcgtccgcctaagagatgggctgcgagaccgctatcccgtggaagattatctggacctctttgacctggccgcacaccagatccatcaaggactgcaggccagctctgcaaaggagcagagcaagatgaatacaatcattatcggggaggccagtgcctccacgatgtgggataataatgcctggacgttcttctacgacaacagcacggatggcgagccaccgtttctgacgcaggacttcatccacgcctttcagccaaatgccagactgattgtcatgctcagggaccctgtggagaggttgtactcagactatctctactttgcaagttcgaataaatccgcggacgacttccatgagaaagtgacagaagcactgcagctgtttgaaaattgcatgcttgattattcactgcgcgcctgcgtctacaacaacaccctcaacaacgccatgcctgtgtgtaccccccccccccgtaccccccgagctggcccctggcagaaggagctggtttgttgttattatgcaagcggcattgtgggtttgcgtttcagcataggaacagagagaagcgttttaatgtgcaaatgctgttccccattattcatggatgtaaaagctgaaaactgatgggctcttggtctggctcctgccttcctccctgctggtcacctgccacctccccctcctccctcagcaggaggatgagggtgcctttaggaagattaccatttagcaagacacccagcaattagaatcggcagacatgaggacacccaactctcaaattgtcttaagagcattctcttgagcggtggattgttttgttggtttaaaaaactacccatcaatgattttcaatgcttctttgacagagtctcaattgaaaaacattttctgttgattcctcaatcgtatctcttgttcttccttcagaactatgtctgtaaatttctagcctttttgaatgcaaaaagctgttattggtgaattcagcaccttttagccccgggatagttttccatgctgggctccctgggctggctgtgtacttcaacagcagggcttatgcagcgagcattgccgctgcgtgttccagagtggctttacaagccttgctctgctcagcgtctcgcatagcaaggcaccaacaggcctgctgtggagtcttggaagcccccaggtggtgggacttcaggccaagaggctctgccccctctttcttactacagaggccgtgggatctgggaggcagcatgcaggggcagcaggtgggattccaggctgccctgttggactttgtagtttggcaaggaagatgccacagggacacaggtaaccccagagcctgctctggtgccaggtaggaggagtacactttggaaccagccattggtgtgggtcaggtttccagcttggccatttgctggctctgtgactctaggcagttgtctcagcctttctgagactcagttgctttgtcatacaatggggtaataatgctgctgtaccaggctgttgtgatgggtctgtcttgcattcctgcgttcattcttgccactatgtcccctgcatgacgctgggtcctggggccacagcaatgccaggacaggtgtggtccttgccttcctgtgcagctggcggggagagaagatggaggctgggcagggagctctggccaccagagaaccacctgagaacggggcttcaggcaggttcttaggagagggaatgtctgtgctgaggcctgaaggagagttggccagggaactgagagcagcgtgtgcagaggcccagtggtcagcaccacctaccatacagaacgcagccagccgcctggtgtgggagatggggggcactgaggcagggggcttgggtgcgtggcacatggggccgcaccacctggtctagcctcagaagaagtctagacatcaccctgagagagatgggacccctcagagggttttaagcagaagatagtgtaggagtggaaaaggaatatctcactactgtgttcatggctgaggcacctataataaaagactaacgcgagaaagca

SEQ ID NO: 114129 - DNA, 826 bp, Homo sapiens
  Payload ID: 2302
  Gene Symbol: CHST15
  Gene Name: carbohydrate (N-acetylgalactosamine 4-sulfate 6-O) sulfotransferase 15
  ENST ID: ENST00000462406
  CDS Start-End: 627-826
cgctcggggagtcaggttgacgcgccctggatgcggggctagaggctcggggctgggcgcgctcccgcggagccggagccgcagaggctcccgggctggactcaggcttctcaggaaatctggcattttttaaagtttgcgccccacaaagaggaaatattccaaaggtactcaggatgtaaaaggggagatcttcacagatgcctccgtggatggcatggcaatccatccatcaatgagaagaccatgatttcttttaattttctgtgtgtttccacattccccagtgagaattcttccacctttttttgtgccatgggaaaaacctgaagggcaggcagagctgctcccgaacttgtgaccttctctgaggttgcagcggctcttgtagaacatgactctgggacatcacttccttttgttttctttcggagctgaaccaaagaatgtgcaccctctttctctagtgctgtggtgtctgcttatttttgtatttgtgctttccatccatcttctgtgatcacaaggcattcttaaggttttctagcacgacttgcggacatccagactcgtggggggcccacccatggctcggtaagccagcagcccagggcactggcactaccatgaggcactgcattaattgctgcatacagctgttacccgacggcgcacacaagcagcaggtcaactgccaagggggcccccatcacggtcaccaggcgtgccccacgtgcaaaggagaaaacaaaattctgtttcgtgtggacagtaagcagatgaacttgcttgctgttctcgaagtgaggactgaagggaacgaaaa

SEQ ID NO: 114130 - DNA, 2412 bp, Homo sapiens
  Payload ID: 2303
  Gene Symbol: CHST4
  Gene Name: carbohydrate (N-acetylglucosamine 6-O) sulfotransferase 4
  Uniprot ID: Q8NCG5
  ENST ID: ENST00000338482
  CDS Start-End: 344-1504
acaattgaaatcaagtcaaggcaagcaccacaggttcttgtcatttgtgcttagcggacttagctgatggaaatcggcaaagatcatcccaaagctcacacaactccctgcctgctctctctctcttccaagggagttgaccttcacagttgcctttcagtagtcaacatgccaggatgcctccagtctgggggaaaatgcttcctcatttgcttctcccagcccacctcaagcagtctccccaccccttgagtctcagcagtgttaaagctgttactttcacagcttcctgggagcgagtgctttctcaagcccgtcttgcaaggtcttccacttcagcacaatgctactgcctaaaaaaatgaagctcctgctgtttctggtttcccagatggccatcttggctctattcttccacatgtacagccacaacatcagctccctgtctatgaaggcacagcccgagcgcatgcacgtgctggttctgtcttcctggcgctctggctcttcttttgtggggcagctttttgggcagcacccagatgttttctacctgatggagcccgcctggcacgtgtggatgaccttcaagcagagcaccgcctggatgctgcacatggctgtgcgggatctgatacgggccgtcttcttgtgcgacatgagcgtctttgatgcctacatggaacctggtccccggagacagtccagcctctttcagtgggagaacagccgggccctgtgttctgcacctgcctgtgacatcatcccacaagatgaaatcatcccccgggctcactgcaggctcctgtgcagtcaacagccctttgaggtggtggagaaggcctgccgctcctacagccacgtggtgctcaaggaggtgcgcttcttcaacctgcagtccctctacccgctgctgaaagacccctccctcaacctgcatatcgtgcacctggtccgggacccccgggccgtgttccgttcccgagaacgcacaaagggagatctcatgattgacagtcgcattgtgatggggcagcatgagcaaaaactcaagaaggaggaccaaccctactatgtgatgcaggtcatctgccaaagccagctggagatctacaagaccatccagtccttgcccaaggccctgcaggaacgctacctgcttgtgcgctatgaggacctggctcgagcccctgtggcccagacttcccgaatgtatgaattcgtgggattggaattcttgccccatcttcagacctgggtgcataacatcacccgaggcaagggcatgggtgaccacgctttccacacaaatgccagggatgcccttaatgtctcccaggcttggcgctggtctttgccctatgaaaaggtttctcgacttcagaaagcctgtggcgatgccatgaatttgctgggctaccgccacgtcagatctgaacaagaacagagaaacctgttgctggatcttctgtctacctggactgtccctgagcaaatccactaagagggttgagaaggctttgctgccacctggtgtcagcctcagtcactttctctgaatgcttctgagccttgcctacatctctgagccttaactacatgtctgtgggtatcacactgagtgtgagttgtgtccacacgtgctcaagcagaaggacttttgtgtccatgcttgtgtctagaaaacagactggggaaccttatgtgagcagcacatcccaccagtgaaacagggtattgctcttcttcttttcttgatcttcctgtctgggcagacttcagagactttgtggcctggaggcctattaagcacgacacagtatcagtggaattgatccataaacctccctgtccacatcttgcccaatggggaatggatctttcaccaaagagctcaccagcattttccacagagatgcaaattctgagcccttggagttcccagtggattcaaggaaggaagtgggaacaaggttggatgcctacttatgagcttgaccatcacagctatcggtaatcagaaatatgaaacaaaatctctgcacaaaagagcaagctcttaagttcacagggtgcctgggctgcatttgaatatcacttcccctctgcattttcccatcacatagaagactttgacctgtgaagctgccatctgttaatactaaaattcccaaataaggttctgtttagaatgtccctttttatgcttcttaattattagcagtaaatgttcatttttatgggatcctaagctaagaatagatgtaatcatctttattggttttttaaaacacctttgctattatctatcacccatttatacagaaaattgctaagataatatttggtttcagatgatgaactaagtctataccctcttaagaattggtggaaaatagacaattagcagct

SEQ ID NO: 114131 - DNA, 2183 bp, Homo sapiens
  Payload ID: 2303
  Gene Symbol: CHST4
  Gene Name: carbohydrate (N-acetylglucosamine 6-O) sulfotransferase 4
  Uniprot ID: Q8NCG5
  ENST ID: ENST00000539698
  CDS Start-End: 264-1424
gttaaagctgttactttcacagcttcctgggagcgagtgctttctcaagcccgtcttgcaaggtgggtccttttttgtttttggcagaagggagggacagtgaaatgtgctctgagtagggacggttatgcaaaagcaagtaggaggaggaagccaagaggggagttggtgagtcagaggagaaaagcgcatggcccggctagcagtgagcctctcaaaagcagcagggaagcccaagccacaaggtcttccacttcagcacaatgctactgcctaaaaaaatgaagctcctgctgtttctggtttcccagatggccatcttggctctattcttccacatgtacagccacaacatcagctccctgtctatgaaggcacagcccgagcgcatgcacgtgctggttctgtcttcctggcgctctggctcttcttttgtggggcagctttttgggcagcacccagatgttttctacctgatggagcccgcctggcacgtgtggatgaccttcaagcagagcaccgcctggatgctgcacatggctgtgcgggatctgatacgggccgtcttcttgtgcgacatgagcgtctttgatgcctacatggaacctggtccccggagacagtccagcctctttcagtgggagaacagccgggccctgtgttctgcacctgcctgtgacatcatcccacaagatgaaatcatcccccgggctcactgcaggctcctgtgcagtcaacagccctttgaggtggtggagaaggcctgccgctcctacagccacgtggtgctcaaggaggtgcgcttcttcaacctgcagtccctctacccgctgctgaaagacccctccctcaacctgcatatcgtgcacctggtccgggacccccgggccgtgttccgttcccgagaacgcacaaagggagatctcatgattgacagtcgcattgtgatggggcagcatgagcaaaaactcaagaaggaggaccaaccctactatgtgatgcaggtcatctgccaaagccagctggagatctacaagaccatccagtccttgcccaaggccctgcaggaacgctacctgcttgtgcgctatgaggacctggctcgagcccctgtggcccagacttcccgaatgtatgaattcgtgggattggaattcttgccccatcttcagacctgggtgcataacatcacccgaggcaagggcatgggtgaccacgctttccacacaaatgccagggatgcccttaatgtctcccaggcttggcgctggtctttgccctatgaaaaggtttctcgacttcagaaagcctgtggcgatgccatgaatttgctgggctaccgccacgtcagatctgaacaagaacagagaaacctgttgctggatcttctgtctacctggactgtccctgagcaaatccactaagagggttgagaaggctttgctgccacctggtgtcagcctcagtcactttctctgaatgcttctgagccttgcctacatctctgagccttaactacatgtctgtgggtatcacactgagtgtgagttgtgtccacacgtgctcaagcagaaggacttttgtgtccatgcttgtgtctagaaaacagactggggaaccttatgtgagcagcacatcccaccagtgaaacagggtattgctcttcttcttttcttgatcttcctgtctgggcagacttcagagactttgtggcctggaggcctattaagcacgacacagtatcagtggaattgatccataaacctccctgtccacatcttgcccaatggggaatggatctttcaccaaagagctcaccagcattttccacagagatgcaaattctgagcccttggagttcccagtggattcaaggaaggaagtgggaacaaggttggatgcctacttatgagcttgaccatcacagctatcggtaatcagaaatatgaaacaaaatctctgcacaaaagagcaagctcttaagttcacagggtgcctgggctgcatttgaatatcacttcccctctgcattttcccatcacatagaagactttgacctgtgaagctgccatctgttaatactaaaattcccaaataaggttctgtttagaatgtccctttttatgcttcttaattattagcagtaaatgttcatttttatgggatcctaagctaagaataga

SEQ ID NO: 114132 - DNA, 3245 bp, Homo sapiens
  Payload ID: 2304
  Gene Symbol: CHST5
  Gene Name: carbohydrate (N-acetylglucosamine 6-O) sulfotransferase 5
  Uniprot ID: Q9GZS9
  ENST ID: ENST00000336257
  CDS Start-End: 1396-2631
ctctggctgctgctccagctctggcagacacgccaagctttgagaaagctcccagtgaggaactggtcttctggagactctgtgtggcatagagtgattcaaccaccttaagaagacctctggctttcctggaacacagatgtcgagacatctcccatggatttgtgatcagcgttgcagctctcccagcagccctggacggtggtgagtcccctcagctggccaggacagtactctgctctcacctctctgcttcttgggctccatcccagctccccatcaactgatcttcttgcaaacccacagggctccaggacaccctccttctggagcccatgctgcctacagcacttcactccccaccagtgatgacaacagttgctgttctttgtccactttatttacttgtttatctttaatgacaaaagttttttttttgttgtttttttttttttttttgaaacggagtctcactcttcactcaggctgcagtgcagtggcgcaatctcagctcactgccacctctgcctcccaggttcacgccattctcctgcctcagcctcccgagtagctgggactacaggcgcccaccatcacgcctggctaattttttgtatttttagtagagatggggtctcactgtgttagccaggatggtctcgatctcctgacctcgtgatccgcccgcctcggcctcccataatgctgggattacaggcgtgagccaccgcgcctggctgacaaaagttttatacctgcctgttaaaaaaattatataatacagaagcacaccttgtaaaaggtgcaatcctcagttatgggcatgactgcgtgttcccttcccccatcttcattataataaccccccaatccccccagatcctgtgagccaggtaccggaattatccctctttcacacacgggtaaagtgatccgtcacagagagatttaagtgatcttcataagcaagatcataggctaggaagtggcagagccaggattcaacctcggcgagcctggtggtgctctgacatccaccgaagcccccatcaagcccttttagctccacaacctaaaagggtctctctaagaggtatcctgaagcaaaagacaggagttctctttgaaacatagtatttctctctacagatagatagcctgtaggtatgtaagtaggtgggtgggtgggtaggtagacagtttgatgatatcccacattattctgcaactggacttctgctgtgagcacagactatattctggcctatgtcttgactccgtattcctgggaaagtgctcgactgagaccttgggagtcttgggaagtccaatgggtagggtagccgaatctgagggctgatccctgagggcactgggcagtaattggggcatgggatgggcatgagggcccgggtccctaaagttgcccactccacccgaaggcccccagccgcccgcatgtggctgccacggttctccagcaagacagtgacagtgctcctcctggcacagaccacctgcctcctgctcttcatcatctcccggccagggccctcatccccagccggcggcgaggatcgtgtgcacgtgctggtgctgtcctcgtggcgctcgggctcatccttcttgggccagctcttcagccagcaccccgacgtcttctacctgatggagcccgcgtggcatgtgtggaccaccctgtcgcagggcagcgcggcaacgctgcacatggccgtgcgcgacctgatgcgctctatctttttgtgcgacatggacgtgtttgatgcctacatgccacagagccgaaacctgtccgcctttttcaactgggcaacgagccgcgcgctgtgctcgccgcccgcctgcagcgcctttccccgaggcaccatcagcaagcaggacgtatgcaagacactgtgcacgcggcagccattcagcctggcccgggaggcctgccgctcctacagccacgtggtgctcaaggaggtgcgcttcttcaacctgcaggtgctctacccgctgctcagcgaccccgcgctcaacctgcgcatcgtgcacctggtgcgcgacccgcgggccgtgctgcgctcccgggaggcggcgggcccgatactggcacgcgacaacggcatcgtgctgggcaccaacggcaagtgggtggaggccgaccctcacctgcgcctgattcgcgaggtgtgccgcagccacgtgcgcatcgccgaggccgccacactcaagccgccacccttcctgcgcggccgctaccgcctggtgcgcttcgaggacctggcgcgggagccgctggcagagatccgcgcactctacgccttcaccggcctgaccctcacgccacagctcgaggcctggatccacaacatcacccacgggtcggggatcggcaagccaatcgaggccttccatacttcgtctaggaatgcgcgcaacgtctcccaggcctggcgccacgcgttgcccttcactaagatcctgcgcgtgcaggaggtgtgcgccggcgcgctgcagctgctgggctaccggcctgtgtactctgcggaccagcagcgtgacctcaccctggatctggtgctgccacgaggcccagaccacttcagctgggcatcgcctgactgagaactctgggccttagagcaggccccgaactgtggtcgccaggcccaggaggcgactgcatggtggagagggagctggggcgcatggggaagcaggtccctactatcaaccgggagtttggggtcctcccctgaagtaggcaaggactgcacgtttctttctctcctgattctcggttttcctttgagtcttctggagctgccttctcatcaggtgcactcttcatggaaagcaactcttgcccctacctcttctgggcgcagggagtaagttactgctaaattaaattaaatgtgtgccaggccgggtgcggtggctcatgcctgtaatcccagcattttgagaggctgaggcgggtggatcacctgaggtcaggagttcgaaaccagcctggccaacatagtgaaaccccctctctactaaaaatgcaaaaattagtccggcgtggtggcacactcctgtaatcccagctacttaggaggctgaggtgggagaatcacttggactccagaggtggaggttgcagtaagctgagatcatgccactgcaccctagcttgggtggcagagcaagactctatcaaaaaaataagtaataaatttgttcaaaagtcc

SEQ ID NO: 114133 - DNA, 514 bp, Homo sapiens
  Payload ID: 2304
  Gene Symbol: CHST5
  Gene Name: carbohydrate (N-acetylglucosamine 6-O) sulfotransferase 5
  ENST ID: ENST00000565039
  CDS Start-End: 217-514
aaagagctggctgtgcggtggaacttggaagagacgacgtctgggagcttttgctgagcccagggggagaggcgtccctctggctgctgctccagctctggcagacacgccaagctttgagaaagctcccagtgaggaactggtcttctggagactctgtgtggcatagagtgattcaaccaccttaagaagacctctggctttcctggaacacagatgtcgagacatctcccatggatttgtgatcagcgttgcagctctcccagcagccctggacggtggcccccagccgcccgcatgtggctgccacggttctccagcaagacagtgacagtgctcctcctggcacagaccacctgcctcctgctcttcatcatctcccggccagggccctcatccccagccggcggcgaggatcgtgtgcacgtgctggtgctgtcctcgtggcgctcgggctcatccttcttgggccagctcttcagccagcaccccgacgtcttctacctgatggagc

SEQ ID NO: 114134 - DNA, 7957 bp, Homo sapiens
  Payload ID: 2305
  Gene Symbol: CHST6
  Gene Name: carbohydrate (N-acetylglucosamine 6-O) sulfotransferase 6
  Uniprot ID: Q9GZX3
  ENST ID: ENST00000332272
  CDS Start-End: 181-1368
gacgacgtttgggagcctttgctgagtccagggagagaggcgtcccccaccgtgccgctgcagctcgggcagagccgccaagctttggggtgctgaggaacctctaatcatctcccatggatttgtgatcagcgttgcagctctcccagcagccctggacagtggcccccagcagtcagcatgtggctgccgcgcgtctccagcacagcagtgaccgcgctcctcctggcgcagaccttcctcctcctctttctggtttcccggccagggccctcgtccccagcaggcggcgaggcgcgcgtgcatgtgctggtgctgtcctcgtggcgctcgggctcgtccttcgtgggccaactcttcaaccagcaccccgacgtcttctacctaatggagcccgcgtggcacgtgtggaccaccctgtcgcagggcagcgccgcaacgctgcacatggctgtgcgcgacctggtgcgctccgtcttcctgtgcgacatggacgtgtttgatgcctatctgccttggcgccgcaacctgtccgacctcttccagtgggccgtgagccgtgcactgtgctcgccacccgcctgcagtgcctttccccgaggcgccatcagcagcgaggccgtgtgcaagccactgtgcgcgcggcagtccttcaccctggcccgggaggcctgccgctcctacagccacgtggtgctcaaggaggtgcgcttcttcaacctgcaggtgctctacccgctgctcagcgaccccgcgctcaacctacgcatcgtgcacctggtgcgcgacccgcgggccgtgctgcgctcccgggagcagacagccaaggctctggcgcgtgacaacggcatcgtgctgggcaccaacggcacgtgggtggaggccgaccccggcctgcgcgtggtgcgcgaggtgtgccgtagccacgtacgcatcgccgaggccgccacactcaagccgccaccctttctgcgcggccgctaccgcctggtgcgcttcgaggacctggcgcgggagccgctggcagaaatccgtgcgctctacgccttcactgggctcagtctcacgccacagctcgaggcctggatccataacatcacccacggatctggacctggtgcgcgccgcgaagccttcaagacttcgtccaggaatgcgctcaacgtctcccaggcctggcgccatgcgctgccctttgccaagatccgccgcgtgcaggaactgtgcgctggtgcgctgcagctgctgggctaccggcctgtgtactctgaggacgagcagcgcaacctcgcccttgatctggtgctgccacgaggcctgaacggcttcacttgggcatcatccaccgcctcgcacccccgaaattagtggaggccacagttgtagcaggcgctaggcccgggaggagagtgcatggtgcagagggggctggggcgcacggagaagcaggtccctatattgaccaaggagtttgtggtacgacccctccccctccccaagtaggcaaggactgcacgtttctttctctcttgattcttggttttcctttgagtcctctggagctgccttctcatcaggtgcactcttcatggaaagcaactcttgcccctcctcctctgggcacagggtgtgcgttcagatgacttggctcctactcaagggctttcttcccctttaactctctccttctggtgacacatcctgcagcagctgagggggtgccctggcactggctgggagtggagaggcactgtggtgaaatggctccagaggtctgtacatcacatacatatgcacacaggcacacatggcaaaactcggaagtgaaaggacttgtctgaaatcacatggtgagaaggaggatgaagggaggagagagcttttgctctgggtctccagtggataggagaggacctgcctcctgggtgagaagggtcagattttcctattttaattgctttagggaagagcaagcagagtcatgaccagggacacagctgagagatagaggaggctgtgaatgctgagaccagagtttatcatgctggacaagcctggaaggaggcaataagtgggaaaggtaggaggagagaaggctggggagggctgggcagcaagccaggcacagtgagtggcagagcaagagggggaaagcaggatcagtgcctggaaggcaggtgtgcccgtcagcggggagtggaactcatcaggcttgccaagaggttggaagggaaatggctctgggctggaactgtcttcccttggtccttctggtccaggccttggaggaaagcagaggatgatccctgcctgtgagccacacctcctagctctgggggcaaaggggcttagtaaaggaatgctggatgtgtagagggtttagtcccgagctcaggaaatgagagcctataagtgcccagtacatgtttaaaagaagagctcatggaacctctggaaaggacagggaagttgagttagccacataaatgaacccaagtcacattggaacacagagctggtctgggaactgtgttggctgccaacagaacttctgaccctgttacctgtgaaatgaggcagtttccctcacgttgccatcagctaccaggagcgatgctggtggtcactagcttctgatcctcatcctgggtgtggccacagattgggggaacctggattgtggagtcacatcctccctgcaaagcaagcagggcaagggagatctggcattttctgctttacgtggagggagaacaggcacattagccttgaagctgaagctcattttaggttccttccaggtttagaagcttcaaccaaatgaaacttgaatctgtccctcgtgacaattataggaggaaggtatttaaaaccccagatttatgaatgtgtactacatggcttagagaatgtctttgttcttgttcaggtggttataacaaaataccttaagagtgggtaacttggctggatgcagtggctcatgcctgtaatcccagcactgtgggaggccgagggggatgaatcacctgaggtcaggcattcaagaacagcctggccaacatggcgaagcccctcctctactaaaaatacaaaattagcgaggcatggtcgcacatacctgtaatcccagctcctcgggaagctgaggcaggagaatcgcttgaacccaggaggcggaggttgcagtgagccaagatcacgccattgcactccagcctgggtgacagagcaagactccatctcaaaaaaaaaaaaaagactgggtaacttataaacaaatgttcttctcacaagtctggagactgggaagtccaagatcaagccaccagtgctgtctgatgagggcccactttttcaaagacagtgccttctagctgtgtcctcttatcgtagaagatgggagacagctctccagggccatttttttttttttttttttttttttgagatggagtctggctctgtcgcccaggctggagtgcagtggcacaatctcggctcactgcaacctctgcctctctctgcctcctgagttcaagcaattctcctgcctcagcctcctgaggagctgggactacagggatgcaccaccatgcccagctaatttttgtatttttgtagacactgggtttcaccatattggccaggttggtctcaaactcctgacctcaagtgatctgcccacctcagcctcccaaagtgctgagattacaggcatgagccactgtacccagtctccagggccttttaaagaatgtcactaatcccattcttgaggtctccaccttcattatctaatcacctcccaaaggctccacatcccaacaccatcatattgtgggttaagatttcaaccacaagccaggcgtggtggctcatgcctgtaatcccagcattttggaaggctgaggcaggtggatcacttgaggtcaggagtttgagaccagcctggccaacatggtgaaaccccatctctactaaaaataaaaaaaattagccgggtgtggtggtgcacacctgtaattccagctactcaggaggctgaggcaggagaatcccttgaatccaggaggcggacagtgcagtgagccgagataatgccactgcactccagcctggatgacagagcaagactccatctcatgcccagccagcatgcccaacaagcttcatttgcccctgtttaggtcacaaattttattgatggctgcaattaatggcctcttggtatccaagtcctttgttgtatgacccatccattctcccctgactcccaaggtgtcaggacatgcttgactggctcctgaatttgctctctgcgcatgggcagtacagtcaagcctcacagtgaacccaggtcagctttcaggacaaagaaagtggcctggctgactaggcacagtaaagccagggctgggtaggtacatacttgtgctgatcacgtatgtcttatatctctgtgagagtgcagtcccaacaggaaggtttaatcactggggactgcccaatgctgtgacagggcacagagctctgggttgctgtgggggtgactgcattgaccactgttagtggtttgctgtgttgacactctgtgctgtgtgaccatggctcctgccatcaagaagtagagtctgtttctccacctctgaatccaggctggtcctgtgacttgctttgtcctgtagacaagtgtagtgcaacttcctgtgagccagtttgaagcataggccttggaagcaaaactttacctccacctgtcttaggttttcagctggggctctgctgtgatttgattgtgtctcccaaagttggaaccttgatccccagtgttgtgaggtgaggcttgatggaaagtaaattacgccgtgcgggttatgcccttgtgaatgggtagagaacattatttctgggcgcaggcatggtagctcatgtctgtaatcccagcattttgggaggttgaggtgtgcggattacttgaggtcaggagtttgagaccagcctggccaacaaggtaaaacaccatttctagttaaaatacaaaaattagccaggtgtggtggcacatgcctgtaaggccagctacttgggaggctgagacaggagaatcgcttgaacccaggaggcagagattgcagtgagctgagatcgcaccactgtactccagcctgggcaacaaagcgagagtctgtcttaaaaaaaaccaccattatttcaggagtgagttggttatcctgagagtggtgccttttaaatgaaggagttcattctttgtctttctctcgccctcactttgcccttctgccatatgatgccttccatcatgctaggacacagcaagaaggctctcgctagatgctggctccttgatcttgggcttcccagcctccagaactgtaagccaatacacttctatttattatatatgacccttgctgggttcagtggctcacgcctgtaatcccaatactttgcaaggctgaggcaggaggatcacttgagaccaggcactcaagaccagcctgggcaacatagtgagaccccatctctacaaagttaaaaaaaaattagcagggcatggtgtcgtgcacctgtagtcctagctacttgggaggctgagttgggaggactgcttgaccctgggaggttgaggctacattgaaccatgatcatgccagtgcactccagcctgagtgacagagcaagacacctatctctaaataaatgaccccatctgtggtattgttatagcaaaacaaaacagattaagagagactttttaatgaaaagacagattcacaaagaaaaacaatgtttttgtttctgtttttttgaggcagagtcttgctcttgtcccccaggctggagtgcagtggcgccatcttggctcactgcaacctccgcctcccagtttcaagcgattctcctgcctcagcctcccgagtagctgggattacagatgtacaccaccacgcccggctaattttttttgtatttttagtagagatggggtttcaccatgtcgatcaggctgggctggaactcctgacctcaggtgatccacctgccttggcctcccaatgtgctaggattacaggcatgagccactgtacctggcgaaaaacagtttgttaacacaggcagccaacatcactcaggataagcctcaatgaaaagtaacaaagtgatggcttggaacactgtcttacacagcatttttaaaaaatacaataaatttgtagagataggatgaccaaggacaacagttttaggcttccaaaggtggtaaactatgggatggtaaatatccgagaggaagctgatgcaacaggatttgtctgcagcagcctctggtaccacctctgagtcaagggttgtgtccagtgatggagagtttatatcgtgcctttaggcagaaaaggggagggaaacctgaacttttcctgcactttctgcttcttaattgccttcagctgaaaatcattttttatgtgaaaaaggcatagtctgagctgacgcctctgctttcctccacctgaagagaacctgcgtgctgctcctttgcttcggacctccgcctctgcccgggagaaagcccaggccagcctgctggacaagcagagaccatgagaaggagagttcaggggtcccaaaccaggccatcctagaccagccagctccagctgatccgcacgcagccacttcggctaccttctactggccaaagggagtcccagggctcacccagattcagaggtggggaaactgagtccaccacttgagaagagtagctataaagacatatgagcgaggccagctgagcccagcactgcggccaagtcgaagactttaggagcaataaaagtgcttattgtgtttcagtcatttgagtgttgtggtggtttgttacgtagcattgcctaaccgatacacttgagaacggagggctcctggcacctgcagcttccaatttccaccagggtccaggctccctccctgctggtagggctgtaattagtgtctccccttacctgtaggccctgtgatgcagctagaagtgtctaggcccagcagtcacccacaattaggggcaggcacgcttgctgcctctgctctggctgtgggagctcagaaggggcaatcaaagcactagatgggctgatgggtgcatagaaacagtgttgcctggaataggtcagagaacccacctatcaagaggctgttggggaatcaatggtgggccttatttttgttattttgcatcaagaagatatattatccacatcaacactgtatcaactcctcatggccaccacagaccctgtgtcccctagctttgtctttgatgtgcctttgtcacccactcctacagactgcgccccaccactgccacaactgccccatcacctctacagggttaaatcaatggttttaatttttgcctacctgatgggtgaaaaatgttacttgatgtttcagtctgcacttctttaattcctggggcagctgaacatcttttcatgcttatgactcaactgtattcctttttcattgttcaaggctgtgcccatgttgctgttgacttaccacagcctcttttgaatatgctttgttatttttgttgtgcaaatggtttctcctagcttgtcatctgttttttgttgttgttgttttgttaacttactttatggcattttcccctcaggcttcttaaaaaaaaagaagcttcattgagctataattgatatacaacatctgcacataaagtgtaaagtttgattaaacatttgtatatacctgtgaaatcaaatcaccacctcatcacaatcaaatttcaaaaagtttcacctagtttatcatattgttgaatgtgaatcctttccttatggccagtggattttatgtcttgttgaaacgactttgtcctgctacagtgataaaaatggtcttcacgctt

SEQ ID NO: 114135 - DNA, 2093 bp, Homo sapiens
  Payload ID: 2305
  Gene Symbol: CHST6
  Gene Name: carbohydrate (N-acetylglucosamine 6-O) sulfotransferase 6
  Uniprot ID: Q9GZX3
  ENST ID: ENST00000390664
  CDS Start-End: 693-1880
caccgggcagcgccgagggttgccggccggcgcgcggggagtagagggcgcgggccgcagtgccgggttccagagggagctctgcgccgggtccttccctgtggtagccccaggacacccccagcctcaacatcccattctgggactcctgccctgttcccacattcgttctacctcgagtctccaggagcttccagtggcttggtcaccgccaactctcgtccatgcctcttagagcccctttcccggcctcaccgggtgtcgcttaatagtcttgggaccttaaggagcaagtcagcccctgcggaccctcccagtgaagagaaagagctggctgtgcggtggaatttggaagagacgacgtttgggagcctttgctgagtccagggagagaggcgtcccccaccgtgccgctgcagctcgggcagagccgccaagctttgggttctctagggtgtgtacccaggagtggatctgctgtatcatatggtcactctattcaacctttcgagaaaccaccaaattgtttcttcaggaaatgcaccatctgacatccccattttatgaggatccccacgtctctgtcatctcaccaacacttgtgctgaggaacctctaatcatctcccatggatttgtgatcagcgttgcagctctcccagcagccctggacagtggcccccagcagtcagcatgtggctgccgcgcgtctccagcacagcagtgaccgcgctcctcctggcgcagaccttcctcctcctctttctggtttcccggccagggccctcgtccccagcaggcggcgaggcgcgcgtgcatgtgctggtgctgtcctcgtggcgctcgggctcgtccttcgtgggccaactcttcaaccagcaccccgacgtcttctacctaatggagcccgcgtggcacgtgtggaccaccctgtcgcagggcagcgccgcaacgctgcacatggctgtgcgcgacctggtgcgctccgtcttcctgtgcgacatggacgtgtttgatgcctatctgccttggcgccgcaacctgtccgacctcttccagtgggccgtgagccgtgcactgtgctcgccacccgcctgcagtgcctttccccgaggcgccatcagcagcgaggccgtgtgcaagccactgtgcgcgcggcagtccttcaccctggcccgggaggcctgccgctcctacagccacgtggtgctcaaggaggtgcgcttcttcaacctgcaggtgctctacccgctgctcagcgaccccgcgctcaacctacgcatcgtgcacctggtgcgcgacccgcgggccgtgctgcgctcccgggagcagacagccaaggctctggcgcgtgacaacggcatcgtgctgggcaccaacggcacgtgggtggaggccgaccccggcctgcgcgtggtgcgcgaggtgtgccgtagccacgtacgcatcgccgaggccgccacactcaagccgccaccctttctgcgcggccgctaccgcctggtgcgcttcgaggacctggcgcgggagccgctggcagaaatccgtgcgctctacgccttcactgggctcagtctcacgccacagctcgaggcctggatccataacatcacccacggatctggacctggtgcgcgccgcgaagccttcaagacttcgtccaggaatgcgctcaacgtctcccaggcctggcgccatgcgctgccctttgccaagatccgccgcgtgcaggaactgtgcgctggtgcgctgcagctgctgggctaccggcctgtgtactctgaggacgagcagcgcaacctcgcccttgatctggtgctgccacgaggcctgaacggcttcacttgggcatcatccaccgcctcgcacccccgaaattagtggaggccacagttgtagcaggcgctaggcccgggaggagagtgcatggtgcagagggggctggggcgcacggagaagcaggtccctatattgaccaaggagtttgtggtacgacccctccccctccccaagtaggcaaggactgcacgtttctttctctcttgattcttggttttcctttgagtcctctggagctgccttctcatcaggtgc

SEQ ID NO: 114136 - DNA, 2289 bp, Homo sapiens
  Payload ID: 2306
  Gene Symbol: CHST7
  Gene Name: carbohydrate (N-acetylglucosamine 6-O) sulfotransferase 7
  Uniprot ID: Q9NS84
  ENST ID: ENST00000276055
  CDS Start-End: 149-1609
aagtttccccttgtggatgcgcggccccgcggctctgctcctcccggcgcagaggggccgggagaggccacaggagcggacctggcacgggatttctgaggaacgggagaagactggcgcccgacccgctctggagggtcggtgaacgatgaagggccggcggcggcgacgccgagagtactgcaagttcgcgctgctgttggtgctgtacacgctggtgctgttgctcgtcccctccgtattggacggcggccgcgacggggacaagggcgccgagcactgccccggcctgcagcgcagcctgggagtgtggagcctggaggcggcggcggccggcgaacgcgagcagggagcggaggcgcgggccgccgaggaagggggcgcgaaccagtctcctcggttcccaagcaacctcagcggcgctgtcggggaggcagtgtctcgcgagaagcagcacatctacgtgcatgccacctggcgcaccggctcgtccttcctgggcgaactctttaaccagcacccggacgttttctacttgtatgagcccatgtggcatctatggcaggcgctgtatccgggcgacgccgagagcttgcagggcgcgctgcgcgacatgctgcgttcgctcttccgctgcgacttctccgtgctgcggctgtacgcgccgccgggggaccccgctgcgcgcgccccggacacggccaatcttaccacggccgccctcttccgctggcggactaacaaggtcatctgctcgccgccactgtgtcctggcgcaccccgtgcccgggccgaggtgggcctcgtcgaggacaccgcctgcgagcgcagctgcccacccgtggcgatacgcgccctggaggccgagtgccgaaagtacccggtggtggtcatcaaggacgtgcgcctgctcgatctgggcgtgctggtgcccctgttgcgtgatccaggcctcaacctgaaggtggtgcagcttttccgcgacccgagggcggtgcacaactcgcgcctcaagtctaggcagggactgctgcgcgagagcatccaggtgctgcgcacccgccagaggggcgaccgcttccaccgtgtgctgctggcgcacggcgtgggtgctcgccccgggggccagtctcgcgcgctgcccgccgcgccgcgcgccgatttcttcctgaccggtgcgctcgaggtgatctgcgaagcctggctgcgcgatctgcttttcgcgcgcggcgcgcccgcctggctgcggcgccgctacctgaggctgcgctatgaggacctggtgcggcagccacgcgcccagctgcgccgcctgctgcgcttctccgggctacgcgcgctcgcagcgctcgatgccttcgcgctcaacatgactcgcggcgcggcctacggcgccgaccggcccttccacctgtcagcgcgcgacgcccgggaggcggtgcacgcctggcgcgagcgcctgagccgagagcaggtgcgccaggtggaggccgcctgcgctccagccatgcgtctgctcgcctaccctcgcagcggagaggagggcgacgcggagcagcccagggaaggggagacgccgctggagatggatgccgacggcgccacgtagcctcccatccctgtccccggcacggatccgggtcagtcaccacgaacaggggcactcggcatgctgccccagcactggagaagcagcgctgtgggggcaatctgtcacactctcagagtctgggacttgacttgctaccaacaactgctgtgcaattctgctgagcaggaatatcatgagctgttcaataatgacggacgcattggttgagatgaagtttccagtaaggaagtgacagtgcaatgtggatatttatggctgtaaaataggaagagctttagttcccaggctgaacctgccactgctggagccatttcaacaaggcatcctcacaacaaagaagagatgtgatttggtaccatttcacaccagcaggtgtctggacgaaaacatcaatgtgaataagggccaagtgcagtcctgtcttgattaaattacttaataatattattaaataataataggtctgggcagtattgtttttaacctgactcatccagctgtccttcaaatagctccgtctccctctacccagaactgatttttaaaaagaagtaatttttctccctgggctgggaaaaccctaatgaactgaaacacacttttactttaaaatttttctgtctggcgtttttgtaatcatactattaaatgactctggagtcatgttaatgacagga

SEQ ID NO: 114137 - DNA, 4582 bp, Homo sapiens
  Payload ID: 2307
  Gene Symbol: CHST2
  Gene Name: carbohydrate (N-acetylglucosamine-6-O) sulfotransferase 2
  Uniprot ID: Q9Y4C5
  ENST ID: ENST00000309575
  CDS Start-End: 1385-2977
cgcagaggtgtcctcagtgcccggagaggttggcagtgtcggccccgagggaagcgtggagcggacggccgacaggggatttctgcccaaacttcatcaccaactctttctgagagcaaaaacatggggccgagtccggcagctgcacgcagaatccaactctctggcagctctcggcaccgacgagctccagatcccgcgttcgcatcccggcgctttgcgcgcagagctaagccttcggacccgtggactgcagcccccgcgcgtcgcggtaaagcgggtcgcgtctccagcccccgaggcgcagcgacggtgggagccggctcggcgttgggggcgggggcggggccggcgaagggggagggctgcgcggcggaggggaggagccgcggcgacagacggcggcgcgcaccaaccgggcgccggctggcaggagccgcgcagaggctggtccgagcgcgttgcgggcgcccggcgtaaggggagtcgggtagcagcatcctcctgggcgccgctttcgcgcggcggcggcggctgcggcggggtctttctttgcttaaatacctcgttggccagaagcgctggtaccgggggcgggttgggtcgggtcgggcagtgctgcacacctgggtttccttgcctagagctgtgtgttcggggtcctttggtccagtcggaggctgcggagcggcgggggttgcctgcgctgtccgcccgggcatcctcccggtgatggaagcagccgccgccgccgctgcggggtcgcgctgtgccccatccaccgctgccagagaggtgggaaaattcgccgcacggaggccgaaagcgagaggggctgcgccgctatgccgggagctgagtcccatataagccgcccccagccatcgcccccagccggcttcgttcccctgagcgagacaggaagctgcggtcccgagaaagcggaggagacgtcgctggagccgggaggcgccgggttcggcggagcgcggagcggggctctgggccgcgtgaaagtttttcttcccgagccgcagggcgcccgctgcccggaaactgcccagggataagtcggccgactccccagacccctcgaaggtgcggggacccccagcggaagcgagagggagcgaaatcgaggaacgagtgacagccggacagtccgccgggcggtgatccggggccgctcccgggcgcgccctcggctccaggtcctacccggagccgctgccatgggagagccagccttgggcgctggggaccagccgccgcgcccgcctcggagtcgcggcccgagtcccggcgccagcagccagcccgctgcgtccccttcccgggctgcagggctgcctccgccgcgccgccggcccggattgtgcctgtgatgagccgcagcccgcagcgagctctgcccccgggcgcgctccctcggctgctccaggctgcgcctgcagccgcgccgcgtgccctgctcccgcagtggccccggcgcccaggacgccgctggcccgcgtcccctctcggaatgaaggtgttccgtaggaaggcgctggtgttgtgcgcgggctatgcactgctgctggtgctcactatgctcaacctcctggactacaagtggcacaaggagccgctgcagcagtgcaaccccgatgggccgctgggtgccgcagcgggggcagccggaggcagctgggggcgcccagggccgcctccggccgggccgccccgtgctcatgcccgtttggacctccgcactccttaccgccctcccgctgccgccgtcggggcggctcctgcagccgcggcagggatggcgggggttgcggcccctccaggcaatggcactcggggcaccgggggcgtcggggacaagcggcagctggtgtacgtgttcaccacgtggcgctctggctcgtcgttcttcggcgagctattcaaccagaatcccgaggtgttctttctctacgagccagtgtggcatgtatggcaaaaactgtatccgggggacgccgtttccctgcagggggcagcgcgggacatgctgagcgctctttaccgctgcgacctctctgtcttccagttgtatagccccgcgggcagcggggggcgcaacctcaccacgctgggcatcttcggcgcagccaccaacaaggtggtgtgctcgtcaccactctgccccgcctaccgcaaggaggtcgtggggttggtggacgaccgcgtgtgcaagaagtgcccgccacagcgcctggcgcgtttcgaggaggagtgccgcaagtaccgcacactagtcataaagggtgtgcgcgtcttcgacgtggcggtcttggcgccactgctgcgagacccggccctggacctcaaggtcatccacttggtgcgtgatccccgcgcggtggcgagttcacggatccgctcgcgccacggcctcatccgtgagagcctacaggtggtgcgcagccgagacccgcgagctcaccgcatgcccttcttggaggccgcgggccacaagcttggcgccaagaaggagggcgtgggcggccccgcagactaccacgctctgggcgctatggaggtcatctgcaatagtatggctaagacgctgcagacagccctgcagccccctgactggctgcagggccactacctggtggtgcggtacgaggacctggtgggagaccccgtcaagacactacggagagtgtacgattttgtgggactgttggtgagccccgaaatggagcagtttgccctgaacatgaccagtggctcgggctcctcctccaagcctttcgtggtatctgcacgcaatgccacgcaggccgccaatgcctggcggaccgccctcaccttccagcagatcaaacaggtggaggagttttgctaccagcccatggccgtcctgggctatgagcgggtcaacagccctgaggaggtcaaagacctcagcaagaccctgcttcggaagccccgtctctaaaaggggttcccaggagacctgattccctgtggtgatacctataaagaggatcgtagtgtgtttaaataaacacagtccagactcaaacggaggaagcccacatattctattatagatatataaataatcacacacacacttgctgtcaatgttttgagtcagtgcatttcaaggaacagccacaaaatacacacccctaagaaaaggcaagacttgaacgttctgaccaggtgcccctcttcttctttgccttctcttgtcctctttctcctatttcttaccctgtcctccacctgccttccattttgaagtgggatgttaatgaaatcaagttccagtaacccaaatcttgtttacaaaatattcgtggtatctgtgaacatgttaagagtaatttggatgtgggggtgggggtggagaaaggggaagtggtccagaaacaaaaagccccattgggcatgataagccgaggaggcattcttctaaagcagacttttgtgtaaaaagcaaaggttacatgtgagtattaataaagaagataataaataatattctttttaatatttgcctccattactttggattcacctgtgttacttgtcctcagcttcagatagaatctccttcccctccctcgtttccatttttccagtctctttcctgaaaggcagctaaactgggtgggagcaatttttgcctccttggtaataacctgggggatgttttctcacatgtaaatctcagcctgttaggtgtccaggagtgaaacacatctttgtattctaaaggcagaaaccaaacagggcagtggaagaaaaagcacactactctcttcaactttgaacacaggaagaagcaactccttcaggacttgaaggcatttggtttttcattcctcttcagttaaaatggggaaccttgaagcagagaccaatgttttggtgctgaggctggttcagaaaaaggatttttaaaaaaagtatgtaatttttaaaagttctgatgattagaacacagacctcaggaaagtagcgtgaacatactgctggcgatggtagcagcttcgttggtttagcaaagtgacagaagtatctatttggagtgtttttctgaccctgacacggtatgtggaggtggatgaaagcagcgaagtttcatctgagaaccgtaagggttttcccttttcttacttgcttcccatttaaatcagtgcaagagagaatatgaatttataatgctttacttgggatgcctgtggaatatgttgcttttctttatcatgtttcctaaaagtaaatttgcaaagaaagtaacatgctgcagacagtataaggcttcagccaagagcttcttttagatatgataatgaattgtggtaaagaggaaatgaaaatgaactagtgtgtaggattttgaaatttggtattttccagggagaaaaccgttacattttcctgtagtggttatgatgttgtgtcctgaacccatttggtactgaaacattctgcagaatgttatactatgagaagaaattgtgaagcccaaatgggaacaagagacagtgtagttgtatatgacagtaaatacagtacaagttcactatca

SEQ ID NO: 114138 - DNA, 2659 bp, Homo sapiens
  Payload ID: 2308
  Gene Symbol: CARKD
  Gene Name: carbohydrate kinase domain containing
  Uniprot ID: Q8IW45
  ENST ID: ENST00000309957
  CDS Start-End: 15-1187
catttggcccggggatggtcacacgcgcgggggccggaactgccgtcgccggcgcggtcgttgtcgcattgctctcggccgcactcgcgctgtacgggccgccactggacgcagttttagaaagagcgttttcgctacgtaaagcacattcgataaaggatatggaaaatactttgcagctggtgagaaatatcatacctcctctgtcttccacaaagcacaaagggcaagatggaagaataggcgtagttggaggctgtcaggagtacactggagccccatattttgcagcaatctcagctctcaaagtgggcgcagacttgtcccacgtgttctgtgccagtgcggccgcacctgtgattaaggcctacagcccggagctgatcgtccacccagttcttgacagccccaatgctgttcatgaggtggagaagtggctgccccggctgcatgctcttgtcgtaggacctggcttgggtagagatgatgcgcttctcagaaatgtccagggcattttggaagtgtcaaaggccagggacatccctgttgtcatcgacgcggatggcctgtggctggtcgctcagcagccggccctcatccatggctaccggaaggctgtgctcactcccaaccacgtggagttcagcagactgtatgacgctgtgctcagaggccctatggacagcgatgacagccatggatctgtgctaagactcagccaagccctgggcaacgtgacggtggtccagaaaggagagcgcgacatcctctccaacggccagcaggtgcttgtgtgcagccaggaaggcagcagccgcaggtgtggagggcaaggggacctcctgtcgggctccctgggcgtcctggtacactgggcgctccttgctggaccacagaaaacaaatgggggcatatcagacttgaaattgacaatttggggtcctgagattgaaacaggagtcaaaaccagagcccagggtagctgcggcccccggaccacgacgcccacttccccacacctcctgctgtccccctctccgcaggtccagccctctcctggtggccgcgtttggcgcctgctctctcaccaggcagtgcaaccaccaagccttccagaagcacggtcgctccaccaccacctccgacatgatcgccgaggtgggggccgccttcagcaagctctttgaaacctgagcccgcgcagaccagaagtaaacaggcaccttggacgggggagagcgtgtgtgtgatgggaaaatccggacccacgcgtgtgctgaaggcgtacggtgcttgccagattttcaacttgagcataaattggttgccattgagaatttaagaatctggaatattgcagcttttggttaaacttaatgcatggttggagatgttatggcgacactaaacaaagtattcctgaactttccttagctccttggtagtaactgggaagacagaaatgaagaaaatcacatgagaatgaagaattctttagcagctcaacagagtttctcggcctgctcccagatcggcgaagtttctacttgttactctctctgccggcgcccttcgttcctcctctgcttcccttccctagtctttcctccggcagggagctgggcaggggtccccgggtgtctccctgagtcccgactgcactgactgggtccatcagagggctgcttcgttctccagctcatcttcttttaaagtggtgactagcttggtggtatctggctgctggtgtttggcttattgacatactccagggtaatcaatgatgactttgtttggaaacccttttggaggcaccatgggaacagaaggaaacatgagtgacgctgacccttgagtgtgtgggtggggagctctgagacgcctcctgtcccacgctctccggtgtccgtgtctacacaggggtccccatgatacccaccggccccagcagggcagaccggaccggggacgggcacggtgaagggctgcagcctggggtctgacgtggcccctagtgctgtctcaggagaaggctctggaggacttgaggcatgctgggcctggtgcagtgatggcgctaaggagacccggggaaagacagtatcgtggtcacgtatgcttaggaagcagcacagccgtgtccttagggatgttcgcgtccagtaaagacactggtaactgcggtttcagccaacactcttcatggcagtgtcgacctcgggttagcttctgttgtctttgtggatggttttcctggagcggcctgacgttgacgtgttctctggtcccatgtcttagcggggcatggtacggtttcgtgcctgacgcgtgcattagggtgttctcttatactttcagtagcatctttccacagcaagggccaaaccctcctggttcccttcagagtctttttggcctgatgatgactcttgagtgataccctgtgatgcagacatgccccagatggattctactttctttaaaactagggactttcaagattaaaaaaaagattgtcactactaatttgacgcctaacttcagaagcttcactgtctacatgtgaacttttccagaaaaactgtgccatggacatttttcctctggggaattaacatctaaattctggtaactattaaaagacagatctggttaattt

SEQ ID NO: 114139 - DNA, 2311 bp, Homo sapiens
  Payload ID: 2308
  Gene Symbol: CARKD
  Gene Name: carbohydrate kinase domain containing
  Uniprot ID: Q8IW45
  ENST ID: ENST00000424185
  CDS Start-End: 133-846
atctagaaccgggtgtgattgagcgagttgggatcccactgccgacagccgcgcggaggcggtcgggaaaccggaaaacgcttccaatggctgtgtttccggcgacggcgcgggggcagctgggaatccggaatgctgcccgatggccctgggtcctcgctgtggggcaatccgggcttgcagacgagtgacagccccaatgctgttcatgaggtggagaagtggctgccccggctgcatgctcttgtcgtaggacctggcttgggtagagatgatgcgcttctcagaaatgtccagggcattttggaagtgtcaaaggccagggacatccctgttgtcatcgacgcggatggcctgtggctggtcgctcagcagccggccctcatccatggctaccggaaggctgtgctcactcccaaccacgtggagttcagcagactgtatgacgctgtgctcagaggccctatggacagcgatgacagccatggatctgtgctaagactcagccaagccctgggcaacgtgacggtggtccagaaaggagagcgcgacatcctctccaacggccagcaggtgcttgtgtgcagccaggaaggcagcagccgcaggtgtggagggcaaggggacctcctgtcgggctccctgggcgtcctggtacactgggcgctccttgctggaccacagaaaacaaatgggtccagccctctcctggtggccgcgtttggcgcctgctctctcaccaggcagtgcaaccaccaagccttccagaagcacggtcgctccaccaccacctccgacatgatcgccgaggtgggggccgccttcagcaagctctttgaaacctgagcccgcgcagaccagaagtaaacaggcaccttggacgggggagagcgtgtgtgtgatgggaaaatccggacccacgcgtgtgctgaaggcgtacggtgcttgccagattttcaacttgagcataaattggttgccattgagaatttaagaatctggaatattgcagcttttggttaaacttaatgcatggttggagatgttatggcgacactaaacaaagtattcctgaactttccttagctccttggtagtaactgggaagacagaaatgaagaaaatcacatgagaatgaagaattctttagcagctcaacagagtttctcggcctgctcccagatcggcgaagtttctacttgttactctctctgccggcgcccttcgttcctcctctgcttcccttccctagtctttcctccggcagggagctgggcaggggtccccgggtgtctccctgagtcccgactgcactgactgggtccatcagagggctgcttcgttctccagctcatcttcttttaaagtggtgactagcttggtggtatctggctgctggtgtttggcttattgacatactccagggtaatcaatgatgactttgtttggaaacccttttggaggcaccatgggaacagaaggaaacatgagtgacgctgacccttgagtgtgtgggtggggagctctgagacgcctcctgtcccacgctctccggtgtccgtgtctacacaggggtccccatgatacccaccggccccagcagggcagaccggaccggggacgggcacggtgaagggctgcagcctggggtctgacgtggcccctagtgctgtctcaggagaaggctctggaggacttgaggcatgctgggcctggtgcagtgatggcgctaaggagacccggggaaagacagtatcgtggtcacgtatgcttaggaagcagcacagccgtgtccttagggatgttcgcgtccagtaaagacactggtaactgcggtttcagccaacactcttcatggcagtgtcgacctcgggttagcttctgttgtctttgtggatggttttcctggagcggcctgacgttgacgtgttctctggtcccatgtcttagcggggcatggtacggtttcgtgcctgacgcgtgcattagggtgttctcttatactttcagtagcatctttccacagcaagggccaaaccctcctggttcccttcagagtctttttggcctgatgatgactcttgagtgataccctgtgatgcagacatgccccagatggattctactttctttaaaactagggactttcaagattaaaaaaaagattgtcactactaatttgacgcctaacttcagaagcttcactgtctacatgtgaacttttccagaaaaactgtgccatggacatttttcctctggggaattaacatctaaattctggtaactattaaaagacagatctggttaattt

SEQ ID NO: 114140 - DNA, 2842 bp, Homo sapiens
  Payload ID: 2309
  Gene Symbol: CHST10
  Gene Name: carbohydrate sulfotransferase 10
  Uniprot ID: O43529
  ENST ID: ENST00000264249
  CDS Start-End: 387-1457
cggccggataggcgcgagggggccgcgtgaggcggtgccggcgttctggcccccaaagccggtctagcgcgccgggcgtcttccttacttccgctgccgccgccgccacatcccgggacccgacgggccgcggcgcggaggcctcggggcaaggtggggcgggcctcccgagctcccaggaccccgcgcgcttcgcccacaggcccggcgaagcccgacccgcgcggcgcccccagggccaggggaggagcctaaggacccggacgagcgccgctccagtaggtgacaagaggaaccaagaacctcagttcaggggaaacacagcaaggaaatgtgagccccaggctgcagaaggaagagtcagtgaatggctgcggtgtgacaacatgcaccaccagtggcttctgctggccgcatgcttttgggtgattttcatgttcatggtggctagcaagttcatcacgttgacctttaaagacccagatgtgtacagtgccaaacaggagtttctgttcctgacaaccatgccggaagtgaggaagttgccagaagagaagcacattcctgaggaactgaagccaactgggaaggagcttccagacagccagctcgttcagcccctggtctacatggagcgcctggaactcatcagaaacgtctgcagggatgatgccctgaagaatctctcgcacactcctgtctccaagtttgtcctggaccgaatatttgtctgtgacaagcacaagattcttttctgccagactcccaaagtgggcaacacccagtggaagaaagtgctgattgttctaaatggagcattttcttccattgaggagatccccgaaaacgtggtgcacgaccacgagaagaacggccttcctcggctctcttccttcagtgatgcagaaattcagaagcgattgaaaacatacttcaagttttttattgtaagagatcccttcgaaagacttatttctgcatttaaggataaatttgttcacaatccccggtttgagccttggtacaggcatgagattgctcctggcatcatcagaaaatacaggaggaaccggacagagacccgggggatccagtttgaagatttcgtgcgctacctcggcgatccgaaccacagatggctagaccttcagtttggggaccacatcattcactgggtgacgtatgtagagctctgtgctccctgtgagataatgtacagtgtgattggacaccacgagaccctggaggacgatgccccatacatcttaaaagaggctggcattgaccacctggtgtcatacccgactatccctccgggcattaccgtgtataacagaaccaaggtggagcactatttcctgggcatcagcaaacgagacatccgacgcctgtatgcccgtttcgaaggggactttaagctctttgggtaccagaaaccagactttttgctaaactaatgcataagacctatgaattcaaatatctttattagacctggggctaaccaggtgaagatctgagcccagaaatgacccttcctccaccacacccctcctttgaggacgcccggggtctcccacaggcctgtgagttgcctcggcatatgacgcagaaccccaactgttacaacttagtttggatgtaagatgctctgaggaccctgcccacacccctgcgtgcattaggatgtcgctggcctttgctcacctcagaggggagaaaaggctaaagatttgcagtttgacagcccagcagggaggaagcatcacacagcgttaggagccgtttccttcaggtgttaaggaaggggatgcccctgaggttctcctggctagtcagggtggcttcacccatcactggtgggttgcaggaacagcacccaggactctgaggagggacagagaagcaagggggctgctgaaatcgcagagacttttgcagcatcagatctgaggagtaaaacggcacctctggccttcatcttggtgctgcgacaattgtggaggcaaagcattctttctgtgactattttgttcctgtagacagtcagcgatggccagagggtggtgtggtgtccaggggtccatctttccagaatccatgcctgtgtaatgctggtccatgcttctgaacctgtgtctgccaagcgcctatttcattcagcacaagacatacgattttagaaggtgaggggaggggaggctttttctacctgagaaggggagtgtctttgagggccttaaaaggaccatggcccaggaatgggggcgctggttgggcttggagctcaggctgctgtggatcccggcgcatcagttctgacttgccttacctgggtggacagcagtgaatctccacctgtcttctccagggagctcccatgttggggctgaagacgagcaggggcaacctgccagcatcacagaattcagtgtagtttatacatttcgattcctttcatctcagcaaaatgggcactgccagagccatttctgatcacaccaccatcctggaccatgtgactggaaggtgggtaaccaagttcaccagcaataaaacccagcgcccaggtagcctccagcagtgcggcttcctggcaacaaggtaggccctggtgcagggcaagccgcagcgaccatttcagataccgtccacagccaggaccgctgagaactgggacagtttcctgggatgagtgccagcctgagcctgcatggtgccgccgagcccggggtggaggagggagccaggcttcgcttcaaggcggcctctaccttttctcagaatggtttcctgattgtgtcaatgtgaaagttaaataaaatttatgtgccaaacctga

SEQ ID NO: 114141 - DNA, 604 bp, Homo sapiens
  Payload ID: 2309
  Gene Symbol: CHST10
  Gene Name: carbohydrate sulfotransferase 10
  ENST ID: ENST00000409046
  CDS Start-End: 181-604
tgggcccctctccccgccgcggggcgcacggaaaaaccggggaacccgcgggttttgtcctggcgagccacatcccgtgacaagaggaaccaagaacctcagttcaggggaaacacagcaaggaaatgtgagccccaggctgcagaaggaagagtcagtgaatggctgcggtgtgacaacatgcaccaccagtggcttctgctggccgcatgcttttgggtgattttcatgttcatggtggctagcaagttcatcacgttgacctttaaagacccagatgtgtacagtgccaaacaggagtttctgttcctgacaaccatgccggaagtgaggaagttgccagaagagaagcacattcctgaggaactgaagccaactgggaaggagcttccagacagccagctcgttcagcccctggtctacatggagcgcctggaactcatcagaaacgtctgcagggatgatgccctgaagaatctctcgcacactcctgtctccaagtttgtcctggaccgaatatttgtctgtgacaagcacaagattcttttctgccagactcccaaagtgggcaacacccagtggaagaaagtgctgattgttctaa

SEQ ID NO: 114142 - DNA, 1338 bp, Homo sapiens
  Payload ID: 2309
  Gene Symbol: CHST10
  Gene Name: carbohydrate sulfotransferase 10
  Uniprot ID: O43529
  ENST ID: ENST00000409701
  CDS Start-End: 268-1338
aagaaggagcatgtgcagcttcggtgcgaggggagtcaggggtgggaatgcacgttccctgcctgaggggccccggggtgccctgagcctctgatcttcgctgtcaggaggcctgtccgaagttggaggttgaggcatgcagttctgcacttctggctgggaagtgacaagaggaaccaagaacctcagttcaggggaaacacagcaaggaaatgtgagccccaggctgcagaaggaagagtcagtgaatggctgcggtgtgacaacatgcaccaccagtggcttctgctggccgcatgcttttgggtgattttcatgttcatggtggctagcaagttcatcacgttgacctttaaagacccagatgtgtacagtgccaaacaggagtttctgttcctgacaaccatgccggaagtgaggaagttgccagaagagaagcacattcctgaggaactgaagccaactgggaaggagcttccagacagccagctcgttcagcccctggtctacatggagcgcctggaactcatcagaaacgtctgcagggatgatgccctgaagaatctctcgcacactcctgtctccaagtttgtcctggaccgaatatttgtctgtgacaagcacaagattcttttctgccagactcccaaagtgggcaacacccagtggaagaaagtgctgattgttctaaatggagcattttcttccattgaggagatccccgaaaacgtggtgcacgaccacgagaagaacggccttcctcggctctcttccttcagtgatgcagaaattcagaagcgattgaaaacatacttcaagttttttattgtaagagatcccttcgaaagacttatttctgcatttaaggataaatttgttcacaatccccggtttgagccttggtacaggcatgagattgctcctggcatcatcagaaaatacaggaggaaccggacagagacccgggggatccagtttgaagatttcgtgcgctacctcggcgatccgaaccacagatggctagaccttcagtttggggaccacatcattcactgggtgacgtatgtagagctctgtgctccctgtgagataatgtacagtgtgattggacaccacgagaccctggaggacgatgccccatacatcttaaaagaggctggcattgaccacctggtgtcatacccgactatccctccgggcattaccgtgtataacagaaccaaggtggagcactatttcctgggcatcagcaaacgagacatccgacgcctgtatgcccgtttcgaaggggactttaagctctttgggtaccagaaaccagactttttgctaaactaa

SEQ ID NO: 114143 - DNA, 585 bp, Homo sapiens
  Payload ID: 2309
  Gene Symbol: CHST10
  Gene Name: carbohydrate sulfotransferase 10
  ENST ID: ENST00000448989
  CDS Start-End: 159-585
atgcaataagaaggcgtccttgtgcgggatgctgtgacccgcggaattattgatattgtgcgagcctacaatttacttctttcatccttggctgagaatttgcgtttgtaattgtagatggagagaggaagaaagggttcagcttgggtccaaggagcatgcagaggaaggcagggaagaaggagcatgtgcagcttcgtgacaagaggaaccaagaacctcagttcaggggaaacacagcaaggaaatgtgagccccaggctgcagaaggaagagtcagtgaatggctgcggtgtgacaacatgcaccaccagtggcttctgctggccgcatgcttttgggtgattttcatgttcatggtggctagcaagttcatcacgttgacctttaaagacccagatgtgtacagtgccaaacaggagtttctgttcctgacaaccatgccggaagtgaggaagttgccagaagagaagcacattcctgaggaactgaagccaactgggaaggagcttccagacagccagctcgttcagcccctggtctacatggagcgcctggaactcatcagaaacgtctgcagggatg

SEQ ID NO: 114144 - DNA, 673 bp, Homo sapiens
  Payload ID: 2309
  Gene Symbol: CHST10
  Gene Name: carbohydrate sulfotransferase 10
  ENST ID: ENST00000435960
  CDS Start-End: 574-673
agtagggtgagctcggggacgcgcaggcgggtgggtttcagcgcctgggcccctctccccgccgcggggcgcacggaaaaaccggggaacccgcgggttttgtcctggcgagccacatcccgatggagagaggaagaaagggttcagcttgggtccaaggagcatgcagaggaaggcagggaagaaggagcatgtgcagcttcggtgcgaggggagtcaggggtgggaatgcacgttccctgcctgaggggccccggggtgccctgagcctctgatcttcgctgtcaggaggcctgtccgaagttggaggttgaggcatgcagttctgcacttctggctgggaaggtgaaccaggttttccaaaatgtcatttttgctttccaagtctgcaaggcaggaaagggttgggcagtgaatggaaagtagtgcagccaggttctggttagctcagcggcaggactgtcataacgtgacaagaggaaccaagaacctcagttcaggggaaacacagcaaggaaatgtgagccccaggctgcagaaggaagagtcagtgaatggctgcggtgtgacaacatgcaccaccagtggcttctgctggccgcatgcttttgggtgattttcatgttcatggtggctagcaagttcatcacgttgacctttaaagacccagatg

SEQ ID NO: 114145 - DNA, 574 bp, Homo sapiens
  Payload ID: 2309
  Gene Symbol: CHST10
  Gene Name: carbohydrate sulfotransferase 10
  ENST ID: ENST00000420858
  CDS Start-End: 176-574
actatctaggtttatgtaagaacgctctgatgtttgcagaagaacatcgcctaacgatacatttctcagaagtgacaagaggaaccaagaacctcagttcaggggaaacacagcaaggaaatgtgagccccaggctgcagaaggaagagtcagtgaatggctgcggtgtgacaacatgcaccaccagtggcttctgctggccgcatgcttttgggtgattttcatgttcatggtggctagcaagttcatcacgttgacctttaaagacccagatgtgtacagtgccaaacaggagtttctgttcctgacaaccatgccggaagtgaggaagttgccagaagagaagcacattcctgaggaactgaagccaactgggaaggagcttccagacagccagctcgttcagcccctggtctacatggagcgcctggaactcatcagaaacgtctgcagggatgatgccctgaagaatctctcgcacactcctgtctccaagtttgtcctggaccgaatatttgtctgtgacaagcacaagattcttttctgccagactcccaaagtgggcaacacccag

SEQ ID NO: 114146 - DNA, 559 bp, Homo sapiens
  Payload ID: 2309
  Gene Symbol: CHST10
  Gene Name: carbohydrate sulfotransferase 10
  ENST ID: ENST00000421474
  CDS Start-End: 305-559
agcgcctgggcccctctccccgccgcggggcgcacggaaaaaccggggaacccgcgggttttgtcctggcgagccacatcccgtgacaagaggaaccaagaacctcagttcaggggaaacacagcaaggaaatgtgagccccaggctgcagaagaccctactgtcgcattaatttctggcaaccacactgagaaaggtgtagattaagctggaaaatcacgaagagtgccaagggattggtcagtttttactgggggtctgcaccaggccaggaagagtcagtgaatggctgcggtgtgacaacatgcaccaccagtggcttctgctggccgcatgcttttgggtgattttcatgttcatggtggctagcaagttcatcacgttgacctttaaagacccagatgtgtacagtgccaaacaggagtttctgttcctgacaaccatgccggaagtgaggaagttgccagaagagaagcacattcctgaggaactgaagccaactgggaaggagcttccagacagccagctcgttcagcccctggtctacatggagcgcctg

SEQ ID NO: 114147 - DNA, 692 bp, Homo sapiens
  Payload ID: 2309
  Gene Symbol: CHST10
  Gene Name: carbohydrate sulfotransferase 10
  ENST ID: ENST00000418201
  CDS Start-End: 501-692
gggtgggtttcagcgcctgggcccctctccccgccgcggggcgcacggaaaaaccggggaacccgcgggttttgtcctggcgagccacatcccgtgactgggttaaaatgaaaagacacaaagagagaagtggtcttttcccttccctccccattataattaagagcttagtccatcttggctcagaattggaattcagaattcagaattgctcttgaccctgaagaatagaatctcaaagaaatacctgagcagaaaattctcttcttcgctgaaatgaaaattggagtgtttgcaaaactgaacaaagaaaggaaagaatttgtaaacatcacaggcaacttgcagttatattcggatcatttttcagtgtttgaggagttcatacaataaaaagtgacaagaggaaccaagaacctcagttcaggggaaacacagcaaggaaatgtgagccccaggctgcagaaggaagagtcagtgaatggctgcggtgtgacaacatgcaccaccagtggcttctgctggccgcatgcttttgggtgattttcatgttcatggtggctagcaagttcatcacgttgacctttaaagacccagatgtgtacagtgccaaacaggagtttctgttcctgacaaccatgccggaagtgaggaagttgccagaagagaagcacattcctgaggaactgaag

SEQ ID NO: 114148 - DNA, 1232 bp, Homo sapiens
  Payload ID: 2310
  Gene Symbol: CA1
  Gene Name: carbonic anhydrase I
  Uniprot ID: P00915
  ENST ID: ENST00000431316
  CDS Start-End: 116-901
ctcctccctattctagaaatagaagggaggaggacctattttgttccatcctgtaggctgatcctttacacctaggactggaagaaataagaaaaagaaaactcagtagaagataatggcaagtccagactggggatatgatgacaaaaatggtcctgaacaatggagcaagctgtatcccattgccaatggaaataaccagtcccctgttgatattaaaaccagtgaaaccaaacatgacacctctctgaaacctattagtgtctcctacaacccagccacagccaaagaaattatcaatgtggggcattccttccatgtaaattttgaggacaacgataaccgatcagtgctgaaaggtggtcctttctctgacagctacaggctctttcagttccattttcactggggcagtacaaatgagcatggttcagaacatacagtggatggagtcaaatattctgccgagcttcacgtagctcactggaattctgcaaagtactccagccttgctgaagctgcctcaaaggctgatggtttggcagttattggtgttttgatgaaggttggtgaggccaacccaaagctgcagaaagtacttgatgccctccaagcaattaaaaccaagggcaaacgagccccattcacaaattttgacccctctactctccttccttcatccctggatttctggacctaccctggctctctgactcatcctcctctttatgagagtgtaacttggatcatctgtaaggagagcatcagtgtcagctcagagcagctggcacaattccgcagccttctatcaaatgttgaaggtgataacgctgtccccatgcagcacaacaaccgcccaacccaacctctgaagggcagaacagtgagagcttcattttgatgattctgagaagaaacttgtccttcctcaagaacacagccctgcttctgacataatccagtaaaataataatttttaagaaataaatttatttcaatattagcaagacagcatgccttcaaatcaatctgtaaaactaagaaacttaaattttagttcttactgcttaattcaaataataattagtaagctagcaaatagtaatctgtaagcataagcttatgcttaaattcaagtttagtttgaggaattctttaaaattacaactaagtgatttgtatgtctatttttttcagtttatttgaaccaataaaataattttatctctttc

SEQ ID NO: 114149 - DNA, 551 bp, Homo sapiens
  Payload ID: 2310
  Gene Symbol: CA1
  Gene Name: carbonic anhydrase I
  ENST ID: ENST00000522389
  CDS Start-End: 47-430
aaaaagaaaactcagtagaagataatggcaagtccagactggggatatgatgacaaaaatgcttcacgtagctcactggaattctgcaaagtactccagccttgctgaagctgcctcaaaggctgatggtttggcagttattggtgttttgatgaagggcaaacgagccccattcacaaattttgacccctctactctccttccttcatccctggatttctggacctaccctggctctctgactcatcctcctctttatgagagtgtaacttggatcatctgtaaggagagcatcagtgtcagctcagagcagctggcacaattccgcagccttctatcaaatgttgaaggtgataacgctgtccccatgcagcacaacaaccgcccaacccaacctctgaagggcagaacagtgagagcttcattttgatgattctgagaagaaacttgtccttcctcaagaacacagccctgcttctgacataatccagtaaaataataatttttaagaaataaatttatttcaatattagcaagacagcatgccttca

SEQ ID NO: 114150 - DNA, 614 bp, Homo sapiens
  Payload ID: 2310
  Gene Symbol: CA1
  Gene Name: carbonic anhydrase I
  ENST ID: ENST00000522579
  CDS Start-End: 168-614
gtggtacccagtcctcaggtgcaaccccctgcgtggtcctctgtggcagccttctctcattcagagctaaatagaagggaggaggacctattttgttccatcctgtaggctgatcctttacacctaggactggaagaaataagaaaaagaaaactcagtagaagataatggcaagtccagactggggatatgatgacaaaaatggtcctgaacaatggagcaagctgtatcccattgccaatggaaataaccagtcccctgttgatattaaaaccagtgaaaccaaacatgacacctctctgaaacctattagtgtctcctacaacccagccacagccaaagaaattatcaatgtggggcattccttccatgtaaattttgaggacaacgataaccgatcagtgctgaaaggtggtcctttctctgacagctacaggctctttcagttccattttcactggggcagtacaaatgagcatggttcagaacatacagtggatggagtcaaatattctgccgagcttcacgtagctcactggaattctgcaaagtactccagccttgctgaagctgcctcaaaggctgatggtttggcagttattggtgttttgatg

SEQ ID NO: 114151 - DNA, 675 bp, Homo sapiens
  Payload ID: 2310
  Gene Symbol: CA1
  Gene Name: carbonic anhydrase I
  ENST ID: ENST00000524324
  CDS Start-End: 93-675
gtggtacccagtcctcaggtgcaaccccctgcgtggtcctctgtggcagccttctctcattcagagctaaaaagaaaactcagtagaagataatggcaagtccagactggggatatgatgacaaaaatgtgctgaaaggtggtcctttctctgacagctacaggctctttcagttccattttcactggggcagtacaaatgagcatggttcagaacatacagtggatggagtcaaatattctgccgagcttcacgtagctcactggaattctgcaaagtactccagccttgctgaagctgcctcaaaggctgatggtttggcagttattggtgttttgatgaaggttggtgaggccaacccaaagctgcagaaagtacttgatgccctccaagcaattaaaaccaagggcaaacgagccccattcacaaattttgacccctctactctccttccttcatccctggatttctggacctaccctggctctctgactcatcctcctctttatgagagtgtaacttggatcatctgtaaggagagcatcagtgtcagctcagagcagctggcacaattccgcagccttctatcaaatgttgaaggtgataacgctgtccccatgcagcacaacaaccgcccaacccaacctctgaagggcagaacagtgagagcttcat

SEQ ID NO: 114152 - DNA, 606 bp, Homo sapiens
  Payload ID: 2310
  Gene Symbol: CA1
  Gene Name: carbonic anhydrase I
  ENST ID: ENST00000521679
  CDS Start-End: 1-535
gcattccttccatgtaaattttgaggacaacgataaccgatcagtgctgaaaggtggtcctttctctgacagctacaggctctttcagttccattttcactggggcagtacaaatgagcatggttcagaacatacagtggatggagtcaaatattctgccgagcttcacgtagctcactggaattctgcaaagtactccagccttgctgaagctgcctcaaaggctgatggtttggcagttattggtgttttgatgaaggttggtgaggccaacccaaagctgcagaaagtacttgatgccctccaagcaattaaaaccaagggcaaacgagccccattcacaaattttgacccctctactctccttccttcatccctggatttctggacctaccctggctctctgactcatcctcctctttatgagagtgtaacttggatcatctgtaaggagagcatcagtgtcagctcagagcagcacaacaaccgcccaacccaacctctgaagggcagaacagtgagagcttcattttgatgattctgagaagaaacttgtccttcctcaagaacacagccctgcttctgacataatccagtaaaataata

SEQ ID NO: 114153 - DNA, 491 bp, Homo sapiens
  Payload ID: 2310
  Gene Symbol: CA1
  Gene Name: carbonic anhydrase I
  ENST ID: ENST00000519129
  CDS Start-End: 425-491
gtggtacccagtcctcaggtgcaaccccctgcgtggtcctctgtggcagccttctctcattcagagctgttttccacagaggtagtgaaaagaactggattttcaagttcactttgcaagagaaatagaagggaggaggacctattttgttccatcctgtaggctgatcctttacacctaggactggaagaaataagaaacagagtatcactatgtggcccaagctggtctggacctcctaggtgcaagagatcctcccacctcagcctaaaacacagattttaatgcccaattttgttataataagaattaaataagttaatgggttgcagcagctcagacaatccttaccatgtgaaaggaggaatgactgtcatggcatgaaaaaagcatcactatgaaaaagaaaactcagtagaagataatggcaagtccagactggggatatgatgacaaaaatggtcctgaacaatggagcaagctgtatccca

SEQ ID NO: 114154 - DNA, 1208 bp, Homo sapiens
  Payload ID: 2310
  Gene Symbol: CA1
  Gene Name: carbonic anhydrase I
  Uniprot ID: P00915
  ENST ID: ENST00000523022
  CDS Start-End: 93-878
gtggtacccagtcctcaggtgcaaccccctgcgtggtcctctgtggcagccttctctcattcagagctaaaaagaaaactcagtagaagataatggcaagtccagactggggatatgatgacaaaaatggtcctgaacaatggagcaagctgtatcccattgccaatggaaataaccagtcccctgttgatattaaaaccagtgaaaccaaacatgacacctctctgaaacctattagtgtctcctacaacccagccacagccaaagaaattatcaatgtggggcattccttccatgtaaattttgaggacaacgataaccgatcagtgctgaaaggtggtcctttctctgacagctacaggctctttcagttccattttcactggggcagtacaaatgagcatggttcagaacatacagtggatggagtcaaatattctgccgagcttcacgtagctcactggaattctgcaaagtactccagccttgctgaagctgcctcaaaggctgatggtttggcagttattggtgttttgatgaaggttggtgaggccaacccaaagctgcagaaagtacttgatgccctccaagcaattaaaaccaagggcaaacgagccccattcacaaattttgacccctctactctccttccttcatccctggatttctggacctaccctggctctctgactcatcctcctctttatgagagtgtaacttggatcatctgtaaggagagcatcagtgtcagctcagagcagctggcacaattccgcagccttctatcaaatgttgaaggtgataacgctgtccccatgcagcacaacaaccgcccaacccaacctctgaagggcagaacagtgagagcttcattttgatgattctgagaagaaacttgtccttcctcaagaacacagccctgcttctgacataatccagtaaaataataatttttaagaaataaatttatttcaatattagcaagacagcatgccttcaaatcaatctgtaaaactaagaaacttaaattttagttcttactgcttaattcaaataataattagtaagctagcaaatagtaatctgtaagcataagcttatgcttaaattcaagtttagtttgaggaattctttaaaattacaactaagtgatttgtatgtctatttttttcagtttatttgaaccaataaaataattttatctcttt

SEQ ID NO: 114155 - DNA, 696 bp, Homo sapiens
  Payload ID: 2310
  Gene Symbol: CA1
  Gene Name: carbonic anhydrase I
  ENST ID: ENST00000517590
  CDS Start-End: 170-696
gtggtacccagtcctcaggtgcaaccccctgcgtggtcctctgtggcagccttctctcattcagagctgggttgcagcagctcagacaatccttaccatgtgaaaggaggaatgactgtcatggcatgaaaaaagcatcactatgaaaaagaaaactcagtagaagataatggcaagtccagactggggatatgatgacaaaaatggtcctgaacaatggagcaagctgtatcccattgccaatggaaataaccagtcccctgttgatattaaaaccagtgaaaccaaacatgacacctctctgaaacctattagtgtctcctacaacccagccacagccaaagaaattatcaatgtggggcattccttccatgtaaattttgaggacaacgataaccgatcagtgctgaaaggtggtcctttctctgacagctacaggctctttcagttccattttcactggggcagtacaaatgagcatggttcagaacatacagtggatggagtcaaatattctgccgagcttcacgtagctcactggaattctgcaaagtactccagccttgctgaagctgcctcaaaggctgatggtttggcagttattggtgttttgatgaaggttggtgaggccaacccaaagctgcagaaagtacttgatgccctccaagcaattaaaaccaagggcaaacgagcccc

SEQ ID NO: 114156 - DNA, 501 bp, Homo sapiens
  Payload ID: 2310
  Gene Symbol: CA1
  Gene Name: carbonic anhydrase I
  ENST ID: ENST00000522662
  CDS Start-End: 148-501
gtggtacccagtcctcaggtgcaaccccctgcgtggtcctctgtggcagccttctctcattcagagctatatgtgtacttcctgataagcagagatgatgaaataatggcctattaaaagcaaaaaaagaaaactcagtagaagataatggcaagtccagactggggatatgatgacaaaaatggtcctgaacaatggagcaagctgtatcccattgccaatggaaataaccagtcccctgttgatattaaaaccagtgaaaccaaacatgacacctctctgaaacctattagtgtctcctacaacccagccacagccaaagaaattatcaatgtggggcattccttccatgtaaattttgaggacaacgataaccgatcagtgctgaaaggtggtcctttctctgacagctacaggctctttcagttccattttcactggggcagtacaaatgagcatggttcagaacatacagtggatggagtcaaatattctgccgag

SEQ ID NO: 114157 - DNA, 666 bp, Homo sapiens
  Payload ID: 2310
  Gene Symbol: CA1
  Gene Name: carbonic anhydrase I
  ENST ID: ENST00000521846
  CDS Start-End: 219-666
acccagtcctcaggtgcaaccccctgcgtggtcctctgtggcagccttctctcattcagagctgttttccacagaggtagtgaaaagaactggattttcaagttcactttgcaagaggggttgcagcagctcagacaatccttaccatgtgaaaggaggaatgactgtcatggcatgaaaaaagcatcactatgaaaaagaaaactcagtagaagataatggcaagtccagactggggatatgatgacaaaaatggtcctgaacaatggagcaagctgtatcccattgccaatggaaataaccagtcccctgttgatattaaaaccagtgaaaccaaacatgacacctctctgaaacctattagtgtctcctacaacccagccacagccaaagaaattatcaatgtggggcattccttccatgtaaattttgaggacaacgataaccgatcagtgctgaaaggtggtcctttctctgacagctacaggctctttcagttccattttcactggggcagtacaaatgagcatggttcagaacatacagtggatggagtcaaatattctgccgagcttcacgtagctcactggaattctgcaaagtactccagccttgctgaagctgcctcaaaggctgatggtttggcagttattggtgttttgatga

SEQ ID NO: 114158 - DNA, 527 bp, Homo sapiens
  Payload ID: 2310
  Gene Symbol: CA1
  Gene Name: carbonic anhydrase I
  ENST ID: ENST00000519991
  CDS Start-End: 115-527
gtggtacccagtcctcaggtgcaaccccctgcgtggtcctctgtggcagccttctctcattcagagctaaaaagaaaactcagtagaagataatggcaagtccagactggggatatgatgacaaaaatgcttcacgtagctcactggaattctgcaaagtactccagccttgctgaagctgcctcaaaggctgatggtttggcagttattggtgttttgatgaaggttggtgaggccaacccaaagctgcagaaagtacttgatgccctccaagcaattaaaaccaagggcaaacgagccccattcacaaattttgacccctctactctccttccttcatccctggatttctggacctaccctggctctctgactcatcctcctctttatgagagtgtaacttggatcatctgtaaggagagcatcagtgtcagctcagagcagctggcacaattccgcagccttctatcaaatgttgaaggtgataacgctgtccccatgcagcacaacaaccgcccaacccaacc

SEQ ID NO: 114159 - DNA, 454 bp, Homo sapiens
  Payload ID: 2310
  Gene Symbol: CA1
  Gene Name: carbonic anhydrase I
  ENST ID: ENST00000520663
  CDS Start-End: 192-454
gtggtacccagtcctcaggtgcaaccccctgcgtggtcctctgtggcagccttctctcattcagagctgggttgcagcagctcagacaatccttaccatgtgaaaggaggaatgactgtcatggcatgaaaaaagcatcactatgaaaaagaaaactcagtagaagataatggcaagtccagactggggatatgatgacaaaaatgcttcacgtagctcactggaattctgcaaagtactccagccttgctgaagctgcctcaaaggctgatggtttggcagttattggtgttttgatgaaggttggtgaggccaacccaaagctgcagaaagtacttgatgccctccaagcaattaaaaccaagggcaaacgagccccattcacaaattttgacccctctactctccttccttcatccctggatttctggacctaccctggctctctgactca

SEQ ID NO: 114160 - DNA, 2785 bp, Homo sapiens
  Payload ID: 2310
  Gene Symbol: CA1
  Gene Name: carbonic anhydrase I
  Uniprot ID: P00915
  ENST ID: ENST00000523953
  CDS Start-End: 1048-1833
ctttagcccaacagtcaaaaataattgatgctaccctacaaatgtccaaaactctagtatatcatatttctaagttacagcaaatattagtcctgctaaaccagggagctttggcaaaaatgttttttgacagtaaatttgtccttgattatatattaactagtcaaagaggtgtttgtaacattattagagcttcttgttgtaggtgggttaacaccaccaatcaagaggtcattctaacagaaagcctggatcagaaaaccatcaccctaaaaaaacatgccttacatatttaacacactctgaaatccagtcaaaatatgactaaaggcccttgccatgactgatgtattctcctggccaacgccaaacaaatgggagcctggttacgagtcagccttcagggacttgtcacatttctacttggtttcttccttgttattgtcataataaaatgttttctatgctgtttagtgcaacttaggccctattctgtagaagtctcctctactattcaggccactcaaacaccccaaataattgagttcaaaatcgacatcaagatataaaggaatcagtgactaaatatatttcatatatggtatttttattgattattgtgctgtcttgacctagtatggaggccttggctagaggctggtcagtttcctctcttgagcagctgattaaatccacaccccaaccacttcccttatcaggttctcacactctggggccactatgtacccactctaatcaccacagggccagacatcagacaattaaggacagcgcccatgccccaaagcccgccaaaattatgcaaattattcaaaattattcaacctagctaaccccaccctttttgctgtacataagctgcccattccccctccagcctgtggtacccagtcctcaggtgcaaccccctgcgtggtcctctgtggcagccttctctcattcagagctgttttccacagaggtagtgaaaagaactggattttcaagttcactttgcaagagaaaaagaaaactcagtagaagataatggcaagtccagactggggatatgatgacaaaaatggtcctgaacaatggagcaagctgtatcccattgccaatggaaataaccagtcccctgttgatattaaaaccagtgaaaccaaacatgacacctctctgaaacctattagtgtctcctacaacccagccacagccaaagaaattatcaatgtggggcattccttccatgtaaattttgaggacaacgataaccgatcagtgctgaaaggtggtcctttctctgacagctacaggctctttcagttccattttcactggggcagtacaaatgagcatggttcagaacatacagtggatggagtcaaatattctgccgagcttcacgtagctcactggaattctgcaaagtactccagccttgctgaagctgcctcaaaggctgatggtttggcagttattggtgttttgatgaaggttggtgaggccaacccaaagctgcagaaagtacttgatgccctccaagcaattaaaaccaagggcaaacgagccccattcacaaattttgacccctctactctccttccttcatccctggatttctggacctaccctggctctctgactcatcctcctctttatgagagtgtaacttggatcatctgtaaggagagcatcagtgtcagctcagagcagctggcacaattccgcagccttctatcaaatgttgaaggtgataacgctgtccccatgcagcacaacaaccgcccaacccaacctctgaagggcagaacagtgagagcttcattttgatgattctgagaagaaacttgtccttcctcaagaacacagccctgcttctgacataatccagtaaaataataatttttaagaaataaatttatttcaatattagcaagacagcatgccttcaaatcaatctgtaaaactaagaaacttaaattttagttcttactgcttaattcaaataataattagtaagctagcaaatagtaatctgtaagcataagcttatgcttaaattcaagtttagtttgaggaattctttaaaattacaactaagtgatttgtatgtctatttttttcagtttatttgaaccaataaaataattttatctctttctttctgttgtgcattcagtttctaaaaccattaagtttctactccatttacattcaaaaatcttaaatactttacttgcaagagtattttgcttcaaatacaacaacctaagagcagctggagatgaaatattgggaaattcatttgcttactcctgaagacaaaaatatagctgagatgaccactggatttaatatcgttatgctggcccaacattgctaccatttgtgttgtctgtgatcaaaatgattatcttttatataggaagatgacgcttctggatattgctttcacttcttctccccacgttagcaaggacaatgcttctctgccattattacaactagttagtttgcatggagaatctttactttaaaattggaagaaaagtcacaagtgaatggtttataaaaatgctaaagaagtcattcttgcttagaatcatatagaaacatcatgcaatcttttagtcagatgtgcgcttcaccttatgctatttttatctttaattgacacacaataattgtacatgtttatggagtatagtgtggtgttttctgtttgtttgtttgttttttgagacaaggtctcactctgccagtcagggtggagtgcgatggt

SEQ ID NO: 114161 - DNA, 652 bp, Homo sapiens
  Payload ID: 2310
  Gene Symbol: CA1
  Gene Name: carbonic anhydrase I
  ENST ID: ENST00000517429
  CDS Start-End: 93-338
gtggtacccagtcctcaggtgcaaccccctgcgtggtcctctgtggcagccttctctcattcagagctaaaaagaaaactcagtagaagataatggcaagtccagactggggatatgatgacaaaaatggtcctgaacaatggagcaagctgtatcccattgccaatggaaataaccagtcccctgttgatattaaaaccagtgaaaccaaacatgacacctctctgaaacctattagtgtctcctacaacccagccacagccaaagaaattatcaatgtggggcattccttccatgtaaattttgaggacaacgataaccgatcagcattgctgtaatctagtgaggcatcttggacttctggaaaacgcccaggtgtgctgaaaggtggtcctttctctgacagctacaggctctttcagttccattttcactggggcagtacaaatgagcatggttcagaacatacagtggatggagtcaaatattctgccgagcttcacgtagctcactggaattctgcaaagtactccagccttgctgaagctgcctcaaaggctgatggtttggcagttattggtgttttgatgaaggttggtgaggccaacccaaagctgcagaaagtacttgatgccctccaagcaattaaaac

SEQ ID NO: 114162 - DNA, 618 bp, Homo sapiens
  Payload ID: 2310
  Gene Symbol: CA1
  Gene Name: carbonic anhydrase I
  ENST ID: ENST00000522814
  CDS Start-End: 174-618
gtggtacccagtcctcaggtgcaaccccctgcgtggtcctctgtggcagccttctctcattcagagctaattttttacaacaccttttttttagatatgtgtacttcctgataagcagagatgatgaaataatggcctattaaaagcaaaaaaagaaaactcagtagaagataatggcaagtccagactggggatatgatgacaaaaatggtcctgaacaatggagcaagctgtatcccattgccaatggaaataaccagtcccctgttgatattaaaaccagtgaaaccaaacatgacacctctctgaaacctattagtgtctcctacaacccagccacagccaaagaaattatcaatgtggggcattccttccatgtaaattttgaggacaacgataaccgatcagtgctgaaaggtggtcctttctctgacagctacaggctctttcagttccattttcactggggcagtacaaatgagcatggttcagaacatacagtggatggagtcaaatattctgccgagcttcacgtagctcactggaattctgcaaagtactccagccttgctgaagctgcctcaaaggctgatggtttggcagttattggtgttttga

SEQ ID NO: 114163 - DNA, 832 bp, Homo sapiens
  Payload ID: 2310
  Gene Symbol: CA1
  Gene Name: carbonic anhydrase I
  ENST ID: ENST00000517618
  CDS Start-End: 80-832
atctcctgcatgcacagttgcagttagttattccaggtattatttttgttttcagaaaaagaaaactcagtagaagataatggcaagtccagactggggatatgatgacaaaaatggtcctgaacaatggagcaagctgtatcccattgccaatggaaataaccagtcccctgttgatattaaaaccagtgaaaccaaacatgacacctctctgaaacctattagtgtctcctacaacccagccacagccaaagaaattatcaatgtggggcattccttccatgtaaattttgaggacaacgataaccgatcagtgctgaaaggtggtcctttctctgacagctacaggctctttcagttccattttcactggggcagtacaaatgagcatggttcagaacatacagtggatggagtcaaatattctgccgagcttcacgtagctcactggaattctgcaaagtactccagccttgctgaagctgcctcaaaggctgatggtttggcagttattggtgttttgatgaaggttggtgaggccaacccaaagctgcagaaagtacttgatgccctccaagcaattaaaaccaagggcaaacgagccccattcacaaattttgacccctctactctccttccttcatccctggatttctggacctaccctggctctctgactcatcctcctctttatgagagtgtaacttggatcatctgtaaggagagcatcagtgtcagctcagagcagctggcacaattccgcagccttctatcaaatgttgaaggtgataacgctgtccccatgcagcacaacaaccgcccaacccaacct

SEQ ID NO: 114164 - DNA, 518 bp, Homo sapiens
  Payload ID: 2310
  Gene Symbol: CA1
  Gene Name: carbonic anhydrase I
  ENST ID: ENST00000523858
  CDS Start-End: 222-518
gtggtacccagtcctcaggtgcaaccccctgcgtggtcctctgtggcagccttctctcattcagagctgttttccacagaggtagtgaaaagaactggattttcaagttcactttgcaagagaaatagaagggaggaggacctattttgttccatcctgtaggctgatcctttacacctaggactggaagaaataagaaaaagaaaactcagtagaagataatggcaagtccagactggggatatgatgacaaaaatggtcctgaacaatggagcaagctgtatcccattgccaatggaaataaccagtcccctgttgatattaaaaccagtgaaaccaaacatgacacctctctgaaacctattagtgtctcctacaacccagccacagccaaagaaattatcaatgtggggcattccttccatgtaaattttgaggacaacgataaccgatcagtgctgaaaggtggtcctttctctgacagctacaggctctttcagttccattttcactggggc

SEQ ID NO: 114165 - DNA, 1236 bp, Homo sapiens
  Payload ID: 2310
  Gene Symbol: CA1
  Gene Name: carbonic anhydrase I
  Uniprot ID: P00915
  ENST ID: ENST00000542576
  CDS Start-End: 120-905
atccctctcttctttcaggggttgcagcagctcagacaatccttaccatgtgaaaggaggaatgactgtcatggcatgaaaaaagcatcactatgaaaaagaaaactcagtagaagataatggcaagtccagactggggatatgatgacaaaaatggtcctgaacaatggagcaagctgtatcccattgccaatggaaataaccagtcccctgttgatattaaaaccagtgaaaccaaacatgacacctctctgaaacctattagtgtctcctacaacccagccacagccaaagaaattatcaatgtggggcattccttccatgtaaattttgaggacaacgataaccgatcagtgctgaaaggtggtcctttctctgacagctacaggctctttcagttccattttcactggggcagtacaaatgagcatggttcagaacatacagtggatggagtcaaatattctgccgagcttcacgtagctcactggaattctgcaaagtactccagccttgctgaagctgcctcaaaggctgatggtttggcagttattggtgttttgatgaaggttggtgaggccaacccaaagctgcagaaagtacttgatgccctccaagcaattaaaaccaagggcaaacgagccccattcacaaattttgacccctctactctccttccttcatccctggatttctggacctaccctggctctctgactcatcctcctctttatgagagtgtaacttggatcatctgtaaggagagcatcagtgtcagctcagagcagctggcacaattccgcagccttctatcaaatgttgaaggtgataacgctgtccccatgcagcacaacaaccgcccaacccaacctctgaagggcagaacagtgagagcttcattttgatgattctgagaagaaacttgtccttcctcaagaacacagccctgcttctgacataatccagtaaaataataatttttaagaaataaatttatttcaatattagcaagacagcatgccttcaaatcaatctgtaaaactaagaaacttaaattttagttcttactgcttaattcaaataataattagtaagctagcaaatagtaatctgtaagcataagcttatgcttaaattcaagtttagtttgaggaattctttaaaattacaactaagtgatttgtatgtctatttttttcagtttatttgaaccaataaaataattttatctctttc

SEQ ID NO: 114166 - DNA, 2405 bp, Homo sapiens
  Payload ID: 2310
  Gene Symbol: CA1
  Gene Name: carbonic anhydrase I
  ENST ID: ENST00000626824
  CDS Start-End: 1070-1453
ctttagcccaacagtcaaaaataattgatgctaccctacaaatgtccaaaactctagtatatcatatttctaagttacagcaaatattagtcctgctaaaccagggagctttggcaaaaatgttttttgacagtaaatttgtccttgattatatattaactagtcaaagaggtgtttgtaacattattagagcttcttgttgtaggtgggttaacaccaccaatcaagaggtcattctaacagaaagcctggatcagaaaaccatcaccctaaaaaaacatgccttacatatttaacacactctgaaatccagtcaaaatatgactaaaggcccttgccatgactgatgtattctcctggccaacgccaaacaaatgggagcctggttacgagtcagccttcagggacttgtcacatttctacttggtttcttccttgttattgtcataataaaatgttttctatgctgtttagtgcaacttaggccctattctgtagaagtctcctctactattcaggccactcaaacaccccaaataattgagttcaaaatcgacatcaagatataaaggaatcagtgactaaatatatttcatatatggtatttttattgattattgtgctgtcttgacctagtatggaggccttggctagaggctggtcagtttcctctcttgagcagctgattaaatccacaccccaaccacttcccttatcaggttctcacactctggggccactatgtacccactctaatcaccacagggccagacatcagacaattaaggacagcgcccatgccccaaagcccgccaaaattatgcaaattattcaaaattattcaacctagctaaccccaccctttttgctgtacataagctgcccattccccctccagcctgtggtacccagtcctcaggtgcaaccccctgcgtggtcctctgtggcagccttctctcattcagagctgttttccacagaggtagtgaaaagaactggattttcaagttcactttgcaagagaaaaagaaaactcagtagaagataatggcaagtccagactggggatatgatgacaaaaatgcttcacgtagctcactggaattctgcaaagtactccagccttgctgaagctgcctcaaaggctgatggtttggcagttattggtgttttgatgaagggcaaacgagccccattcacaaattttgacccctctactctccttccttcatccctggatttctggacctaccctggctctctgactcatcctcctctttatgagagtgtaacttggatcatctgtaaggagagcatcagtgtcagctcagagcagctggcacaattccgcagccttctatcaaatgttgaaggtgataacgctgtccccatgcagcacaacaaccgcccaacccaacctctgaagggcagaacagtgagagcttcattttgatgattctgagaagaaacttgtccttcctcaagaacacagccctgcttctgacataatccagtaaaataataatttttaagaaataaatttatttcaatattagcaagacagcatgccttcaaatcaatctgtaaaactaagaaacttaaattttagttcttactgcttaattcaaataataattagtaagctagcaaatagtaatctgtaagcataagcttatgcttaaattcaagtttagtttgaggaattctttaaaattacaactaagtgatttgtatgtctatttttttcagtttatttgaaccaataaaataattttatctctttctttctgttgtgcattcagtttctaaaaccattaagtttctactccatttacattcaaaaatcttaaatactttacttgcaagagtattttgcttcaaatacaacaacctaagagcagctggagatgaaatattgggaaattcatttgcttactcctgaagacaaaaatatagctgagatgaccactggatttaatatcgttatgctggcccaacattgctaccatttgtgttgtctgtgatcaaaatgattatcttttatataggaagatgacgcttctggatattgctttcacttcttctccccacgttagcaaggacaatgcttctctgccattattacaactagttagtttgcatggagaatctttactttaaaattggaagaaaagtcacaagtgaatggtttataaaaatgctaaagaagtcattcttgcttagaatcatatagaaacatcatgcaatcttttagtcagatgtgcgcttcaccttatgctatttttatctttaattgacacacaataattgtacatgtttatggagtatagtgtggtgttttctgtttgtttgtttgttttttgagacaaggtctcactctgccagtcagggtggagtgcgatggt

SEQ ID NO: 114167 - DNA, 1717 bp, Homo sapiens
  Payload ID: 2311
  Gene Symbol: CA2
  Gene Name: carbonic anhydrase II
  Uniprot ID: P00918
  ENST ID: ENST00000285379
  CDS Start-End: 231-1013
cccggcccgccccgccccgagcgcggggagttcacctccgcccgtcaccacctccccttgtcgcctaggtccacccgagccccctcccccgggccgcccccgagcacgaagttggcgggagcctataaaagctggtgccggcgcgacccgcggacacacagtgcaggcgcccaagccgccgccgccagatcggtgccgattcctgccctgccccgaccgccagcgcgaccatgtcccatcactgggggtacggcaaacacaacggacctgagcactggcataaggacttccccattgccaagggagagcgccagtcccctgttgacatcgacactcatacagccaagtatgacccttccctgaagcccctgtctgtttcctatgatcaagcaacttccctgaggatcctcaacaatggtcatgctttcaacgtggagtttgatgactctcaggacaaagcagtgctcaagggaggacccctggatggcacttacagattgattcagtttcactttcactggggttcacttgatggacaaggttcagagcatactgtggataaaaagaaatatgctgcagaacttcacttggttcactggaacaccaaatatggggattttgggaaagctgtgcagcaacctgatggactggccgttctaggtatttttttgaaggttggcagcgctaaaccgggccttcagaaagttgttgatgtgctggattccattaaaacaaagggcaagagtgctgacttcactaacttcgatcctcgtggcctccttcctgaatccttggattactggacctacccaggctcactgaccacccctcctcttctggaatgtgtgacctggattgtgctcaaggaacccatcagcgtcagcagcgagcaggtgttgaaattccgtaaacttaacttcaatggggagggtgaacccgaagaactgatggtggacaactggcgcccagctcagccactgaagaacaggcaaatcaaagcttccttcaaataagatggtcccatagtctgtatccaaataatgaatcttcgggtgtttccctttagctaagcacagatctaccttggtgatttggaccctggttgctttgtgtctagttttctagacccttcatctcttacttgatagacttactaataaaatgtgaagactagaccaattgtcatgcttgacacaactgctgtggctggttggtgctttgtttatggtagtagtttttctgtaacacagaatataggataagaaataagaataaagtaccttgactttgttcacagcatgtagggtgatgagcactcacaattgttgactaaaatgctgcttttaaaacataggaaagtagaatggttgagtgcaaatccatagcacaagataaattgagctagttaaggcaaatcaggtaaaatagtcatgattctatgtaatgtaaaccagaaaaaataaatgttcatgatttcaagatgttatattaaagaaaaactttaaaaattattatatatttatagcaaagttatcttaaatatgaattctgttgtaatttaatgacttttgaattacagagatataaatgaagtattatctgtaaaaattgttataattagagttgtgatacagagtatatttccattcagacaatatatcataacttaataaatattgtattttagatatattctctaataaaattcagaattcta

SEQ ID NO: 114168 - DNA, 875 bp, Homo sapiens
  Payload ID: 2311
  Gene Symbol: CA2
  Gene Name: carbonic anhydrase II
  ENST ID: ENST00000520127
  CDS Start-End: 115-408
gggagcctataaaagctggtgccggcgcgacccgcggacacacagtgcaggcgcccaagccgccgccgccagatcggtgccgattcctgccctgccccgaccgccagcgcgaccatgtcccatcactgggggtacggcaaacacaacggacctgagcactggcataaggacttccccattgccaagggagagcgccagtcccctgttgacatcgacactcatacagccaagtatgacccttccctgaagcccctgtctgtttcctatgatcaagcaacttccctgaggatcctcaacaatggtcatgctttcaacgtggagtttgatgactctcaggacaaagcagcttcacttggttcactggaacaccaaatatggggattttgggaaagctgtgcagcaacctgatggactggccgttctaggtatttttttgaaggttggcagcgctaaaccgggccttcagaaagttgttgatgtgctggattccattaaaacaaagggcaagagtgctgacttcactaacttcgatcctcgtggcctccttcctgaatccttggattactggacctacccaggctcactgaccacccctcctcttctggaatgtgtgacctggattgtgctcaaggaacccatcagcgtcagcagcgagcaggtgttgaaattccgtaaacttaacttcaatggggagggtgaacccgaagaactgatggtggacaactggcgcccagctcagccactgaagaacaggcaaatcaaagcttccttcaaataagatggtcccatagtctgtatccaaataatgaatcttcgggtgtttccctttagctaagcacagatctaccttggtgatttggaccctggttgctttg

SEQ ID NO: 114169 - DNA, 691 bp, Homo sapiens
  Payload ID: 2311
  Gene Symbol: CA2
  Gene Name: carbonic anhydrase II
  ENST ID: ENST00000522742
  CDS Start-End: 69-374
gcaggcgcccaagccgccgccgccagatcggtgccgattcctgccctgccccgaccgccagcgcgaccatgtcccatcactgggggtacggcaaacacaacggacctgagcactggcataaggacttccccattgccaagggagagcgccagtcccctgttgacatcgacactcatacagccaagtatgacccttccctgaagcccctgtctgtttcctatgatcaagcaacttccctgaggatcctcaacaatggtcatgctttcaacgtggagtttgatgactctcaggacaaagcagaaaaaggaatcagtatgctcagaaagaaagatgtgaaaaacatccattctccagacaacgcatgtgaggaataaaaacagtgctcaagggaggacccctggatggcacttacagattgattcagtttcactttcactggggttcacttgatggacaaggttcagagcatactgtggataaaaagaaatatgctgcagaacttcacttggttcactggaacaccaaatatggggattttgggaaagctgtgcagcaacctgatggactggccgttctaggtatttttttgaaggttggcagcgctaaaccgggccttcagaaagttgttgatgtgctggattccattaaaacaaagggcaagagtgctgacttcactaacttcgatcctcgt

SEQ ID NO: 114170 - DNA, 1753 bp, Homo sapiens
  Payload ID: 2312
  Gene Symbol: CA3
  Gene Name: carbonic anhydrase III
  Uniprot ID: P07451
  ENST ID: ENST00000285381
  CDS Start-End: 84-866
acataaaagcgcgggctcgcggcgactctgcaccacgcaggggaagagaaagcaggagccgtccagcacggaggaaggcgaccatggccaaggagtggggctacgccagtcacaacggtcctgaccactggcatgaacttttcccaaatgccaagggggaaaaccagtcgcccgttgagctgcatactaaagacatcaggcatgacccttctctgcagccatggtctgtgtcttatgatggtggctctgccaagaccatcctgaataatgggaagacctgccgagttgtatttgatgatacttatgataggtcaatgctgagagggggtcctctccctggaccctaccgacttcgccagtttcatcttcactggggctcttcggatgatcatggctctgagcacaccgtggatggagtcaagtatgcagcggagcttcatttggttcactggaacccgaagtataacacttttaaagaagccctgaagcagcgcgatgggatcgctgtgattggcatttttctgaagataggacatgagaatggcgagttccagattttccttgatgcattggacaagattaagacaaagggcaaggaggcgcccttcacaaagtttgacccatcctgcctgttcccggcatgccgggactactggacctaccagggctcattcaccacgccgccctgcgaggaatgcattgtgtggctgctgctgaaggagcccatgaccgtgagctctgaccagatggccaagctgcggagcctcctctccagtgctgagaacgagcccccagtgcctcttgtgagcaactggcgacctccacagcctatcaataacagggtggtgagagcttccttcaaatgaggctgctggatcttgccctcttcaggaaaggaaacctaccattggagagcttggttccttgcctccttctggtgctccttactccaagtctatttcatttttccacactgagcaatgaatgtgagagatgtggtcaccaagatctaagttacttgttgaaagaaagttactttcgacaagatctaatatgaaagcatagatttcacatttgatctctgtaataatcatctttcctataaaagtagcatttttggtaaagtttcaaagaagaagaaacagagatggaagagtaaagatatttttaaaatggctagctattgggcaccagtttttctgttatctaaaatttcacacaacttcattgtttttatttttatattatgagttgtccatcttaaagaaatatgagtaattctacatgtagtagaggtgtatgaagatcatataacaattaaacataagccagaaattaaaatgactatagacagcaagaattgagctaataatatgttttaactcttaacaccagcaagaagtcagtcatttattgaagttttagctactaagattacttggttttgattaccagtgaaaagaaaacacaatacaatcaggagttttcaaatttttgattcagtatttgaatttcttcttcataaatgtagttgaatttatcctagtatttttctttacctgaaggagggccatttatttttaatttcactacatttttctttgcatgattattaaaataaaaactgcctctgttgtgtttctcactggaggctggaatgaatgatcactagaacacaaaagagtgaatgatgacacttgaagtcaaagcagttgtactgatcaccagaaccaataaagacataaatggaaaa

SEQ ID NO: 114171 - DNA, 571 bp, Homo sapiens
  Payload ID: 2312
  Gene Symbol: CA3
  Gene Name: carbonic anhydrase III
  ENST ID: ENST00000520921
  CDS Start-End: 513-571
agaggcatcacagcatctcccatgacaagaaaggaatgtggatacggagagacttggcaaccaccggcaggcacagcagcaccagctaaattgcagctcaccaacaggcagcagttacatccctagttgtgctggtgtgggtctggagccaatgagtaagccaagagcagaccctcacaccctgcaccctgccccacaaggagctacccaagagtccacaatcatggccacaccttcctgctcacagcaccaattgtttataagatttgaagacttttgatggtggacacttacaggagttgtgtcggggactgagtcctgaccactggcatgaacttttcccaaatgccaagggggaaaaccagtcgcccgttgagctgcatactaaagacatcaggcatgacccttctctgcagccatggtctgtgtcttatgatggtggctctgccaagaccatcctgaataatgggaagacctgccgagttgtatttgatgatacttatgataggtcaatgctgagagggggtcctctccctggaccctaccgacttcgccagtttcatcttcactg

SEQ ID NO: 114172 - DNA, 1154 bp, Homo sapiens
  Payload ID: 2313
  Gene Symbol: CA4
  Gene Name: carbonic anhydrase IV
  Uniprot ID: P22748
  ENST ID: ENST00000300900
  CDS Start-End: 100-1038
ggctccgctataaaacccaggccggcaggatcgctgcacccgcggcggcctcctcggtgcgcgacccccggctcagaggactctttgctgtcccgcaagatgcggatgctgctggcgctcctggccctctccgcggcgcggccatcggccagtgcagagtcacactggtgctacgaggttcaagccgagtcctccaactacccctgcttggtgccagtcaagtggggtggaaactgccagaaggaccgccagtcccccatcaacatcgtcaccaccaaggcaaaggtggacaaaaaactgggacgcttcttcttctctggctacgataagaagcaaacgtggactgtccaaaataacgggcactcagtgatgatgttgctggagaacaaggccagcatttctggaggaggactgcctgccccataccaggccaaacagttgcacctgcactggtccgacttgccatataagggctcggagcacagcctcgatggggagcactttgccatggagatgcacatagtacatgagaaagagaaggggacatcgaggaatgtgaaagaggcccaggaccctgaagacgaaattgcggtgctggcctttctggtggaggctggaacccaggtgaacgagggcttccagccactggtggaggcactgtctaatatccccaaacctgagatgagcactacgatggcagagagcagcctgttggacctgctccccaaggaggagaaactgaggcactacttccgctacctgggctcactcaccacaccgacctgcgatgagaaggtcgtctggactgtgttccgggagcccattcagcttcacagagaacagatcctggcattctctcagaagctgtactacgacaaggaacagacagtgagcatgaaggacaatgtcaggcccctgcagcagctggggcagcgcacggtgataaagtccggggccccgggtcggccgctgccctgggccctgcctgccctgctgggccccatgctggcctgcctgctggccggcttcctgcgatgatggctcacttctgcacgcagcctctctgttgcctcagctctccaagttccaggcttccggtccttagccttcccaggtgggactttaggcatgattaaaatatggacatatttttg

SEQ ID NO: 114173 - DNA, 702 bp, Homo sapiens
  Payload ID: 2313
  Gene Symbol: CA4
  Gene Name: carbonic anhydrase IV
  ENST ID: ENST00000587265
  CDS Start-End: 1-298
gtctaatatccccaaacctgagatgagcactacgatggcagagagcagcctgttggacctgctccccaaggaggagaaactgaggcactacttccgctacctgggctcactcaccacaccgacctgcgatgagaaggtcgtctggactgtgttccgggagcccattcagcttcacagagaacaggtgcacagggcctggggcagggcatgggctcccactgcctggctccccagaaattatccctctgtctgccctcagaggtccctcaggatacaggtggggagcccaggtaactgaagtccgttgttaatcatcgacattcactgaagacaggcaagaaaagcctgagctgttccatcaccagattgggggctagacaggaggcaggggaaggtggagtcattcagaaaatggtgctggggtttctatcatgaacgaggctctggggagacagcagtgagcccaaaggacccaaatccctacccttgcactgctttcattccaaaacagtggttctcaaagtgcggcccctggaccagtggagtcaacatcatcactgggggaatttgttagaaatgctaatcctcagagctactgaatcaggaactctgggggtggagcccaggcatctggggcccaacaagcccgccccccagctgatgctaacgcatgctcaagtttgagagccacagtcctgtagt

SEQ ID NO: 114174 - DNA, 677 bp, Homo sapiens
  Payload ID: 2313
  Gene Symbol: CA4
  Gene Name: carbonic anhydrase IV
  ENST ID: ENST00000590203
  CDS Start-End: 1-555
gtgaaagaggcccaggaccctgaagacgaaattgcggtgctggcctttctggtggagatcgggagaatgaactggccaccaccactggctccctgcagactttctcaagacccttccctccctttccaggctggaacccaggtgaacgagggcttccagccactggtggaggcactgtctaatatccccaaacctgagatgagcactacgatggcagagagcagcctgttggacctgctccccaaggaggagaaactgaggcactacttccgctacctgggctcactcaccacaccgacctgcgatgagaaggtcgtctggactgtgttccgggagcccattcagcttcacagagaacagatcctggcattctctcagaagctgtactacgacaaggaacagacagtgagcatgaaggacaatgtcaggcccctgcagcagctggggcagcgcacggtgataaagtccggggccccgggtcggccgctgccctgggccctgcctgccctgctgggccccatgctggcctgcctgctggccggcttcctgcgatgatggctcacttctgcacgcagcctctctgttgcctcagctctccaagttccaggcttccggtccttagccttcccaggtgggactttaggcatgattaaaatatggacatatttttggagaaa

SEQ ID NO: 114175 - DNA, 565 bp, Homo sapiens
  Payload ID: 2313
  Gene Symbol: CA4
  Gene Name: carbonic anhydrase IV
  ENST ID: ENST00000591725
  CDS Start-End: 452-565
gctataaaacccaggccggcaggatcgctgcacccgcggcggcctcctcggtgcgcgacccccggctcagaggactctttgctgtcccgcaagatgcggatgctgctggcgctcctggccctctccgcggcgcggccatcggccagtgcagggttggacattggaaacctactaagcagctagaaagtagaaagagaaatgctttgcagttctggtgctttgtagctgtgtggtcttggagtcacactggtgctacgaggttcaagccgagtcctccaactacccctgcttggtgccagtcaagtggggtggaaactgccagaaggaccgccagtcccccatcaacatcgtcaccaccaaggcaaaggtggacaaaaaactgggacgcttcttcttctctggctacgataagaagcaaacgtggactgtccaaaataacgggcactcagtgatgatgttgctggagaacaaggccagcatttctggaggaggactgcctgccccataccaggccaaacagttgcacctgcactggtccgacttgccatataagggctcggagcac

SEQ ID NO: 114176 - DNA, 941 bp, Homo sapiens
  Payload ID: 2313
  Gene Symbol: CA4
  Gene Name: carbonic anhydrase IV
  Uniprot ID: P22748
  ENST ID: ENST00000586876
  CDS Start-End: 94-414
gctataaaacccaggccggcaggatcgctgcacccgcggcggcctcctcggtgcgcgacccccggctcagaggactctttgctgtcccgcaagatgcggatgctgctggcgctcctggccctctccgcggcgcggccatcggccagtgcagagtcacactggtgctacgaggttcaagccgagtcctccaactacccctgcttggtgccagtcaagtggggtggaaactgccagaaggaccgccagtcccccatcaacatcgtcaccaccaaggcaaaggtggacaaaaaactgggacgcttcttcttctctggctacgataagaagcaaacgtggactgtccaaaataacgggcactcaggctggaacccaggtgaacgagggcttccagccactggtggaggcactgtctaatatccccaaacctgagatgagcactacgatggcagagagcagcctgttggacctgctccccaaggaggagaaactgaggcactacttccgctacctgggctcactcaccacaccgacctgcgatgagaaggtcgtctggactgtgttccgggagcccattcagcttcacagagaacagctgctaaggtccctgggccatcagaagcgaatagaacaaacctaagacatcactctccatcaagaggcctgcatgactctttatttacatcatcttccaggaagaggaggaggagctgctttggggacacccacttcctctccttacgtaacaacacactgcatttgcacaagtgtccttggttgtaaagggttccacactcactttcttattcagggcttattacaagcctctcaggtagctatggtcatggtaccctgatcccttgtcaaagatgagcccactgaggctcagggtgactaccgttgtgccaggagttgctaagtggtggatcacagactccagttca

SEQ ID NO: 114177 - DNA, 1618 bp, Homo sapiens
  Payload ID: 2314
  Gene Symbol: CA9
  Gene Name: carbonic anhydrase IX
  Uniprot ID: Q16790
  ENST ID: ENST00000378357
  CDS Start-End: 105-1484
cagcctgctcccctccaggcttgctcctcccccacccagctctcgtttccaatgcacgtacagcccgtacacaccgtgtgctgggacaccccacagtcagccgcatggctcccctgtgccccagcccctggctccctctgttgatcccggcccctgctccaggcctcactgtgcaactgctgctgtcactgctgcttctggtgcctgtccatccccagaggttgccccggatgcaggaggattcccccttgggaggaggctcttctggggaagatgacccactgggcgaggaggatctgcccagtgaagaggattcacccagagaggaggatccacccggagaggaggatctacctggagaggaggatctacctggagaggaggatctacctgaagttaagcctaaatcagaagaagagggctccctgaagttagaggatctacctactgttgaggctcctggagatcctcaagaaccccagaataatgcccacagggacaaagaaggggatgaccagagtcattggcgctatggaggcgacccgccctggccccgggtgtccccagcctgcgcgggccgcttccagtccccggtggatatccgcccccagctcgccgccttctgcccggccctgcgccccctggaactcctgggcttccagctcccgccgctcccagaactgcgcctgcgcaacaatggccacagtgtgcaactgaccctgcctcctgggctagagatggctctgggtcccgggcgggagtaccgggctctgcagctgcatctgcactggggggctgcaggtcgtccgggctcggagcacactgtggaaggccaccgtttccctgccgagatccacgtggttcacctcagcaccgcctttgccagagttgacgaggccttggggcgcccgggaggcctggccgtgttggccgcctttctggaggagggcccggaagaaaacagtgcctatgagcagttgctgtctcgcttggaagaaatcgctgaggaaggctcagagactcaggtcccaggactggacatatctgcactcctgccctctgacttcagccgctacttccaatatgaggggtctctgactacaccgccctgtgcccagggtgtcatctggactgtgtttaaccagacagtgatgctgagtgctaagcagctccacaccctctctgacaccctgtggggacctggtgactctcggctacagctgaacttccgagcgacgcagcctttgaatgggcgagtgattgaggcctccttccctgctggagtggacagcagtcctcgggctgctgagccagtccagctgaattcctgcctggctgctggtgacatcctagccctggtttttggcctcctttttgctgtcaccagcgtcgcgttccttgtgcagatgagaaggcagcacagaaggggaaccaaagggggtgtgagctaccgcccagcagaggtagccgagactggagcctagaggctggatcttggagaatgtgagaagccagccagaggcatctgagggggagccggtaactgtcctgtcctgctcattatgccacttccttttaactgccaagaaattttttaaaataaatatttataataaaa

SEQ ID NO: 114178 - DNA, 1374 bp, Homo sapiens
  Payload ID: 2314
  Gene Symbol: CA9
  Gene Name: carbonic anhydrase IX
  ENST ID: ENST00000617161
  CDS Start-End: 43-1113
gcccgtacacaccgtgtgctgggacaccccacagtcagccgcatggctcccctgtgccccagcccctggctccctctgttgatcccggcccctgctccaggcctcactgtgcaactgctgctgtcactgctgcttctggtgcctgtccatccccagaggttgccccggatgcaggaggattcccccttgggaggaggctcttctggggaagatgacccactgggcgaggaggatctgcccagtgaagaggattcacccagagaggaggatccacccggagaggaggatctacctggagaggaggatctacctggagaggaggatctacctgaagttaagcctaaatcagaagaagagggctccctgaagttagaggatctacctactgttgaggctcctggagatcctcaagaaccccagaataatgcccacagggacaaagaaggggatgaccagagtcattggcgctatggaggcgacccgccctggccccgggtgtccccagcctgcgcgggccgcttccagtccccggtggatatccgcccccagctcgccgccttctgcccggccctgcgccccctggaactcctgggcttccagctcccgccgctcccagaactgcgcctgcgcaacaatggccacagtgtgcaactgaccctgcctcctgggctagagatggctctgggtcccgggcgggagtaccgggctctgcagctgcatctgcactggggggctgcaggtcgtccgggctcggagcacactgtggaaggccaccgtttccctgccgagatccacgtggttcacctcagcaccgcctttgccagagttgacgaggccttggggcgcccgggaggcctggccgtgttggccgcctttctggaggagggcccggaagaaaacagtgcctatgagcagttgctgtctcgcttggaagaaatcgctgaggaaggctcagagactcaggtcccaggactggacatatctgcactcctgccctctgacttcagccgctacttccaatatgaggggtctctgactacaccgccctgtgcccagggtgtcatctggactgtgtttaaccagacagtgatgctgagtgctaagcagtcctagccctggtttttggcctcctttttgctgtcaccagcgtcgcgttccttgtgcagatgagaaggcagcacagaaggggaaccaaagggggtgtgagctaccgcccagcagaggtagccgagactggagcctagaggctggatcttggagaatgtgagaagccagccagaggcatctgagggggagccggtaactgtcctgtcctgctcattatgccacttccttttaactgccaagaaattttttaaaataaatatttataat

SEQ ID NO: 114179 - DNA, 7567 bp, Homo sapiens
  Payload ID: 2315
  Gene Symbol: CA5A
  Gene Name: carbonic anhydrase VA, mitochondrial
  Uniprot ID: P35218
  ENST ID: ENST00000309893
  CDS Start-End: 67-984
aaagtgagaacagacagcagggaacatcaccctcttcagactggagtcagtgggaacagacccaagatgttggggaggaacacttggaagacctcagctttctccttcttggttgagcagatgtgggcccctctctggagtcgttcgatgaggccagggcgatggtgttctcagcgttcctgtgcatggcaaaccagcaataacactttgcacccactctggacggtcccggtctccgtgccagggggcacccggcagtctcctattaacatccagtggagggacagcgtctatgacccccagctgaagccactcagggtctcctatgaagcggcatcctgcctgtacatctggaacactggctacctcttccaggtggaatttgacgatgccaccgaggcatcaggaattagtggtgggcccttggaaaaccactacagactgaagcaatttcacttccactggggagcagtgaacgaggggggctcagagcacacagtggacggccacgcgtaccccgcagagctgcatttagttcactggaattctgtgaaataccaaaattacaaggaagctgtcgtgggagagaatggtttggctgtgataggcgtgtttttaaagctcggggcccatcatcagacgctgcagaggctggtggacatcttgccggaaataaaacataaggacgcgcgggcggccatgcgccccttcgacccctccactctgctgcccacctgctgggattactggacctacgcgggctcgctcaccaccccgccgctgaccgagtcggtcacctggatcatccagaaggagcccgttgaagtggccccaagccagctctctgcatttcgtactctcctgttttctgcacttggtgaagaggagaagatgatggtgaacaactatcgcccacttcaacccttgatgaaccggaaggtctgggcgtccttccaggccactaatgagggcacaaggtcctagagacattaggtccacatgaatagcagaactgactttgaaggaaggaagcgttgtttcccaagtttcacaatgtgattgtacatgacttctgaaattaaaaagagagcatgaggttattgttttagtcgaagtacttttcagctgcaagtgaaagaaagatgtgtaagtaccgtggggaacataacgctgggatggaggggtgtgccatggcacccaacgcaagtgcagggtgcttagtttcactgtaacgaagtaccacaaacttggtggattaaaacaatggagattgattctcttacggttcagtgagccagaagcccgacaccaaggtgtcctcacggctgcttccttctgaggctctagggcaggatctttttccttgcctttccagcttctgcctcctccttgtaagaactggcggggtgcattgcctcatgcctttaatcccagcactttgggaggccgaggcgggcggatcacgaggtcaggagatcgagaccatcctggccaacacggtgaaaccccatctctataaaaaacacaaaaattagctgggtgtggtgctgcatgtctgtaatcccagctacttgggaggctgaggcagaagaattgcttgaacccgggaggcagaggttgcagtgagccaagatcacactattgcactccagcgtgggcaacaagagcaaaactctgtctcaaagtaaaaaggaattcttgtgaggccaggcaccgtggttcacgcctgtaatcccagcactttgggaggccaaggcaggcagatcacttgaggtcaggagtttgagaccagcctggccaacatggtgaaaccccgtctctaccaaaaatacaaccaaaaataatctggcaggataaaaccagaaaacatacacaatttgatgtcaagacctacttcaaaagctgtagtaggccaggtgcagtggctcatgcctgtaatcccagcactttgggaggccgaggcgggaagaccacctgaggtcagaagttcgacaccagcctgaccaacatggcgaaaccccgtctctgctaaaaatacaaaaatgagctaggtgtggtggctcatgcctgtaatcccagctactcaggagactgaggcaggagaatcgcttgaacccgggaggcagagcttgcagtgagccgagatcatgccactgcactccagccagggtgacagagcgagactccatctcaaaataaataaataaataaaaataaaaagctatattaattaagataatgtggtacctgtcagagaaggacaaatcaaccaatgaaaaagaatagcgtgtctagaaggttccacacatttgtgatccctgactcatgctgtagggaatggatgggctcttctgtgaatagttttggatcatttggatatctattgattgatctatctattgattgatcgatcaattcatcagtcgatccatggggtctcactatgttgcccaggttggtcctgaactcctgggctccaatagttctcctgccttgacctcccaaagtgctgggattacaggcattagccaccccaccgagccaacgggatatccaaatggggaaccatgaatcttttttctcaccatacctcacacccctacctcacagcacacacaaaaattaattcctgacagattatagatctaaacaggaaaggtaaaacaataaagctcctaaaaaataacaggagctgggcgctgtggctcacgcctgtaaacccagcactttcggaggccaagttccagactagcctgaccaacatggagaaaccccatctctactaaaaatacaaaattagccgagcttggtggtgcatgcctgtaatcccagctactcgggaggctgaggcaggagaattgcttgaacccgtgaggcggaggttgtagtgagccgagatcgcgccattgcattccagcctgggaaacaagagcgaaactttgtctcaaaaaaaaaaaaaaaaaaaaaaacttgatccagaactcaatgttgggtctgagtgtggcttttctgtctctctttcatgatgttgtctctctcggcaagctcattcttttggaggaaagagagctaccactcgtgccaggatggtttccattaattcatgtaacatttattgagtgccaattacgtggcaggctctattctagactctggggacggagcctagactgtttaaggtctgaagagcctttgcctcggagctcacattctgatggaaggaggtagaccatgatgcatccacacagaaagtctggagtggtaagtcacaggaagaggacatggctgggtggggaggtctcttctacaggggccatttgggcagagaccaaaggaggagtgaaccacgtggctacccaagggcagagaattccaggcagaggctggaggcaggagcgcccttctggtgttcaaggtgcagcccgagggtgagggcagccaagtgcaggggtgaggagagaggcatgggaggcaagggtgggtactggggccccacaggctgggtggagactttggagctgctgctgggttctgagcaaagggcattttcaagtggagaggctcagttcggctgtgctgccaaagagttttccaaagtggtcattcctgtccttgccagcaggtcattgtgtgctttctggagggtgtgcccaggtgtctcctgtggatttaatttgcacttccctaatgattcatgacgtggagcactttgtgcagattcattggccgtctgcatatcctctttcaccagatacctgcttgagccatttgcccatttttctcttgggctgtctgtggttttcttattgatttttaggagttctttatatattccaattataaggcctttgtccattttacaaatctcttctcccactctggggctgcctttcaccctcttttttttgttgttgttgttgttttgttttgttttgttttgttttgtttttgagatggagtcttgctttgtcacccaggctggagtgcagtggcgcaatcttggctcactgcaaccttcacctcccgggttcaggtgattctcctgcctcagcctcacaagtagctgggattacaggcatacaccaccgtgcctggctaattttgtatttttagtagagacggggtttctccatgttggtcaggctggtctcgatctcccgacctcaggtgatccgcctgcctcgtcctcccaaactgctgagattactggcatgagtcactgagtcgggtctggatcaagcttatagcaatggttgcacctgatcagttacacaagccaataggtgccctttcatgtaagccagtttgggtttctttttacctattacttgcttggaaaaaatccaaaatcagtacagtgtttttcttttccttttttttagatggagtgtagctctgttgcccaggctagagtgcaatgtcacgatctcagctcactgcaacctctgcctcccgggttcaaacaattctcctgcctcagcctccggagtagctgggattacaggtgcccgccaccacgcccagcgaatttttttttttttttttgagacagagttttgctcttgtcgcctaggctggagtgcattgatgcgatcttggttcaccacaacctctgcctcccaggttcaagtgattctcctgcctcagcctcccaattagctgagattacaggcatgggccaccacgcctggctaattttgtatttttacgagagacggggtttctccatgttggtcaggctggtctcaaactctcaacctcaggtgatctgcccgcctcagcctcccaaagtgctgggattacagacgcgagccactgtgcccagtcttttttttttttttttttttttttgcatttttagtagagattcggtttcaccatgttggtcaggctggtctcgaactcctgacctcaggtgatctgcctaccttggccccccaaagtgctgggattacaggcatgagccaccgcgcctggcccagtatttttattttcatagcattaaaaaatattcccgccagaagagagaaagttttacaataaacctaattacattatcttccaacattaccttacagtcagatgagcacagaaaaataagcagatgctaatctgtttcccaaggtgataaaggccatttcattccggggagataaagaataagtaggttaggtcaggcgcggtggctcacgcctgcaatcccagcactttgggaggctgaggtgggcagatcacctgaggtcaggagttcgagaccagcctgggcaaaacggtgaagccccgtctctactaaaaaaaaatgcaaaaaattcgctgggcgtggtggcaggcacctgtaatcccagctacttgggaggctgaggcaggagaattgcttgaacccaggatgcagacgttgcaatgagccaagattgtgccactgcactccagtctgggcaacagagcgagactccgcctccaaaaaaaaaaaaatacgaaaagtaggccgggtgcggtggctcacgcctgtaatcccagcactttggaaggctgaggcaggtagatcatgaggtcaggagatcaagaccatcctggctaacacggtgaaaccccgtctctactaaaaatacaaaaaactagccgggtgtgctggtgtgtacctgtagtcccagcgactcgggagactgaggcagggagaattgcttgaacccaggaggtggaggtttcagtgagccgagatcgtgccactgtactccagcctgggcaacagagtgagactccatctcaaaaagaaaaaaaaaaaaaaactaaggctaggcgcggtggctcacgcctgtaatcccagcactttggaaggctgaggtgggcagatcatgaggtcaggagtttgagacgagcctgggcaatattgtgaaaccctgtctcttctaaaaatacaaagaaaaatcagccgggcgtgttggcacgcacctataatcccagctactgtggaggctgaggcaggagaattgcttgaacctgggaggcagagcttgcagtgagccgagatggtggccaccgcactccagcctgggcgacagagcgagactccgtctcaaaacaaaacaaaacaaaatctagccagaaatcgcttgaacccaggaggtggaggtcgcagtgagctgagattgtgccactgccctctagcctgggcaacagagtgagactccacccctccacgcccccccaaaataaagcgtctggctctttaaaggagatcacacttggtggcgatgcgggtgaaagaggattgggttgaaggagtcgaagtggaagcgggaaagcaccaagcggggaaatgggcacgtttctgttctgctctaagctgctgcgcctgacttcgattccatcgatcaagaggagtctgctgaaggacagggtgtacggctgcctcgcccgctcctgaaccaggcccgggtgaagtgtgttgtgcacattcagcagctccagccccgctgtgggtcgcactgacatgttgggcccagcccacgccccagaagctcgcagcgccgttggtctggggaatggtgttttaggaaaaactcccgaagtgacaggatggtgtcgttgggcgtaagggccacggcactcccattgagttgcgacaagttccacaaaatcgtccctggtttttaataaggaaactgaggctcacttgagaagttaagaaagttgtcgctgacccgctaggccaagggatacgcagcatttcactcttgccttctctgatttgtgcaatcagtcaaggaaaaagcgcagcaaagagagaaagtcctgaaccttaaaacccaggagaaaacttatcctacaatgccgggcagttcacgctgatggaagcagcagccagaggaaggcacttgtctgggcttcctgcagcgctctgagaacagcccgctcctctgctggggaaggggtgacacagtcaatggagggggtggtctctgaacctggggcttgggatgggggcagagagcagctattcagccattctccatgggctgcccatttccaggtgggcttggggacagagaaaggcccaagcggccagaggggccctgggctccagttctaccggccccatgttgacatcgtgtccaacaagacaccaagagaagcagggagtggctgaccttcattttccgtatcaacacacagggggccctctgcacccaccaacatctttgtctcctgaaaaatggcctttgtcagttatttttaaaaactggtgctaatcctgagacacggagatactcccgggaagccatccgagcctggacacactgagatgaaaccacaaacacgccgagaggaaaagacattgattccagccctcaaagcaacgggacaaaaaacaaacaggaggcttccctcccgccccaggggcagcggccggtgtctgcggctctgcgggaagggctctcactgtgaccagattgtggcttctgattgtattgtagaatttctggcccagcttttaaggttcaaggcttcctccctttgcttttatcttattttcttgtttaataaagatacgcctgtgtgagaagca

SEQ ID NO: 114180 - DNA, 6835 bp, Homo sapiens
  Payload ID: 2316
  Gene Symbol: CA5B
  Gene Name: carbonic anhydrase VB, mitochondrial
  Uniprot ID: Q9Y2D0
  ENST ID: ENST00000318636
  CDS Start-End: 137-1090
gtagcttcgatggccggacgtgcaggctgcggatccccgtaggcgagcgagcggctaggttcgtgatctggagagacgctcagattattaagttcctgcaacttaactgggaactgatcaagatttcaagctaaagatggtggtgatgaacagcctgagggtcattcttcaagcctctccaggcaaattgctgtggagaaagttccagattccgagattcatgccagcgaggccctgcagcctctatacttgtacttacaaaacccggaaccgagccttgcatccactctgggagagcgtggacctggttcctgggggcgatcgccagtcacccatcaacattcggtggagggacagtgtttatgatcccggcttaaaaccactgaccatctcttatgacccagccacctgcctccacgtctggaataatgggtactctttcctcgtggaatttgaagattctacagataaatcagtgatcaagggaggacccctggaacacaactaccgattgaagcagttccattttcactggggggccatcgatgcctggggttctgagcacaccgtggacagcaaatgcttcccagcagagctgcacttagtgcattggaacgcagtcagatttgaaaactttgaggatgcagcactggaagaaaatggtttggctgtgataggagtatttttaaagctaggcaaacatcataaggagctacagaaattagtggatactttgccgtcaattaagcataaggacgcccttgtggaatttgggtcatttgacccttcctgcctgatgcctacctgcccagattactggacctactcagggtctctgactaccccacccctctccgagtctgtcacctggatcattaagaagcaaccagtagaggttgatcatgatcagcttgagcaatttcggaccctgcttttcacttccgaaggggagaaagagaaaagaatggtggacaacttccgcccccttcagccactgatgaatcgcactgttcgttcatccttccggcatgattatgtgctgaatgtacaagcgaaacccaagccggccaccagccaagcaaccccctaaaacattcatatctaggcagtattttgcttttgctttaatatatactagcttactataaattgttaactagactattctaagtgcctgcatttgataatatttacagatgtgcatttcttagcatgagagtgcttcatcagtctttgaggaaggctattcggtaccagcaagagacacaagtttctcttacagatacctgttggtaattgtaatgccttttttttttctttaagagactaggtcttgctctgctgcccaggctagagtgcagtggccaaatgatagctcactgcagccttgaactcctaggctcaagcagtcctcctgccttagcctctagagtagctggggctacaggtgctggccgcctggcccagcttgtaatatctttttatgtctgacatttttgagctatctttttatgtttatccattagtggttctatagcactatacatagggattataatcaaaatttttaacatgtggtaaggcacagacactgaccagaactcaggccttgcagaaacagcctatgggcccagactggtacttcctggctgaatattggccatggttttagatgtattttattttataacatgaatgtgtattctttcataagggcttatcagtcagtatatttgccccagtgtttagttgttacaaggacatgatatgcttacttactatcagtttatgatgtagaaaatatattttgtaattataagaaaacaagacttttcctatacccagaaatccctttgcatttccgaagatcagatattttgcttaaaggtctgatcatataggaaatatatgcagaacattttaaagaaaatgcctggctgggcacagtggctcacacctgtaatcccagcactttgggaggctgaggcgggtagctcacttgaggtcaggagtttgagaccagcctggccaacatgatgaaaccctgtcactactacaaataaaaaattagccaggcatggtggtgagcacctgtaatgccagctactcgggaagctgaggctggagaatcgcttgaacccaggaggtggtggttgtagtgaaccaagatcacaccactgcactccagcctgggcaacagagtgagactctgtgtctaataaaaaaaaaaaaagaaaagaaaagaaaaaatgcttaaagtgcctagaacttagaattctttcattgcacatttccagaaatatttttcttttcttttttttttttttttttgagatggagtctcgctctgtcccccaggctggagtgcagtggcactatcttggctcactgcaacctccacctcccgggtttaagcgattctcctgcctcagcctcctgagtaactgggactacaggcacatgccaccacgcccagctaatttttgtatttttagtagagatggggtttcactatgttggccaggctggtcttgaactcctgacctcaggtgatccacccgccttggcctcccaaagtgctgggattacaggcgtgagccaccgtgcccggccttccagaaatatttttcaaaggactagtaatctaatagcctatagtttatattattattttgtattatttgcacgctgttacatagtatataatgataatgttttctacagtgaaagagctatcccgtcttccctttacaactgtctgaactttatttactcattagtcaaggttctttgcaaggcaggtgattaacttaaatatctcagtttatacagtggtttaaaagacttttgttatggtaatagggagagaaacttgtcagataggctaaaatctagataattctacatattctgaggaattcatgctcctgtggctcttgcttataaatatcttggaatgtttctgaatgcctctaagcctatgttcagactctgttgcgtcaatgactggtagtatttctttcattaatatgtttgtcatctggtctgcaagatagggttggatgaatatacttaacactactgaactgtacacttaaagatcgttaggaaggaaacgggactacatcaaacttaaaaatgtctgtgtgtcaaaggaagcaatcaacaaagtgaaaacgcaagctctagaatgagagaaaataattgcaaatcgtctatcttataaggagcccaaatccagaatatatgaggaacttctacaactcaacaacaaaaaaccaaataactcaatttttaaaaatgggcaaaggacttgcacagacatttctccaaagaagttatacaattggccaataagaacatgaaaatatgctcaacattgccaattattagggaaatgcaaatcaaaaccacaatgagatatcgtctcacgcccatcatgatggccactatcagaagaacaaaaaaataacaagtattggggaggatgcagagaagttgaaacccttgtgcactgttggtggtaatgtaaaacggtgcagtcattacggaaaacagtacacaggtttcccaaataactgaaaacagaattaccataagaattaccaccaaagcgggatctcaaagagatatttgtacacccatgttcatagcagcattattcacaatagccaagaggttctggaagcatcccaaatgtccatcaacagatgaatagataaaggaaatgtggtatatacagtcaatggaatattattcagcctttaaaaagaaggaaatcctgtcaaatgtacaatgtggatgaaccttgaaggcattatgccaagtgaaataagccagccaacaaaagaacaaatgctatatgattcctccatgtgaagtatgcaaagtagtcaaaatcatacaatagaaagtagaaaggtggttgccaagcaacggttgggggaaggggagagggtgaatttgtatttagtgggtacagagcttgtgttgcaagaattctagagatctgttgcaaaacaagtgtgattgtacttaacactactgaactgtatacgtataagtttgagaaatatctcttttaaaaagggggaaatgtgaaggcttttgcatgtatgccctaggaaatgcatagaattcttagaaaggtaaacatggtaaaaaaagaagtctttgttaactttctgcagttcacctgtttcaaagtatagttacctttaaaagggtaaacacacaagatatgcattttccaaagcatacaggctttcctcctagctgtcttgttttttatttttttttattttttttatttttttgagacagagtcgcgctgtcacccgggctggagtgcagtggcgcgatctcggctcactgcaagctccgcctcccgggttcacgccattctcctgcctcagcctcctgagtagctgggactacaggcgcccgccaccacacccggctattttttgtattttaagtagagacagggtttcaccgtgttaaccaggatggtctcgatctgacctcgtgatccacccgtcttggcctcccaaagtgctgggattacaggtgtgagccactgtgcctggccttcctagctgtcttgtgaaacgataagtcaaaaccctactgcagtgagttttccaaactgaagggagaagcaatgtacagaatgcctgacttgcccttacatcttatacctggtgttctggcatgattattaaccacactctttttcactttgaaccatgtcctggtttgcatggccagcttccctgcagaggtgatagaaactgacttgaggcagtttctttctccatgccttagttagatgaccctcaaaggggcacagcagatttccctggctactgatacaccttaacaagaagcttgtgttttttatgccctcaaaagtgttttacttatactttcctagacataaaggtggaaaatgggcctaaggtctgtcaaaggtcttggaaaagaagattgtattaaaattgctgtccgtcttcattaaataatactagatcgatacaatgctttctttacagtattagtggttggtgaaagacttccttcctattgttacagtatatgtatatatctgtaaaattaatgagatatcctttaacttgtagattagaaagcgactaaaaactcataggggatttactaaagaagcaacaatgggaagaagcagccgatcctcctcagtgcacctttttctgttgcacagtacagtgcacagtgtgctggcatcaccatatagggcaagctgtgaccgcctttctcctttcccagggctacatggtgccaagcaggttcagtgtacactggttaccaacctgtctgattccattgtgacagaacacactcacacccaatacattacatgaagcagatttattacttacagacaggaagcaagggacaaaagaggccctggctccattgtgagccagtcccccagggctcaagaaagctgcccagggcggggctgatggagtcttgattgtacgtgccccacttgcaccacagcctgccttgggttatataccataggagccacataactcattgggcaaagctttaaagtacatcctccttccaggggaaagaggaacacaacctcgctgtctcaaacagttccctaaatcaagatgttacattccctaggagggacaacaacaaggccaacctgtttcaggcagttcctccatatcaggatattgcattcccagtgcattctacagttattcttaagaactacaagcaaggaagaagggagaactgggtcagtccaaggccacctggagaactgtcttgtacatgggttagggtaaagttggctattctaaaactaagcatccgcccaaaagaagtcttggaagatgtctttccctgttaaattcagatgatggtaattatagtttggaagtggaattggcttttagagttacttcctgtaatgaaattaacaagcaattcaggcctatttctgaaaatgaattcagtggttaattgttaaaaataaatgtctaactcctataaaaggaaatttacattcatttctaactcactaaaaaatctatggccgggtgcggtggctcatgcctgtaatcccagcattttgggaggccgaggcgggcagattaccggaggtcaagagttcgagaacagcctggccaatatggtgaaaccccgtctctactaaaaaatacaaaaattagccaggtggttgtggcatgcacctgtaatcccagctacgcaggaggctgaggcagaagaatcgcttgagcccaggaggcggaggttgcagtgagccgagatttcttagaaggaattgttacttattgttctgaagtgaaagtctggtctgattcagaagaaatgttacaacaacttaaacactgatgctttcagaacgggcagcaattctcagcgtaaattctgatcacagggaccagcaaaattggtgagttgcatagctacaacattctgtgccatccagggcactctagtttggggatacaactgccaaacctccaactagagagtttagtttaagatttagtcaagaagcagaaaggtaaaggtgacaatgtgtagtaaaccatgatagatgttataaaaggtggaatacttgtactggaaatgcatacagcgcctcatcccctcttgaggggtcaggaagttttcacactaatgatgatggtgatgagatgatgtaacagctaaagttttggaggcattcactattgctaggcactgtatcagcatataacatggcttatcttactcagttttcacaataaaagggttatgagatggg

SEQ ID NO: 114181 - DNA, 2205 bp, Homo sapiens
  Payload ID: 2316
  Gene Symbol: CA5B
  Gene Name: carbonic anhydrase VB, mitochondrial
  Uniprot ID: Q9Y2D0
  ENST ID: ENST00000454127
  CDS Start-End: 55-1008
gattattaagttcctgcaacttaactgggaactgatcaagatttcaagctaaagatggtggtgatgaacagcctgagggtcattcttcaagcctctccaggcaaattgctgtggagaaagttccagattccgagattcatgccagcgaggccctgcagcctctatacttgtacttacaaaacccggaaccgagccttgcatccactctgggagagcgtggacctggttcctgggggcgatcgccagtcacccatcaacattcggtggagggacagtgtttatgatcccggcttaaaaccactgaccatctcttatgacccagccacctgcctccacgtctggaataatgggtactctttcctcgtggaatttgaagattctacagataaatcagtgatcaagggaggacccctggaacacaactaccgattgaagcagttccattttcactggggggccatcgatgcctggggttctgagcacaccgtggacagcaaatgcttcccagcagagctgcacttagtgcattggaacgcagtcagatttgaaaactttgaggatgcagcactggaagaaaatggtttggctgtgataggagtatttttaaagctaggcaaacatcataaggagctacagaaattagtggatactttgccgtcaattaagcataaggacgcccttgtggaatttgggtcatttgacccttcctgcctgatgcctacctgcccagattactggacctactcagggtctctgactaccccacccctctccgagtctgtcacctggatcattaagaagcaaccagtagaggttgatcatgatcagcttgagcaatttcggaccctgcttttcacttccgaaggggagaaagagaaaagaatggtggacaacttccgcccccttcagccactgatgaatcgcactgttcgttcatccttccggcatgattatgtgctgaatgtacaagcgaaacccaagccggccaccagccaagcaaccccctaaaacattcatatctaggcagtattttgcttttgctttaatatatactagcttactataaattgttaactagactattctaagtgcctgcatttgataatatttacagatgtgcatttcttagcatgagagtgcttcatcagtctttgaggaaggctattcggtaccagcaagagacacaagtttctcttacagatacctgttggtaattgtaatgccttttttttttctttaagagactaggtcttgctctgctgcccaggctagagtgcagtggccaaatgatagctcactgcagccttgaactcctaggctcaagcagtcctcctgccttagcctctagagtagctggggctacaggtgctggccgcctggcccagcttgtaatatctttttatgtctgacatttttgagctatctttttatgtttatccattagtggttctatagcactatacatagggattataatcaaaatttttaacatgtggtaaggcacagacactgaccagaactcaggccttgcagaaacagcctatgggcccagactggtacttcctggctgaatattggccatggttttagatgtattttattttataacatgaatgtgtattctttcataagggcttatcagtcagtatatttgccccagtgtttagttgttacaaggacatgatatgcttacttactatcagtttatgatgtagaaaatatattttgtaattataagaaaacaagacttttcctatacccagaaatccctttgcatttccgaagatcagatattttgcttaaaggtctgatcatataggaaatatatgcagaacattttaaagaaaatgcctggccttccagaaatatttttcaaaggactagtaatctaatagcctatagtttatattattattttgtattatttgcacgctgttacatagtatataatgataatgttttctacagtgaaagagctatcccgtcttccctttacaactgtctgaactttatttactcattagtcaaggttctttgcaaggcaggtgattaacttaaatatctcagtttatacagtggtttaaaagacttttgttatggtaatagggagagaaacttgtcagataggctaaaatctagataattctacatattctgaggaattcatgctcctgtggctcttgcttataaatatcttggaatgtt

SEQ ID NO: 114182 - DNA, 517 bp, Homo sapiens
  Payload ID: 2316
  Gene Symbol: CA5B
  Gene Name: carbonic anhydrase VB, mitochondrial
  ENST ID: ENST00000478341
  CDS Start-End: 1-212
gcgtggacctggttcctgggggcgatcgccagtcacccatcaacattcggtggagggacagtgtttatgatcccggcttaaaaccactgaccatctcttatgacccagccacctgcctccacgtctggaataatgggtactctttcctcgtggaatttgaagattctacagataaatcagagtgtgcccccttctcaactggaagtccataatattaccttgtttatacggattccagaaatcttcaaaacaacaagctaaattcctgtgttctggatgactgtctggcactctgtgactgcctcttatttcctgtttattctttgctgctatttctccatgttgttgcaaaacaatcaatagcatgcaaagaggaaaaaaagagtgaatgaacataaaaaataaaaagtgaaagaaagcaagacattttagaaacaaaggcaagaaacaattctagaaaagtaaaaacctaataaatatcgatgtctataaatttcaaagacaaaaccctaagaaa

SEQ ID NO: 114183 - DNA, 529 bp, Homo sapiens
  Payload ID: 2316
  Gene Symbol: CA5B
  Gene Name: carbonic anhydrase VB, mitochondrial
  ENST ID: ENST00000479740
  CDS Start-End: 122-529
agaggtttctccatcatcttaagtttctgttgtttacagctttccctcctctgccctcatccctctagattattaagttcctgcaacttaactgggaactgatcaagatttcaagctaaagatggtggtgatgaacagcctgagggtcattcttcaagcctctccaggcaaattgctgtggagaaagttccagattccgagattcatgccagcgaggccctgcagcctctatacttgtacttacaaaacccggaaccgagccttgcatccactctgggagagcgtggacctggttcctgggggcgatcgccagtcacccatcaacattcggtggagggacagtgtttatgatcccggcttaaaaccactgaccatctcttatgacccagccacctgcctccacgtctggaataatgggtactctttcctcgtggaatttgaagattctacagataaatcagtgatcaagggaggacccctggaacacaactaccgattgaagcagttccattttcactggggggccatc

SEQ ID NO: 114184 - DNA, 488 bp, Homo sapiens
  Payload ID: 2316
  Gene Symbol: CA5B
  Gene Name: carbonic anhydrase VB, mitochondrial
  ENST ID: ENST00000498004
  CDS Start-End: 259-488
ggaatttgaagattctacagataaatcagtggcactatcacaacagagtgacataatggtgggataacatggacacttgtcttcttccttactgtaatgggactatttctactccacataatctgcacagtgctcgacatgagataatcactcactgttccttcagttcaggactggaaatcaatggaaaggaagaacagttaagattattaagttcctgcaacttaactgggaactgatcaagatttcaagctaaagatggtggtgatgaacagcctgagggtcattcttcaagcctctccaggcaaattgctgtggagaaagttccagattccgagattcatgccagcgaggccctgcagcctctatacttgtacttacaaaacccggaaccgagccttgcatccactctgggagagcgtggacctggttcctgggggcgatcgccagtcacccatcaacattcggtggagggacagtgtttatga

SEQ ID NO: 114185 - DNA, 942 bp, Homo sapiens
  Payload ID: 2317
  Gene Symbol: CA6
  Gene Name: carbonic anhydrase VI
  Uniprot ID: P23280
  ENST ID: ENST00000377436
  CDS Start-End: 1-942
atgagggccctggtgcttctgctgtccctgttcctgctgggtggccaggcccagcatgtgtctgactggacctactcagaaggggcactggacgaagcgcactggccacagcactaccccgcctgtgggggccagagacagtcgcctatcaacctacagaggacgaaggtgcggtacaacccctccttgaaggggctcaatatgacaggctatgagacccaggcaggggagttccccatggtcaacaatggccacacagtgcagatcagcctgccctccaccatgcgcatgacagtggctgacggcactgtatacatagcccagcagatgcactttcactggggaggtgcgtcctcggagatcagcggctctgagcacaccgtggacgggatcagacatgtgatcgagattcacattgttcactacaattctaaatacaagagctatgatatagcccaagatgcgccggatggtttggctgtactggcagccttcgttgaggtgaagaattaccctgaaaacacttattacagcaacttcatttctcatctggccaacatcaagtacccaggacaaagaacaaccctgactggccttgacgttcaggacatgctgcccaggaacctccagcactactacacctaccatggctcactcaccacgcctccctgcactgagaacgtccactggtttgtgctggcagattttgtcaagctctccaggacacaggtttggaagctggagaattccttactggatcaccgcaacaagaccatccacaacgattaccgcaggacccagcccctgaaccacagagtggtggaatccaacttcccgaatcagggcaagggccacggggggcatcgtgggagaagccaaaatccaagagtacagcccacctcaacacgccaccccttggctctgggcagcttagaagcctga

SEQ ID NO: 114186 - DNA, 747 bp, Homo sapiens
  Payload ID: 2317
  Gene Symbol: CA6
  Gene Name: carbonic anhydrase VI
  Uniprot ID: P23280
  ENST ID: ENST00000377442
  CDS Start-End: 1-747
atgagggccctggtgcttctgctgtccctgttcctgctgggtggccaggcccagcatgtgtctgactggacctactcagtgcagatcagcctgccctccaccatgcgcatgacagtggctgacggcactgtatacatagcccagcagatgcactttcactggggaggtgcgtcctcggagatcagcggctctgagcacaccgtggacgggatcagacatgtgatcgagattcacattgttcactacaattctaaatacaagagctatgatatagcccaagatgcgccggatggtttggctgtactggcagccttcgttgaggtgaagaattaccctgaaaacacttattacagcaacttcatttctcatctggccaacatcaagtacccaggacaaagaacaaccctgactggccttgacgttcaggacatgctgcccaggaacctccagcactactacacctaccatggctcactcaccacgcctccctgcactgagaacgtccactggtttgtgctggcagattttgtcaagctctccaggacacaggtttggaagctggagaattccttactggatcaccgcaacaagaccatccacaacgattaccgcaggacccagcccctgaaccacagagtggtggaatccaacttcccgaatcaggaatacactctaggctctgaattccagttttacctacataagattgaggaaattcttgactacttaagaagagcattgaactga

SEQ ID NO: 114187 - DNA, 1319 bp, Homo sapiens
  Payload ID: 2317
  Gene Symbol: CA6
  Gene Name: carbonic anhydrase VI
  Uniprot ID: P23280
  ENST ID: ENST00000377443
  CDS Start-End: 5-931
caccatgagggccctggtgcttctgctgtccctgttcctgctgggtggccaggcccagcatgtgtctgactggacctactcagaaggggcactggacgaagcgcactggccacagcactaccccgcctgtgggggccagagacagtcgcctatcaacctacagaggacgaaggtgcggtacaacccctccttgaaggggctcaatatgacaggctatgagacccaggcaggggagttccccatggtcaacaatggccacacagtgcagatcagcctgccctccaccatgcgcatgacagtggctgacggcactgtatacatagcccagcagatgcactttcactggggaggtgcgtcctcggagatcagcggctctgagcacaccgtggacgggatcagacatgtgatcgagattcacattgttcactacaattctaaatacaagagctatgatatagcccaagatgcgccggatggtttggctgtactggcagccttcgttgaggtgaagaattaccctgaaaacacttattacagcaacttcatttctcatctggccaacatcaagtacccaggacaaagaacaaccctgactggccttgacgttcaggacatgctgcccaggaacctccagcactactacacctaccatggctcactcaccacgcctccctgcactgagaacgtccactggtttgtgctggcagattttgtcaagctctccaggacacaggtttggaagctggagaattccttactggatcaccgcaacaagaccatccacaacgattaccgcaggacccagcccctgaaccacagagtggtggaatccaacttcccgaatcaggaatacactctaggctctgaattccagttttacctacataagattgaggaaattcttgactacttaagaagagcattgaactgaggaaagctaagaggaagattcaatattaactagcttgaagcctgacctagccagaagtgcctgtccgctgcagccgcaccctaccttgtctaagaaaccatgtgtgtctggaacacgctgctccccctggggcagctgttgggattctgattaaaagaggggaaacgatcatcctggacaggaagtgagatggcttcagttcatgagacgggatctgagttagacatcaccagtggaaattgattggaatagaaacttaaaggaaatggaaccctaactattctcccatcaaatcatatatgttgacctgtctgaattataaaccagcctgacctttcctttagcattagatgtaataaaataactttggaaatttgtcatttaaaaa

SEQ ID NO: 114188 - DNA, 1493 bp, Homo sapiens
  Payload ID: 2317
  Gene Symbol: CA6
  Gene Name: carbonic anhydrase VI
  ENST ID: ENST00000480186
  CDS Start-End: 6-545
gcaccatgagggccctggtgcttctgctgtccctgttcctgctgggtggccaggcccagcatgtgtctgactggacctactcagaaggggcactggacgaagcgcactggccacagcactaccccgcctgtgggggccagagacagtcgcctatcaacctacagaggacgaaggtgcggtacaacccctccttgaaggggctcaatatgacaggctatgagacccaggcaggggagttccccatggtcaacaatggccacacagattggcaggcggaactcttcctcccctccttgtcctctccttgtggagaaggggcgaagcacaaaggccaaaggcagtggctttgttcaccctccctggacagctggtgggaagcaatcattgatggaggatctctatgggcaacgcttgctgagtgcgggcttcgtgctgagggcccagaagagggaaggcatatggaagagaagagcccagcttcccaaggggcttgcagcggctcccgcctcccaatttccagaggaccctgtaccttcttcctttagggctctgctcaaatttctgtggtccggaagcctgttcctttggggttctcacctcacacgacagcatgtcggacattagagtggacccaaagttcacattaattatatatatattaaaaacaatttttttttttgagatggagtcttgctctgtcaccccggctggagtgcagtggtgcaatcttggctcactgaaacctccacttcccagattcaagcaattctcctgcctcagcttccctggtacctgggactacaggcatgtgccaccacgcccagctaatttttgtatttttagtagagatgcggttttgtcatactggccagtctggtctcgaactccttgcctcaagtgctctgcccaccttggcctcccaaagtgctaggattacaggcacgagccaccaaggctggccataattccatttttcgatgtaaagggtttttttctgagatggagtctcactctgtcacccaggctggaatgcagtggcatgatcttggctcactgcaacctctgcctcctagggtcaagcaattctcatgcctcagcctcctgagtagatgggactacaggcgcacaccaccacccccagctaatttttgtattttttgtagagatggggtttcagcatgttggcctggctggtctcgaactcctgacctcaagtgatccgcccaccttggcctcccaaagtgttgagattatatgcataagccaccgtgcccagcctgatataaagtattttgaaagatttttataatttagcttttgaagttatttggctattgccattggctacttttcagcaagctccaagcacattcaggaattctactgaagggggaaaaaaagctaatctacaaactttgaatctaatgagattttgatgaacactaagcttaacagtaaagttgacatgacgtattaaagatttgttaattttt

SEQ ID NO: 114189 - DNA, 582 bp, Homo sapiens
  Payload ID: 2317
  Gene Symbol: CA6
  Gene Name: carbonic anhydrase VI
  ENST ID: ENST00000549778
  CDS Start-End: 21-582
cattacagatgtgcagcaccatgagggccctggtgcttctgctgtccctgttcctgctgggtggccaggcccagcatgtgtctgactggacctactcagaaggggcactggacgaagcgcactggccacagcactaccccgcctgtgggggccagagacagtcgcctatcaacctacagaggacgaagatcagcctgccctccaccatgcgcatgacagtggctgacggcactgtatacatagcccagcagatgcactttcactggggaggtgcgtcctcggagatcagcggctctgagcacaccgtggacgggatcagacatgtgatcgagattcacattgttcactacaattctaaatacaagagctatgatatagcccaagatgcgccggatggtttggctgtactggcagccttcgttgaggtgaagaattaccctgaaaacacttattacagcaacttcatttctcatctggccaacatcaagtacccaggacaaagaacaaccctgactggccttgacgttcaggacatgctgcccaggaacctccagcactactacacctaccatggctcactca

SEQ ID NO: 114190 - DNA, 1555 bp, Homo sapiens
  Payload ID: 2318
  Gene Symbol: CA7
  Gene Name: carbonic anhydrase VII
  Uniprot ID: P43166
  ENST ID: ENST00000338437
  CDS Start-End: 110-904
ccgctgctttaagaggctgctccgcggtagcgagcggggccggagccgcagcccgaacgagcggaccgagccgaccgggcaggtgcacggctgcggggacggcagcggcatgaccggccaccacggctggggctacggccaggacgacggcccctcgcattggcacaagctgtatcccattgcccagggagatcgccaatcacccatcaatatcatctccagccaggctgtgtactctcccagcctgcaaccactggagctttcctatgaggcctgcatgtccctcagcatcaccaacaatggccactctgtccaggtagacttcaatgacagcgatgaccgaaccgtggtgactgggggccccctggaagggccctaccgcctcaagcagtttcacttccactggggcaagaagcacgatgtgggttctgagcacacggtggacggcaagtccttccccagcgagctgcatctggttcactggaatgccaagaagtacagcacttttggggaggcggcctcagcacctgatggcctggctgtggttggtgtttttttggagacaggagacgagcaccccagcatgaatcgtctgacagatgcgctctacatggtccggttcaagggcaccaaagcccagttcagctgcttcaaccccaagtgcctcctgcctgccagccggcactactggacctacccgggctctctgacgactcccccactcagtgagagtgtcacctggattgtgctccgggagcccatctgcatctctgaaaggcagatggggaagttccggagcctgctttttacctcggaggacgatgagaggatccacatggtgaacaacttccggccaccacagccactgaagggccgcgtggtaaaggcctccttccgggcctgagctgcccatctgcctagccggccactagggcaccatcttctcaagggcttccatgtcagcagacaccaaaccatctgaggcttcctccctggggggtgctggggaccctccttcagccagtttgctccttggtcaccctggaggcttctggatgggacccttgagtctggggcacccttcagctgccctggggacaggaaggacaggagctaagcagggtccaagcctggggctgcctctgctctccaagacccaaagaccctgggaacctcctctggtcttccccactggcagtggcagcagccccaccccgagcgcacactgtgatggaggagactgagctccctggggcgggcagctgacactaccagagagactcaagcaataattagaggtgggcagagctgccctctcggcattacctcttctgcaggctctgccatgcacgcacctcactgccaggccattaaaatcagcacccagcatgctggaggtgacgtggccttctccctccagccacctgctgccacgggcaggccctggctatagcttatacagtatctccccttgtccccacccagtcaccaaagccacctacatgacagtccatccctgttgaattaataaattaatgtatccatgcaacaaata

SEQ ID NO: 114191 - DNA, 1713 bp, Homo sapiens
  Payload ID: 2318
  Gene Symbol: CA7
  Gene Name: carbonic anhydrase VII
  Uniprot ID: P43166
  ENST ID: ENST00000394069
  CDS Start-End: 432-1058
cggcaagtgagcggggacctcgggggagcggggctccgcgtggcaagggcgcagtgtcccccggagagaatttccccgcagaagtggccgagctgccttctcggccggtacgtgagggaagggggcacttgggggcgcaagcatgtgtctgggtgtctacaccgagcagggtgtttgcgcacgtccgggtgtgagtcgtgggagcccgtggcccacaccagcctcctgggctgacgcggaagagagctccttcatcctgcctcagtttccttaggactcagagaaagggagaagaggcagaaggcccctcgcattggcacaagctgtatcccattgcccagggagatcgccaatcacccatcaatatcatctccagccaggctgtgtactctcccagcctgcaaccactggagctttcctatgaggcctgcatgtccctcagcatcaccaacaatggccactctgtccaggtagacttcaatgacagcgatgaccgaaccgtggtgactgggggccccctggaagggccctaccgcctcaagcagtttcacttccactggggcaagaagcacgatgtgggttctgagcacacggtggacggcaagtccttccccagcgagctgcatctggttcactggaatgccaagaagtacagcacttttggggaggcggcctcagcacctgatggcctggctgtggttggtgtttttttggagacaggagacgagcaccccagcatgaatcgtctgacagatgcgctctacatggtccggttcaagggcaccaaagcccagttcagctgcttcaaccccaagtgcctcctgcctgccagccggcactactggacctacccgggctctctgacgactcccccactcagtgagagtgtcacctggattgtgctccgggagcccatctgcatctctgaaaggcagatggggaagttccggagcctgctttttacctcggaggacgatgagaggatccacatggtgaacaacttccggccaccacagccactgaagggccgcgtggtaaaggcctccttccgggcctgagctgcccatctgcctagccggccactagggcaccatcttctcaagggcttccatgtcagcagacaccaaaccatctgaggcttcctccctggggggtgctggggaccctccttcagccagtttgctccttggtcaccctggaggcttctggatgggacccttgagtctggggcacccttcagctgccctggggacaggaaggacaggagctaagcagggtccaagcctggggctgcctctgctctccaagacccaaagaccctgggaacctcctctggtcttccccactggcagtggcagcagccccaccccgagcgcacactgtgatggaggagactgagctccctggggcgggcagctgacactaccagagagactcaagcaataattagaggtgggcagagctgccctctcggcattacctcttctgcaggctctgccatgcacgcacctcactgccaggccattaaaatcagcacccagcatgctggaggtgacgtggccttctccctccagccacctgctgccacgggcaggccctggctatagcttatacagtatctccccttgtccccacccagtcaccaaagccacctacatgacagtccatccctgttgaattaataaattaatgtatccatgcaacaaataccaa

SEQ ID NO: 114192 - DNA, 1161 bp, Homo sapiens
  Payload ID: 2318
  Gene Symbol: CA7
  Gene Name: carbonic anhydrase VII
  ENST ID: ENST00000548332
  CDS Start-End: 432-566
cggcaagtgagcggggacctcgggggagcggggctccgcgtggcaagggcgcagtgtcccccggagagaatttccccgcagaagtggccgagctgccttctcggccggtacgtgagggaagggggcacttgggggcgcaagcatgtgtctgggtgtctacaccgagcagggtgtttgcgcacgtccgggtgtgagtcgtgggagcccgtggcccacaccagcctcctgggctgacgcggaagagagctccttcatcctgcctcagtttccttaggactcagagaaagggagaagaggcagaaggcccctcgcattggcacaagctgtatcccattgcccagggagatcgccaatcacccatcaatatcatctccagccaggctgtgtactctcccagcctgcaaccactggagctttcctatgaggcctgcatgtccctcagcatcaccaacaatggccactctgtccaggtagacttcaatgacagcgatgaccgaaccgctgcatctggttcactggaatgccaagaagtacagcacttttggggaggcggcctcagcacctgatggcctggctgtggttggtgtttttttggagacaggagacgagcaccccagcatgaatcgtctgacagatgcgctctacatggtccggttcaagggcaccaaagcccagttcagctgcttcaaccccaagtgcctcctgcctgccagccggcactactggacctacccgggctctctgacgactcccccactcagtgagagtgtcacctggattgtgctccgggagcccatctgcatctctgaaaggcagatggggaagttccggagcctgctttttacctcggaggacgatgagaggatccacatggtgaacaacttccggccaccacagccactgaagggccgcgtggtaaaggcctccttccgggcctgagctgcccatctgcctagccggccactagggcaccatcttctcaagggcttccatgtcagcagacaccaaaccatctgaggcttcctccctggggggtgctggggaccctccttcagccagtttgctccttggtcaccctggaggcttctggatgggacccttgagtctggggcacccttcagctgccctggggacaggaaggacaggagctaagcagggtcc

SEQ ID NO: 114193 - DNA, 3812 bp, Homo sapiens
  Payload ID: 2319
  Gene Symbol: CA8
  Gene Name: carbonic anhydrase VIII
  Uniprot ID: P35219
  ENST ID: ENST00000317995
  CDS Start-End: 266-1138
cgctcgctccccaggccacagccgctccctcgctctgctggggcctccggacgcgcttcccacgcgggtctctggaacactcggtccgaacgcacgcctgcttgcactcacactgcggttcacacccggaggcgctctcgcactcacactgccgctcacgcgtgctcacactcccccacgcgcgctccgctccggctccagccccgcgcccagcgaaggcgcaggcactgctgccgagagcgccgaggggccccgcggccttcccatggcggacctgagcttcatcgaagataccgtcgccttccccgagaaggaagaggatgaggaggaagaagaggagggtgtggagtggggctacgaggaaggtgttgagtggggtctggtgtttcctgatgctaatggggaataccagtctcctattaacctaaactcaagagaggctaggtatgacccctcgctgttggatgtccgcctctccccaaattatgtggtgtgccgagactgtgaagtcaccaatgatggacataccattcaggttatcctgaagtcaaaatcagttctttcgggaggaccattgcctcaagggcatgaatttgaactgtacgaagtgagatttcactggggaagagaaaaccagcgtggttctgagcacacggttaatttcaaagcttttcccatggagctccatctgatccactggaactccactctgtttggcagcattgatgaggctgtggggaagccgcacggaatcgccatcattgctctgtttgttcagataggaaaggaacatgttggcttgaaggctgtgactgaaatcctccaagatattcagtataaggggaagtccaaaacaataccttgctttaatcctaacactttattaccagaccctctgctgcgggattactgggtgtatgaaggctctctcaccatcccaccttgcagtgaaggtgtcacctggatattattccgataccctttaactatatcccagctacagatagaagaatttcgaaggctgaggacacatgttaagggggcagaacttgtggaaggctgtgatgggattttgggagacaactttcggcccactcagcctcttagtgacagagtcattagagctgcatttcagtagccaaagaggacaggaacaagtctgtcttcatgagggaggaagacaatggtcctataatgcccttggataagaaaaggaaacttttgagctgcaccttcagtttatcctcaaagcctgcgttgtttgtcttcatctaatccagctttgatggacatctgtgatggttgcctgtacacttgctgaaatgaaatattagaaatggctgtatattccaaagaaaccctatattatatatccacattactgctgctaggattcatagttgcacatactgtttattgcttatgtgtagaaggaatgaaactagtttccagagttgttattaatatgaatatatatcatgtgttaatattgagaaaggaaaaatacattcccggtgttagtagttcttcatttcctgtctccaacagaaaattcactcattttagaactagtgtaattcttgataataaaataagagttttgattaagaacagcatagagcttcaaaatgcaaagtgaatgattagtaaaattatgtctcattttattttttcagcacccataccacaattaatattaggctggattgccatgggaaacattttttggcattaatgcagcaacataatactcactttaggtattactacatagttgaaggatttaactgaatgtatggatcaaatttatttatttgacatattcgaagctgtggtttaataggaatttgagaaaggtgtaagaaataggataaaaagaaggtcagcaccatgtaccaggaatagctttactttccatacatagaaatataaatttagtggtatcctatattactttagtgtcgtacgctttgtaagacttaaatattttattctattgattccactactttggtatgttaagacatttctttaaagatgaccaacaatatccttattttaggtgccactagcagatgtaagcgtatacttagttgccgttagatgtgacagaatgagataatttatgtaaagcagtagagtacctggcacaaagcaaacaataaatattattgttattgttgttataattgtaaaatgaatgacttcaaaaacatagtcccagtttggagggattttgtgatgcagaatatctaagtcatagaaatagaagacaggtggaataagtatatgttcagagtttttagatgtgttgagtagagacggtaataatggaagcattaaatacaaatgaaaatcacaccagatatccctgaaattcaagcaaagaaagttcatcatgtattcttgggcagcaagagaaaggactagggttatggcaatgtgtggaaaagttgaggcttgctaagggttgagatctgttggtagccctggatcacatggggtcagcaccaggcagtgcctctgaaagcggagagaggtcctggacttcccttgtgtataacagttcctagtgtccaacaatgaggaaacggtgaagcatggttacaaaactgtgacaaaaatatttacatctagcactgttaccactcacatgccaaacattggctgcacacgtgcagccttatttgtaattaacatcaaaagactagatctgaagccttccataaatgagaggccattcatatggcattcctggaacaaaacactgcacaggtaccagcctctccactcctgaccgggttggtgctgaacagtcagggattgttcttgaactagacttctgatgcttcttgcaatcttctttcatctttccctgaaatacacaaaataaacaaatacaataacaaatagtaattaaatgactttcaggataacatctagttgttcagacttcacccttcacaggtgtgtgtgtatgtgtgtttatgtctgtatattgaagcaatttgaatttatttactgtatattttctgagtaaaagactgaaatgaactacttggttcagatcatggtgtccattggtgacattgtttggaggcataatattctttatatggaaaatcctttaattccacagttagttacctcagattcagaatatgaatactgtttataatacgcttttgtaggaatgaatttgaaaggtagtttgtcagtaaacgaaagcacaacaactaatctcaaatctgttttgatggtgtgataggaaagaaagtaaaacctatgtgatggaccctgtaattggggcaggaatctcccaaagaaaaaggggagaattaatgacaaatgtcatagatcttgaaatttaatttagggtgcattttgtttatgaaacaatttaataaggcaacaaagtgaaatgatttttcatgtagcttatacacatgtaagtgcctctgattcatggtaactaacgtacctgatggtgtgtaaagtaatactgttgtcagaaggtttgccaattaagataatttgagtttactctttttttgttggttagtttagctgaaggcttgtcaattttattgatttttttcaaggagccaaagtggattttggggttttctctattgtgtttgtattctctatgtcatcaaactctgctcaaatcttacaaaatagtaagattagtaagaaagcagactaacttctgcttgctttgtatttagtttgtgtcttttccagtattttaaggtggaaggttaggttattgatttgaattcttttttgaataaaggcattaacagtta

SEQ ID NO: 114194 - DNA, 2914 bp, Homo sapiens
  Payload ID: 2320
  Gene Symbol: CA10
  Gene Name: carbonic anhydrase X
  Uniprot ID: Q9NS85
  ENST ID: ENST00000285273
  CDS Start-End: 1113-2099
ttcaattcccctgcatccacactgcaaccgggtgcaagtctttcctaggttatagacagcccgcctccccacgagaccttctgcggactggctgcccctggcctcggcctgggtgggtgggtggtgctcgcgccgcccctactttcccctggggccctggagagccgcgcgctgggtgtgtgtgtgtgtgcgcgcgcgggtttggtggggaaatctccttcagtggaagctgctgagtgtcgttggcggaaagtatcctggagcccagcaaaagcctccaaagcactagagcttccctaaagaaaagcagaataaaagaaagacaagaagggaagcccgttcctctaaagcccgggtttccaatagtcccggatcctcctggagttgggcgaaggcgcagttggcagcagccgctgctggcacccggacttggaaaggcggtgttcccccttttcgggaggagggaggcagggacttgcaggcaagagttgcacctggtctaggaacctgcagagaaaagaactctggggagaagaactgccccggagcgcagcagccaccctccgaccatgccccggtgaggggggcggacttcgagggcaacttgccgcggactgcctgggcttagccagcgagctacgcgctcccgggagcccggaattgcacggcgcagcccggcggggggctatcgtctatgtcttcttggggcgccagacgaatcggggtctcgtttttgctggaagagcccagtgttggtggcttcaggtggctgctgccgccgccgccgccgccgccgctgctagtgcggtttccgccgctggtgcgaagagaagagacacgcgagcggggagacctccaaggcagcgaggcatcggacatgtgtcagcacatctggggcgcacatccgtcgagcccgaggggagatttgccggaacaattcaaactgcgatattgatcttgggggtgactgtccctggccggctgtcgggtgggagtgcgagtgtgcactcgctcggaagtgtgtgcgagtgtgtatgtgtgtgtgccgtgtcgggctccccccttccccccgttttcccgtcgagtgatgcacttggaatgagaatcagaggatggaaatagtctgggaggtgctttttcttcttcaagccaatttcatcgtctgcatatcagctcaacagaattcaccaaaaatccatgaaggctggtgggcatacaaggaggtggtccagggaagctttgttccagttccttctttctggggattggtgaactcagcttggaatctttgctctgtggggaaacggcagtcgccagtcaacatagagaccagtcacatgatcttcgacccctttctgacacctcttcgcatcaacacggggggcaggaaggtcagtgggaccatgtacaacactggaagacacgtatcccttcgcctggacaaggagcacttggtcaacatatctggagggcccatgacatacagccaccggctggaggagatccgactacactttgggagtgaggacagccaagggtcggagcacctcctcaatggacaggccttctctggggaggtgcagctcatccactataaccatgagctatatacgaatgtcacagaagctgcaaagagtccaaatggattggtggtagtttctatatttataaaagtttctgattcatcaaacccatttcttaatcgaatgctcaacagagatactatcacaagaataacatataaaaatgatgcatatttactacaggggcttaatatagaggaactatatccagagacctctagtttcatcacttacgatgggtcgatgactatcccaccctgctatgagacagcaagttggatcataatgaacaaacctgtctatataaccaggatgcagatgcattccttgcgcctgctcagccagaaccagccatctcagatctttctgagcatgagtgacaacttcaggcctgtccagccactcaacaaccgctgcatccgcaccaatatcaacttcagtttacaggggaaggactgtccaaacaaccgagcccagaagcttcagtatagagtaaatgaatggctcctcaagtagggaacaaagccaagaagaatcccacctcagtgaaatgctacaactgtgaattgacgtaacctagaatgtcccccttcttgcttctctctccttctttcccccaagcctcattcattcttgggattggccctttcttcatgaaaagtgtctgcaaaaccatggcagaggaatacatctctcacacatactcacaaacacacacacaagcacttgcacatacatacaaacacatgcaaacatacctacacacacacacactcttacaacctccatcatgggaagtcaagtttcagaaacaaaagtctcattcataagaggtcttagaagaaaataaccagttaacctgatttcaattttgataccgttttcctgaactaataaatctacccaatgagacttttcagcctttgtacatacaaaattcttccaaaagagagaggagaaaatacagctctgatggcatcaaacggactttgcatcaagtaatttcagatagtgtcctaggatcctttgagggtgctggtagcaggtgagcaggacaaagttgaccaaggacacttatttctagattatgattcttctgtttactcaacaatttacaaagaaaaaaaggacagacattgaagagctacacattgtatatatatcaccacagactataaggaaatggaattatttccctctttgtcacatatctgtagtaggatttgccaagatcagaaatgatccatttgctgtttcttgttttccaaaggtcatacattgtgtttggttattgttaccagctcaataaatgtgtttaacgagttaatttc

SEQ ID NO: 114195 - DNA, 2935 bp, Homo sapiens
  Payload ID: 2320
  Gene Symbol: CA10
  Gene Name: carbonic anhydrase X
  Uniprot ID: Q9NS85
  ENST ID: ENST00000442502
  CDS Start-End: 678-1664
acagttcccaatcgggacaagcgcgccgagaaatcctggatcttcccagggattccctctacgctccctcctcttcttcaataaccccaaagaggagaagaactgccccggagcgcagcagccaccctccgaccatgccccggtgaggggggcggacttcgagggcaacttgccgcggactgcctgggcttagccagcgagctacgcgctcccgggagcccggaattgcacggcgcagcccggcggggggctatcgtctatgtcttcttggggcgccagacgaatcggggtctcgtttttgctggaagagcccagtgttggtggcttcaggtggctgctgccgccgccgccgccgccgccgctgctagtgcggtttccgccgctggtgcgaagagaagagacacgcgagcggggagacctccaaggcagcgaggcatcggacatgtgtcagcacatctggggcgcacatccgtcgagcccgaggggagatttgccggaacaattcaaactgcgatattgatcttgggggtgactgtccctggccggctgtcgggtgggagtgcgagtgtgcactcgctcggaagtgtgtgcgagtgtgtatgtgtgtgtgccgtgtcgggctccccccttccccccgttttcccgtcgagtgatgcacttggaatgagaatcagaggatggaaatagtctgggaggtgctttttcttcttcaagccaatttcatcgtctgcatatcagctcaacagaattcaccaaaaatccatgaaggctggtgggcatacaaggaggtggtccagggaagctttgttccagttccttctttctggggattggtgaactcagcttggaatctttgctctgtggggaaacggcagtcgccagtcaacatagagaccagtcacatgatcttcgacccctttctgacacctcttcgcatcaacacggggggcaggaaggtcagtgggaccatgtacaacactggaagacacgtatcccttcgcctggacaaggagcacttggtcaacatatctggagggcccatgacatacagccaccggctggaggagatccgactacactttgggagtgaggacagccaagggtcggagcacctcctcaatggacaggccttctctggggaggtgcagctcatccactataaccatgagctatatacgaatgtcacagaagctgcaaagagtccaaatggattggtggtagtttctatatttataaaagtttctgattcatcaaacccatttcttaatcgaatgctcaacagagatactatcacaagaataacatataaaaatgatgcatatttactacaggggcttaatatagaggaactatatccagagacctctagtttcatcacttacgatgggtcgatgactatcccaccctgctatgagacagcaagttggatcataatgaacaaacctgtctatataaccaggatgcagatgcattccttgcgcctgctcagccagaaccagccatctcagatctttctgagcatgagtgacaacttcaggcctgtccagccactcaacaaccgctgcatccgcaccaatatcaacttcagtttacaggggaaggactgtccaaacaaccgagcccagaagcttcagtatagagtaaatgaatggctcctcaagtagggaacaaagccaagaagaatcccacctcagtgaaatgctacaactgtgaattgacgtaacctagaatgtcccccttcttgcttctctctccttctttcccccaagcctcattcattcttgggattggccctttcttcatgaaaagtgtctgcaaaaccatggcagaggaatacatctctcacacatactcacaaacacacacacaagcacttgcacatacatacaaacacatgcaaacatacctacacacacacacactcttacaacctccatcatgggaagtcaagtttcagaaacaaaagtctcattcataagaggtcttagaagaaaataaccagttaacctgatttcaattttgataccgttttcctgaactaataaatctacccaatgagacttttcagcctttgtacatacaaaattcttccaaaagagagaggagaaaatacagctctgatggcatcaaacggactttgcatcaagtaatttcagatagtgtcctaggatcctttgagggtgctggtagcaggtgagcaggacaaagttgaccaaggacacttatttctagattatgattcttctgtttactcaacaatttacaaagaaaaaaaggacagacattgaagagctacacattgtatatatatcaccacagactataaggaaatggaattatttccctctttgtcacatatctgtagtaggatttgccaagatcagaaatgatccatttgctgtttcttgttttccaaaggtcatacattgtgtttggttattgttaccagctcaataaatgtgtttaacgagttaatttcatttttctggctttggtctgttctccttccttacaggctaagccctggctccatgcaactgcattctttgatttcacttgttccttcatctacatgttttgttcatttgcagccagtttttactgagtttgtggcaatcaggaatgcatttgctaagcaagtatgactttaattccactccatggctcaatcattcacatgaggtgagcttcagcctgagatagcaggcgacagacttcttgcgtttcaaaactgccatgcccccctgtgatgctcccgtgaaggaatgcactttgccttgtaagttcctgggaaaggggtatgttttctctccaggtgcagccagatctcacaaagtacaaaacgaatgcctttcttttcttgtttataatggtcactcactgtgtttggttactgtcaagaaatcaataaatgtgtttaacaagttacccagta

SEQ ID NO: 114196 - DNA, 3189 bp, Homo sapiens
  Payload ID: 2320
  Gene Symbol: CA10
  Gene Name: carbonic anhydrase X
  Uniprot ID: Q9NS85
  ENST ID: ENST00000451037
  CDS Start-End: 942-1928
gacccctgcagttgtattgcggaaaatctcgacagcggcgctagttgcgggcgatggaagccaggcaactgggggttctggggagttcaggaaaatagcagaggagcaggaagggcgcgcgcgacctggagagtctgtgtgcccccaccgcgccccagtccccggggcccagcccttcccctcggcgccctggacgcactgccggaacccggctgagaggctgcaggctgcgcgcggacctggggagcagggagggtcggcggaggctgccggcggctggcggtttcgggcaataatccctgcctctctttctctgtgtgtctgctgtgtctgctccttccccgccccccggaagcaggagaagaactgccccggagcgcagcagccaccctccgaccatgccccggtgaggggggcggacttcgagggcaacttgccgcggactgcctgggcttagccagcgagctacgcgctcccgggagcccggaattgcacggcgcagcccggcggggggctatcgtctatgtcttcttggggcgccagacgaatcggggtctcgtttttgctggaagagcccagtgttggtggcttcaggtggctgctgccgccgccgccgccgccgccgctgctagtgcggtttccgccgctggtgcgaagagaagagacacgcgagcggggagacctccaaggcagcgaggcatcggacatgtgtcagcacatctggggcgcacatccgtcgagcccgaggggagatttgccggaacaattcaaactgcgatattgatcttgggggtgactgtccctggccggctgtcgggtgggagtgcgagtgtgcactcgctcggaagtgtgtgcgagtgtgtatgtgtgtgtgccgtgtcgggctccccccttccccccgttttcccgtcgagtgatgcacttggaatgagaatcagaggatggaaatagtctgggaggtgctttttcttcttcaagccaatttcatcgtctgcatatcagctcaacagaattcaccaaaaatccatgaaggctggtgggcatacaaggaggtggtccagggaagctttgttccagttccttctttctggggattggtgaactcagcttggaatctttgctctgtggggaaacggcagtcgccagtcaacatagagaccagtcacatgatcttcgacccctttctgacacctcttcgcatcaacacggggggcaggaaggtcagtgggaccatgtacaacactggaagacacgtatcccttcgcctggacaaggagcacttggtcaacatatctggagggcccatgacatacagccaccggctggaggagatccgactacactttgggagtgaggacagccaagggtcggagcacctcctcaatggacaggccttctctggggaggtgcagctcatccactataaccatgagctatatacgaatgtcacagaagctgcaaagagtccaaatggattggtggtagtttctatatttataaaagtttctgattcatcaaacccatttcttaatcgaatgctcaacagagatactatcacaagaataacatataaaaatgatgcatatttactacaggggcttaatatagaggaactatatccagagacctctagtttcatcacttacgatgggtcgatgactatcccaccctgctatgagacagcaagttggatcataatgaacaaacctgtctatataaccaggatgcagatgcattccttgcgcctgctcagccagaaccagccatctcagatctttctgagcatgagtgacaacttcaggcctgtccagccactcaacaaccgctgcatccgcaccaatatcaacttcagtttacaggggaaggactgtccaaacaaccgagcccagaagcttcagtatagagtaaatgaatggctcctcaagtagggaacaaagccaagaagaatcccacctcagtgaaatgctacaactgtgaattgacgtaacctagaatgtcccccttcttgcttctctctccttctttcccccaagcctcattcattcttgggattggccctttcttcatgaaaagtgtctgcaaaaccatggcagaggaatacatctctcacacatactcacaaacacacacacaagcacttgcacatacatacaaacacatgcaaacatacctacacacacacacactcttacaacctccatcatgggaagtcaagtttcagaaacaaaagtctcattcataagaggtcttagaagaaaataaccagttaacctgatttcaattttgataccgttttcctgaactaataaatctacccaatgagacttttcagcctttgtacatacaaaattcttccaaaagagagaggagaaaatacagctctgatggcatcaaacggactttgcatcaagtaatttcagatagtgtcctaggatcctttgagggtgctggtagcaggtgagcaggacaaagttgaccaaggacacttatttctagattatgattcttctgtttactcaacaatttacaaagaaaaaaaggacagacattgaagagctacacattgtatatatatcaccacagactataaggaaatggaattatttccctctttgtcacatatctgtagtaggatttgccaagatcagaaatgatccatttgctgtttcttgttttccaaaggtcatacattgtgtttggttattgttaccagctcaataaatgtgtttaacgagttaatttcatttttctggctttggtctgttctccttccttacaggctaagccctggctccatgcaactgcattctttgatttcacttgttccttcatctacatgttttgttcatttgcagccagtttttactgagtttgtggcaatcaggaatgcatttgctaagcaagtatgactttaattccactccatggctcaatcattcacatgaggtgagcttcagcctgagatagcaggcgacagacttcttgcgtttcaaaactgccatgcccccctgtgatgctcccgtgaaggaatgcactttgccttgtaagttcctgggaaaggggtatgttttctctccaggtgcagccagatctcacaaagtacaaaacgaatgcctttcttttcttgtttataatggtcactcactgtgtttggttactgtcaagaaatcaataaatgtgtttaacaag

SEQ ID NO: 114197 - DNA, 410 bp, Homo sapiens
  Payload ID: 2320
  Gene Symbol: CA10
  Gene Name: carbonic anhydrase X
  ENST ID: ENST00000575097
  CDS Start-End: 1-171
cacgtatcccttcgcctggacaaggagcacttggtcaacatatctggagggcccatgacatacagccaccggctggaggagatccgactacactttgggagtgaggacagccaagggtcggagcacctcctcaatggacaggccttctctggggaggaaaaagtctgctgacccctgaattacagtatgagccattcggaatgcatttctctttaaaagttctcgcctcattcagtgtctggaacacagtgggtgctccccaataggtgacaccttcctcaagtttccttgggagaacagactcaatgtcggatccacaaaggagacctgcacatacctaacccctatttctgcagaagctgaaggctgtattatctattgcttgcataataaatattgcataacaacaa

SEQ ID NO: 114198 - DNA, 2276 bp, Homo sapiens
  Payload ID: 2320
  Gene Symbol: CA10
  Gene Name: carbonic anhydrase X
  Uniprot ID: Q9NS85
  ENST ID: ENST00000570565
  CDS Start-End: 244-1005
gacaagcgcgccgagaaatcctggatcttcccagggattccctctacgctccctcctcttcttcaataaccccaaagagctcaacagaattcaccaaaaatccatgaaggctggtgggcatacaaggaggtggtccagggaagctttgttccagttccttctttctggggattggtgaactcagcttggaatctttgctctgtggggaaacggcagtcgccagtcaacatagagaccagtcacatgatcttcgacccctttctgacacctcttcgcatcaacacggggggcaggaaggtcagtgggaccatgtacaacactggaagacacgtatcccttcgcctggacaaggagcacttggtcaacatatctggagggcccatgacatacagccaccggctggaggagatccgactacactttgggagtgaggacagccaagggtcggagcacctcctcaatggacaggccttctctggggaggtgcagctcatccactataaccatgagctatatacgaatgtcacagaagctgcaaagagtccaaatggattggtggtagtttctatatttataaaagtttctgattcatcaaacccatttcttaatcgaatgctcaacagagatactatcacaagaataacatataaaaatgatgcatatttactacaggggcttaatatagaggaactatatccagagacctctagtttcatcacttacgatgggtcgatgactatcccaccctgctatgagacagcaagttggatcataatgaacaaacctgtctatataaccaggatgcagatgcattccttgcgcctgctcagccagaaccagccatctcagatctttctgagcatgagtgacaacttcaggcctgtccagccactcaacaaccgctgcatccgcaccaatatcaacttcagtttacaggggaaggactgtccaaacaaccgagcccagaagcttcagtatagagtaaatgaatggctcctcaagtagggaacaaagccaagaagaatcccacctcagtgaaatgctacaactgtgaattgacgtaacctagaatgtcccccttcttgcttctctctccttctttcccccaagcctcattcattcttgggattggccctttcttcatgaaaagtgtctgcaaaaccatggcagaggaatacatctctcacacatactcacaaacacacacacaagcacttgcacatacatacaaacacatgcaaacatacctacacacacacacactcttacaacctccatcatgggaagtcaagtttcagaaacaaaagtctcattcataagaggtcttagaagaaaataaccagttaacctgatttcaattttgataccgttttcctgaactaataaatctacccaatgagacttttcagcctttgtacatacaaaattcttccaaaagagagaggagaaaatacagctctgatggcatcaaacggactttgcatcaagtaatttcagatagtgtcctaggatcctttgagggtgctggtagcaggtgagcaggacaaagttgaccaaggacacttatttctagattatgattcttctgtttactcaacaatttacaaagaaaaaaaggacagacattgaagagctacacattgtatatatatcaccacagactataaggaaatggaattatttccctctttgtcacatatctgtagtaggatttgccaagatcagaaatgatccatttgctgtttcttgttttccaaaggtcatacattgtgtttggttattgttaccagctcaataaatgtgtttaacgagttaatttcatttttctggctttggtctgttctccttccttacaggctaagccctggctccatgcaactgcattctttgatttcacttgttccttcatctacatgttttgttcatttgcagccagtttttactgagtttgtggcaatcaggaatgcatttgctaagcaagtatgactttaattccactccatggctcaatcattcacatgaggtgagcttcagcctgagatagcaggcgacagacttcttgcgtttcaaaactgccatgcccccctgtgatgctcccgtgaaggaatgcactttgccttgtaagttcctgggaaaggggtatgttttctctccaggtgcagccagatctcacaaagtacaaaacgaatgcctttcttttcttgtttataatggtcactcactgtgtttggttactgtcaagaaatcaataaatgtgtttaacaagttacccagta

SEQ ID NO: 114199 - DNA, 1474 bp, Homo sapiens
  Payload ID: 2320
  Gene Symbol: CA10
  Gene Name: carbonic anhydrase X
  ENST ID: ENST00000575181
  CDS Start-End: 647-1474
cctggatcttcccagggattccctctacgctccctcctcttcttcaataaccccaaagagcaggagaagaactgccccggagcgcagcagccaccctccgaccatgccccggtgaggggggcggacttcgagggcaacttgccgcggactgcctgggcttagccagcgagctacgcgctcccgggagcccggaattgcacggcgcagcccggcggggggctatcgtctatgtcttcttggggcgccagacgaatcggggtctcgtttttgctggaagagcccagtgttggtggcttcaggtggctgctgccgccgccgccgccgccgccgctgctagtgcggtttccgccgctggtgcgaagagaagagacacgcgagcggggagacctccaaggcagcgaggcatcggacatgtgtcagcacatctggggcgcacatccgtcgagcccgaggggagatttgccggaacaattcaaactgcgatattgatcttgggggtgactgtccctggccggctgtcgggtgggagtgcgagtgtgcactcgctcggaagtgtgtgcgagtgtgtatgtgtgtgtgccgtgtcgggctccccccttccccccgttttcccgtcgagtgatgcacttggaatgagaatcagaggatggaaatagtctgggaggtgctttttcttcttcaagccaatttcatcgtctgcatatcagctcaacagaattcaccaaaaatccatgaaggctggtgggcatacaaggaggtggtccagggaagctttgttccagttccttctttctggggattggtgaactcagcttggaatctttgctctgtggggaaacggcagtcgccagtcaacatagagaccagtcacatgatcttcgacccctttctgacacctcttcgcatcaacacggggggcaggaaggtcagtgggaccatgtacaacactggaagacacgtatcccttcgcctggacaaggagcacttggtcaacatatctggagggcccatgacatacagccaccggctggaggagatccgactacactttgggagtgaggacagccaagggtcggagcacctcctcaatggacaggccttctctggggaggtgcagctcatccactataaccatgagctatatacgaatgtcacagaagctgcaaagagtccaaatggattggtggtagtttctatatttataaaagtttctgattcatcaaacccatttcttaatcgaatgctcaacagagatactatcacaagaataacatataaaaatgatgcatatttactacaggggcttaatatagaggaactatatccagagacctctagtttcatcacttacgatgggtcgatgactatcccaccctgctatgagacagcaagttggatcataatgaacaaacctgtctatataaccaggatgcagatgcattccttgcgcctgctcagccagaaccagccatct

SEQ ID NO: 114200 - DNA, 2699 bp, Homo sapiens
  Payload ID: 2320
  Gene Symbol: CA10
  Gene Name: carbonic anhydrase X
  ENST ID: ENST00000571371
  CDS Start-End: 278-406
acacgcgagcggggagacctccaaggcagcgaggcatcggacatgtgtcagcacatctggggcgcacatccgtcgagcccgaggggagatttgccggaacaattcaaactgcgatattgatcttgggggtgactgtccctggccggctgtcgggtgggagtgcgagtgtgcactcgctcggaagtgtgtgcgagtgtgtatgtgtgtgtgccgtgtcgggctccccccttccccccgttttcccgtcgagtgatgcacttggaatgagaatcagaggatggaaatagtctgggaggtgctttttcttcttcaagccaatttcatcgtctgcatatcaggcgacctcaggagggcagtcaggaggctctggtggcagtctgggttggagatgcaggtaacctgttgaaggtgatggcacacatggagagcaatggccagcatcaggagccgttcaggatgtggattcacagagcctgatgaactgtgtatggtgggggtgagggagaatgctcaacagaattcaccaaaaatccatgaaggctggtgggcatacaaggaggtggtccagggaagctttgttccagttccttctttctggggattggtgaactcagcttggaatctttgctctgtggggaaacggcagtcgccagtcaacatagagaccagtcacatgatcttcgacccctttctgacacctcttcgcatcaacacggggggcaggaaggtcagtgggaccatgtacaacactggaagacacgtatcccttcgcctggacaaggagcacttggtcaacatatctggagggcccatgacatacagccaccggctggaggagatccgactacactttgggagtgaggacagccaagggtcggagcacctcctcaatggacaggccttctctggggaggtgcagctcatccactataaccatgagctatatacgaatgtcacagaagctgcaaagagtccaaatggattggtggtagtttctatatttataaaagtttctgattcatcaaacccatttcttaatcgaatgctcaacagagatactatcacaagaataacatataaaaatgatgcatatttactacaggggcttaatatagaggaactatatccagagacctctagtttcatcacttacgatgggtcgatgactatcccaccctgctatgagacagcaagttggatcataatgaacaaacctgtctatataaccaggatgcagatgcattccttgcgcctgctcagccagaaccagccatctcagatctttctgagcatgagtgacaacttcaggcctgtccagccactcaacaaccgctgcatccgcaccaatatcaacttcagtttacaggggaaggactgtccaaacaaccgagcccagaagcttcagtatagagtaaatgaatggctcctcaagtagggaacaaagccaagaagaatcccacctcagtgaaatgctacaactgtgaattgacgtaacctagaatgtcccccttcttgcttctctctccttctttcccccaagcctcattcattcttgggattggccctttcttcatgaaaagtgtctgcaaaaccatggcagaggaatacatctctcacacatactcacaaacacacacacaagcacttgcacatacatacaaacacatgcaaacatacctacacacacacacactcttacaacctccatcatgggaagtcaagtttcagaaacaaaagtctcattcataagaggtcttagaagaaaataaccagttaacctgatttcaattttgataccgttttcctgaactaataaatctacccaatgagacttttcagcctttgtacatacaaaattcttccaaaagagagaggagaaaatacagctctgatggcatcaaacggactttgcatcaagtaatttcagatagtgtcctaggatcctttgagggtgctggtagcaggtgagcaggacaaagttgaccaaggacacttatttctagattatgattcttctgtttactcaacaatttacaaagaaaaaaaggacagacattgaagagctacacattgtatatatatcaccacagactataaggaaatggaattatttccctctttgtcacatatctgtagtaggatttgccaagatcagaaatgatccatttgctgtttcttgttttccaaaggtcatacattgtgtttggttattgttaccagctcaataaatgtgtttaacgagttaatttcatttttctggctttggtctgttctccttccttacaggctaagccctggctccatgcaactgcattctttgatttcacttgttccttcatctacatgttttgttcatttgcagccagtttttactgagtttgtggcaatcaggaatgcatttgctaagcaagtatgactttaattccactccatggctcaatcattcacatgaggtgagcttcagcctgagatagcaggcgacagacttcttgcgtttcaaaactgccatgcccccctgtgatgctcccgtgaaggaatgcactttgccttgtaagttcctgggaaaggggtatgttttctctccaggtgcagccagatctcacaaagtacaaaacgaatgcctttcttttcttgtttataatggtcactcactgtgtttggttactgtcaagaaatcaataaatgtgtttaacaagtta

SEQ ID NO: 114201 - DNA, 1844 bp, Homo sapiens
  Payload ID: 2321
  Gene Symbol: CA11
  Gene Name: carbonic anhydrase XI
  Uniprot ID: O75493
  ENST ID: ENST00000084798
  CDS Start-End: 681-1667
atcccaccccaagccaacccgaggagtgtttgccgctatgagatcacctgctcccccagcccaacaacaaaattaaataacaccacgggagaggagagagggagggggaggagggaggaagggacaagagagaagagagactgaaacagggagaagaggcaggagaggaggaggtggggagagcacgaagctggaggccgacactgagggagggcgggaggaggtgaagaaggagagaggggagaagaggcaggagctggaaaggagagagggaggaggaggaggagatgcgggatggagacctggagttaggtggcttgggagagcttaatgaaaagagaacggagaggaggtgtgggttaggaaccaagaggtagccctgggggcagcagaaggctgagaggagtaggaagatcaggagctagagggagactggagggttccgggaaaagagcagaggaaagaggaaagacacagagagacgggagagagaagaagagtgggtttgaagggcggatctcagtccctggctgctttggcatttggggaactgggactccctgtggggaggagaggaaagctggaagtcctggagggacagggtcccagaaggaggggacagaggagctgagagaggggggcagggcgttgggcaggggtccctcggaggcctcctggggatgggggctgcagctcgtctgagcgcccctcgagcgctggtactctgggctgcactgggggcagcagctcacatcggaccagcacctgaccccgaggactggtggagctacaaggataatctccagggaaacttcgtgccagggcctcctttctggggcctggtgaatgcagcgtggagtctgtgtgctgtggggaagcggcagagccccgtggatgtggagctgaagagggttctttatgacccctttctgcccccattaaggctcagcactggaggagagaagctccggggaaccttgtacaacaccggccgacatgtctccttcctgcctgcaccccgacctgtggtcaatgtgtctggaggtcccctcctttacagccaccgactcagtgaactgcggctgctgtttggagctcgcgacggagccggctcggaacatcagatcaaccaccagggcttctctgctgaggtgcagctcattcacttcaaccaggaactctacgggaatttcagcgctgcctcccgcggccccaatggcctggccattctcagcctctttgtcaacgttgccagtacctctaacccattcctcagtcgcctccttaaccgcgacaccatcactcgcatctcctacaagaatgatgcctactttcttcaagacctgagcctggagctcctgttccctgaatccttcggcttcatcacctatcagggctctctcagcaccccgccctgctccgagactgtcacctggatcctcattgaccgggccctcaatatcacctcccttcagatgcactccctgagactcctgagccagaatcctccatctcagatcttccagagcctcagcggtaacagccggcccctgcagcccttggcccacagggcactgaggggcaacagggacccccggcaccccgagaggcgctgccgaggccccaactaccgcctgcatgtggatggtgtcccccatggtcgctgagactccccttcgaggattgcacccgcccgtcctaagcctccccacaaggcgaggggagttacccctaaaacaaagctattaaagggacagaatacttcctgttttctcagtggtctgattctaggcgcggtggggaaacatttgggtattaaagaacagacttcttccggaaaccaa

SEQ ID NO: 114202 - DNA, 498 bp, Homo sapiens
  Payload ID: 2321
  Gene Symbol: CA11
  Gene Name: carbonic anhydrase XI
  ENST ID: ENST00000596080
  CDS Start-End: 1-341
atgatgcctactttcttcaagacctgagcctggagctcctgttccctgaatccttcggcttcatcacctatcagggctctctcagcaccccgccctgctccgagactgtcacctggatcctcattgaccgggccctcaatatcacctcccttcagatgcactccctgagactcctgagccagaatcctccatctcagatcttccagagcctcagcggtaacagccggcccctgcagcccttggcccacagggcactgaggggcaacagggacccccggcaccccgagaggcgctgccgaggccccaactaccgcctgcatgcccagtgcttctcgacctagtacattctggttccccgctcgcagacttccgacgtggatggtgtcccccatggtcgctgagactccccttcgaggattgcacccgcccgtcctaagcctccccacaaggcgaggggagttacccctaaaacaaagctattaaagggacagaatactt

SEQ ID NO: 114203 - DNA, 6413 bp, Homo sapiens
  Payload ID: 2322
  Gene Symbol: CA12
  Gene Name: carbonic anhydrase XII
  Uniprot ID: O43570
  ENST ID: ENST00000178638
  CDS Start-End: 442-1506
ggaccagtgacagaccaagggcatgccactgaaggaatccctagacgcacccttctggatgtgagacaggcggatctcacccacgcctgccagcagctcctcggagaactgtgttcctgggtcagccctggcccagaggagcgccggggacccgcagagtgctgctgaagtcaaggctacaactcacctaggatctggggcgccagccctccggtgggcagggcgttctcctcccccaccccctccccgcacgatgacatcaagtgtttggcgttgagttgctccataaaagctgcccggggaagccaggagagcgaagggcggacgtactcgccacggcacccaggctgcgcgcacgcggtcccggtgtgcagctggagagcgagcggccaccgggagcccccggcacagcccgcgcccgccccgcaggagcccgcgaagatgccccggcgcagcctgcacgcggcggccgtgctcctgctggtgatcttaaaggaacagccttccagcccggccccagtgaacggttccaagtggacttattttggtcctgatggggagaatagctggtccaagaagtacccgtcgtgtgggggcctgctgcagtcccccatagacctgcacagtgacatcctccagtatgacgccagcctcacgcccctcgagttccaaggctacaatctgtctgccaacaagcagtttctcctgaccaacaatggccattcagtgaagctgaacctgccctcggacatgcacatccagggcctccagtctcgctacagtgccacgcagctgcacctgcactgggggaacccgaatgacccgcacggctctgagcacaccgtcagcggacagcacttcgccgccgagctgcacattgtccattataactcagacctttatcctgacgccagcactgccagcaacaagtcagaaggcctcgctgtcctggctgttctcattgagatgggctccttcaatccgtcctatgacaagatcttcagtcaccttcaacatgtaaagtacaaaggccaggaagcattcgtcccgggattcaacattgaagagctgcttccggagaggaccgctgaatattaccgctaccgggggtccctgaccacacccccttgcaaccccactgtgctctggacagttttccgaaaccccgtgcaaatttcccaggagcagctgctggctttggagacagccctgtactgcacacacatggacgacccttcccccagagaaatgatcaacaacttccggcaggtccagaagttcgatgagaggctggtatacacctccttctcccaagtgcaagtctgtactgcggcaggactgagtctgggcatcatcctctcactggccctggctggcattcttggcatctgtattgtggtggtggtgtccatttggcttttcagaaggaagagtatcaaaaaaggtgataacaagggagtcatttacaagccagccaccaagatggagactgaggcccacgcttgaggtccccggagctcccgggcacatccaggaaggaccttgctttggaccctacacacttcggctctctggacacttgcgacacctcaaggtgttctctgtagctcaatctgcaaacatgccaggcctcagggatcctctgctgggtgcctccttgccttgggaccatggccaccccagagccatccgatcgatggatgggatgcactctcagaccaagcagcaggaattcaaagctgcttgctgtaactgtgtgagattgtgaagtggtctgaattctggaatcacaaaccaagccatgctggtgggccattaatggttggaaaacactttcatccggggctttgccagagcgtgctttcaagtgtcctggaaattctgctgcttctccaagctttcagacaagaatgtgcactctctgcttaggttttgcttgggaaactcaacttctttcctctggagacggggcatctccctctgatttccttctgctatgacaaaacctttaatctgcaccttacaactcggggacaaatggggacaggaaggatcaagttgtagagagaaaaagaaaacaagagatatacattgtgatatattagggacactttcacagtcctgtcctctggatcacagacactgcacagaccttagggaatggcaggttcaagttccacttcttggtggggatgagaagggagagagagctagagggacaaagagaatgagaagacatggatgatctgggagagtctcactttggaatcagaattggaatcacattctgtttatcaagccataatgtaaggacagaataatacaatattaagtccaaatccaacctcctgtcagtggagcagttatgttttatactctacagattttacaaataatgaggctgttccttgaaaatgtgttgttgctgtgtcctggaggagacatgagttccgagatgacccaatctgcctttgaatctggaggaaataggcagaaacaaaatgactgtagaacttattctctgtaggccaaatttcatttcagccacttctgcaggatccctactgccaacctggaatggagacttttatctacttctctctctctgaagatgtcaaatcgtggtttagatcaaatatatttcaagctataaaagcaggaggttatctgtgcagggggctggcatcatgtatttaggggcaagtaataatggaatgctactaagatactccatattcttccccgaatcacacagacagtttctgacaggcgcaactcctccattttcctcccgcaggtgagaaccctgtggagatgagtcagtgccatgactgagaaggaaccgacccctagttgagagcaccttgcagttccccgagaactttctgattcacagtctcattttgacagcatgaaatgtcctcttgaagcatagctttttaaatatctttttccttctactcctccctctgactctaagaattctctcttctggaatcgcttgaacccaggaggcggaggttgcagtaagccaaggtcatgccactgcactctagcctgggtgacagagcgagactccatctcaaaaaaaaaaaaaaaaaaattattctgtaccatcacaacttttcacaacgatggcaagccttatgtcttgggagcctgttttgctaggcaaagttacaagtgacctaatgggagctcaaatgtgtgtgtgtctctctgtgtgtttgtgtgtgtgtgtgcactcaagacctctaacagcctcgaagcctggggtggcatcccggccttgccattagcatgcctcatgcatcatcagatgacaaggacaaccctcatgacgaagcaacatgaattagggggcctcttggccttggtccaaaattgtcaatcagaaatgaacataaaggactccagagcagtgggactgtctgtcaaaagactctgtatatcttttgtggatgagttttgtgagagaacagagagaccattgtacctggcacaagggctgttcatgaaaagggagacttactgggaggtgcaagacagtggcatttctcctctcctcttgctgctcagcacagccctggattgcagccccgaggctgagaccagacaaagcccgggaggcagaaagatgctccaagaaccaacactatcaatgtctttgcaaatcctcacaggattcctgtgggtccagctttggaactgggaaacctttcttcggatccgcactcattccactgatgccagctgcccctgaaggatgccagtactgtggtgtgtgagtctcagcagccgcccacacgctcctaactctgctgcatggcagatgcctaggtggaaatagcaaaaacaaggcccaggctggggccagggccagaggggaaggccctggattctcactcatgtgagatcttgaatctctttctttgttctgtttgtttagttagtatcatctggtaaaatagttaaaaaacaacaaaaaactctgtatctgtttctagcatgtgctgcattgactctattaatcacatttcaaattcaccctacattcctctcctcttcactagcctctctgaaggtgtcctggccagccctggagaagcactggtgtctgcagcacccctcagttcctgtgcctcagcccacaggccactgtgataatggtctgtttagcacttctgtatttattgtaagaatgattataatgaagatacacactgtaactacaagaaattataaatgtttttcacatcaggctgttctttttttttttttggaggcgaggttaaagcattactatttgcaaagcactctgtagctccctgttatggggataggtaactaatcagaataataatgtcactcgcatccacttcttagaacctggctccaaaggaaaataagctgatagactcaatcactttcctgaggatggaggcctatggcatgtgtggctgcaggtcgcgaagctgcttaatggtgctgggaagcctagaggaattaaataaagaccctggaggaggtgggatcggagctgcaccttgaacaaatagctcagatttgaacagatggatggaaaagagggaggtgttcccaaccaaggggacatgatacagggaacaggtcctatgtctctttactcctgagagtattaaacctagtaggtgggcagcccctcttggttgcctgttaccttattttgaattctttttgcaaaacatactatcacccgtccaaataatcttttgtctaaatccagacttcacattctgactggggcaaaaagaggcagtccagtaaaggttataaaataggtaccatcattgtttgccttatttagaaaagcatccaattttcactataatcaccctaagcctgagagaggtgaactgttcaagggtactttggctccagtgggtgacagtacctggcccagctttggaattgaaacatttctgatggtctgtactctgctagaacacaggatgcttctgctctccctgctctggcatcctgccaggtgtcatggccacgcacaggcatgaagacagccgggaagccagagttcccacgaagcactcactccttggacttgctcccaccccactggggagagcactcctggagcaggaaatgagcatctctcatctccctgaattccacatccactggctgaatgatcagggaggcatagcagtgagagccataggtcggcagagggaactcaggccctcctttaggatggccatcacctcatctcaatccagccaaatcaaccatctagagcacacaggccgagagaaatgtaataaaatataacatgagacacgtatgaaatttaaactttccggtagccacactagaaaaaggtaaaaaaaaaaaaaccagtgacattaatttaaatttaattttagataatccaacagatctaaaatactatcatttccacatgtaaccagtattttcatgtgtttttttctgcagtaaatctttgaaatctggtgtgtgttttacactgacagcacactcgattcagatgctagattttccttgtagatatttggtcgttatttagatttcataaaatttacagtttaaaagattccaatatccgagttgctccaaacacacttagaagttgttttccaaataatggaatcaatgatcggcttttagatgtaaacttattaaaataaagtagcgtttctcagttaagtcacattccaagcgctcaagatccatgccctgcgcagacccggacgacgaacccgactttcagagactgagggttctgcctagagagctcccacagaaatcagcccgagaagaaagccttgtgggtgaagccagggagggagacaggagggcaggaggaaaatcaagcctaaatgagcacatcgtggacgccgctcttcctctccccacatctcctcgcctcgccgcagtgggcccggctgtgccccaggtccccgcggtcgggagtgaatggcgctcgggtggcaggcacgtgggcacctggtgaactgcaggaccctggcaccgccaccccctcgcccctacacacacaggagtgcccctcccgttgtcacgtggccttcctgctgggtatctggagcagttgcagcctcgcttccggaaggaaacggggcctctggggcacagggaccacctgccagtgcgttccagccgggctgccatccacactggagaccgccccgcacgtggtcctcgggctcggattcagctgtcgcaggatgtgaggggaaaggtatgtggcccgacaatgccaccgagggtgtccccgggctccaccccgtgcctcttcattatagaatgactgggcagagataagggccagattactttgctgtattgaataattcaccataaaaatgattgcaaccagg

SEQ ID NO: 114204 - DNA, 2744 bp, Homo sapiens
  Payload ID: 2322
  Gene Symbol: CA12
  Gene Name: carbonic anhydrase XII
  Uniprot ID: O43570
  ENST ID: ENST00000344366
  CDS Start-End: 116-1147
gtactcgccacggcacccaggctgcgcgcacgcggtcccggtgtgcagctggagagcgagcggccaccgggagcccccggcacagcccgcgcccgccccgcaggagcccgcgaagatgccccggcgcagcctgcacgcggcggccgtgctcctgctggtgatcttaaaggaacagccttccagcccggccccagtgaacggttccaagtggacttattttggtcctgatggggagaatagctggtccaagaagtacccgtcgtgtgggggcctgctgcagtcccccatagacctgcacagtgacatcctccagtatgacgccagcctcacgcccctcgagttccaaggctacaatctgtctgccaacaagcagtttctcctgaccaacaatggccattcagtgaagctgaacctgccctcggacatgcacatccagggcctccagtctcgctacagtgccacgcagctgcacctgcactgggggaacccgaatgacccgcacggctctgagcacaccgtcagcggacagcacttcgccgccgagctgcacattgtccattataactcagacctttatcctgacgccagcactgccagcaacaagtcagaaggcctcgctgtcctggctgttctcattgagatgggctccttcaatccgtcctatgacaagatcttcagtcaccttcaacatgtaaagtacaaaggccaggaagcattcgtcccgggattcaacattgaagagctgcttccggagaggaccgctgaatattaccgctaccgggggtccctgaccacacccccttgcaaccccactgtgctctggacagttttccgaaaccccgtgcaaatttcccaggagcagctgctggctttggagacagccctgtactgcacacacatggacgacccttcccccagagaaatgatcaacaacttccggcaggtccagaagttcgatgagaggctggtatacacctccttctcccaaggcatcatcctctcactggccctggctggcattcttggcatctgtattgtggtggtggtgtccatttggcttttcagaaggaagagtatcaaaaaaggtgataacaagggagtcatttacaagccagccaccaagatggagactgaggcccacgcttgaggtccccggagctcccgggcacatccaggaaggaccttgctttggaccctacacacttcggctctctggacacttgcgacacctcaaggtgttctctgtagctcaatctgcaaacatgccaggcctcagggatcctctgctgggtgcctccttgccttgggaccatggccaccccagagccatccgatcgatggatgggatgcactctcagaccaagcagcaggaattcaaagctgcttgctgtaactgtgtgagattgtgaagtggtctgaattctggaatcacaaaccaagccatgctggtgggccattaatggttggaaaacactttcatccggggctttgccagagcgtgctttcaagtgtcctggaaattctgctgcttctccaagctttcagacaagaatgtgcactctctgcttaggttttgcttgggaaactcaacttctttcctctggagacggggcatctccctctgatttccttctgctatgacaaaacctttaatctgcaccttacaactcggggacaaatggggacaggaaggatcaagttgtagagagaaaaagaaaacaagagatatacattgtgatatattagggacactttcacagtcctgtcctctggatcacagacactgcacagaccttagggaatggcaggttcaagttccacttcttggtggggatgagaagggagagagagctagagggacaaagagaatgagaagacatggatgatctgggagagtctcactttggaatcagaattggaatcacattctgtttatcaagccataatgtaaggacagaataatacaatattaagtccaaatccaacctcctgtcagtggagcagttatgttttatactctacagattttacaaataatgaggctgttccttgaaaatgtgttgttgctgtgtcctggaggagacatgagttccgagatgacccaatctgcctttgaatctggaggaaataggcagaaacaaaatgactgtagaacttattctctgtaggccaaatttcatttcagccacttctgcaggatccctactgccaacctggaatggagacttttatctacttctctctctctgaagatgtcaaatcgtggtttagatcaaatatatttcaagctataaaagcaggaggttatctgtgcagggggctggcatcatgtatttaggggcaagtaataatggaatgctactaagatactccatattcttccccgaatcacacagacagtttctgacaggcgcaactcctccattttcctcccgcaggtgagaaccctgtggagatgagtcagtgccatgactgagaaggaaccgacccctagttgagagcaccttgcagttccccgagaactttctgattcacagtctcattttgacagcatgaaatgtcctcttgaagcatagctttttaaatatctttttccttctactcctccctctgactctaagaattctctcttctggaatcgcttgaacccaggaggcggaggttgcagtaagccaaggtcatgccactgcactctagcctgggtgacagagcgagactccatctcaaaaaaaaaaaaaaaaaaa

SEQ ID NO: 114205 - DNA, 2556 bp, Homo sapiens
  Payload ID: 2322
  Gene Symbol: CA12
  Gene Name: carbonic anhydrase XII
  ENST ID: ENST00000422263
  CDS Start-End: 127-978
gaagggcggacgtactcgccacggcacccaggctgcgcgcacgcggtcccggtgtgcagctggagagcgagcggccaccgggagcccccggcacagcccgcgcccgccccgcaggagcccgcgaagatgccccggcgcagcctgcacgcggcggccgtgctcctgctggtgatcttaaaggaacagccttccagcccggccccagtgaacggttccaagtggacttattttgtgaagctgaacctgccctcggacatgcacatccagggcctccagtctcgctacagtgccacgcagctgcacctgcactgggggaacccgaatgacccgcacggctctgagcacaccgtcagcggacagcacttcgccgccgagctgcacattgtccattataactcagacctttatcctgacgccagcactgccagcaacaagtcagaaggcctcgctgtcctggctgttctcattgagatgggctccttcaatccgtcctatgacaagatcttcagtcaccttcaacatgtaaagtacaaaggccaggaagcattcgtcccgggattcaacattgaagagctgcttccggagaggaccgctgaatattaccgctaccgggggtccctgaccacacccccttgcaaccccactgtgctctggacagttttccgaaaccccgtgcaaatttcccaggagcagctgctggctttggagacagccctgtactgcacacacatggacgacccttcccccagagaaatgatcaacaacttccggcaggtccagaagttcgatgagaggctggtatacacctccttctcccaaggcatcatcctctcactggccctggctggcattcttggcatctgtattgtggtggtggtgtccatttggcttttcagaaggaagagtatcaaaaaaggtgataacaagggagtcatttacaagccagccaccaagatggagactgaggcccacgcttgaggtccccggagctcccgggcacatccaggaaggaccttgctttggaccctacacacttcggctctctggacacttgcgacacctcaaggtgttctctgtagctcaatctgcaaacatgccaggcctcagggatcctctgctgggtgcctccttgccttgggaccatggccaccccagagccatccgatcgatggatgggatgcactctcagaccaagcagcaggaattcaaagctgcttgctgtaactgtgtgagattgtgaagtggtctgaattctggaatcacaaaccaagccatgctggtgggccattaatggttggaaaacactttcatccggggctttgccagagcgtgctttcaagtgtcctggaaattctgctgcttctccaagctttcagacaagaatgtgcactctctgcttaggttttgcttgggaaactcaacttctttcctctggagacggggcatctccctctgatttccttctgctatgacaaaacctttaatctgcaccttacaactcggggacaaatggggacaggaaggatcaagttgtagagagaaaaagaaaacaagagatatacattgtgatatattagggacactttcacagtcctgtcctctggatcacagacactgcacagaccttagggaatggcaggttcaagttccacttcttggtggggatgagaagggagagagagctagagggacaaagagaatgagaagacatggatgatctgggagagtctcactttggaatcagaattggaatcacattctgtttatcaagccataatgtaaggacagaataatacaatattaagtccaaatccaacctcctgtcagtggagcagttatgttttatactctacagattttacaaataatgaggctgttccttgaaaatgtgttgttgctgtgtcctggaggagacatgagttccgagatgacccaatctgcctttgaatctggaggaaataggcagaaacaaaatgactgtagaacttattctctgtaggccaaatttcatttcagccacttctgcaggatccctactgccaacctggaatggagacttttatctacttctctctctctgaagatgtcaaatcgtggtttagatcaaatatatttcaagctataaaagcaggaggttatctgtgcagggggctggcatcatgtatttaggggcaagtaataatggaatgctactaagatactccatattcttccccgaatcacacagacagtttctgacaggcgcaactcctccattttcctcccgcaggtgagaaccctgtggagatgagtcagtgccatgactgagaaggaaccgacccctagttgagagcaccttgcagttccccgagaactttctgattcacagtctcattttgacagcatgaaatgtcctcttgaagcatagctttttaaatatctttttccttctactcctccctctgactctaagaattctctcttctggaatcgcttgaacccaggaggcggaggttgcagtaagccaaggtcatgccactgcactctagcctgggtgacagagcgagactccatctc

SEQ ID NO: 114206 - DNA, 3815 bp, Homo sapiens
  Payload ID: 2323
  Gene Symbol: CA13
  Gene Name: carbonic anhydrase XIII
  Uniprot ID: Q8N1Q1
  ENST ID: ENST00000321764
  CDS Start-End: 303-1091
atcccccccggaaacctttctctctccgtctctccctctaactcaaatctctcattcccgagtccaaactaagagagactcgcgccccaggagtcagccagcggcgcgggcgccttccccgcacgcctctgccgtctggaggacgcaggcgggagcgccccggaccgggttcacggtctcgcactcctgccgccggcgccccgcggtcccgccctagcaggctccttcccgggcccctccccgctccctcctctttctcgctgctcagtcacatctttctcttccttccaccccgagggaccatgtcgaggctcagctggggataccgcgagcacaacggtcctattcactggaaggaatttttccctattgctgatggtgatcagcaatctccaattgagattaaaaccaaagaagtgaaatatgactcttccctccgaccacttagtatcaagtatgacccaagctcagctaaaatcatcagcaacagcggccattccttcaatgttgactttgatgacacagagaacaaatcagttctgcgtggtggtcctctcactggaagctacaggttacggcaggttcaccttcactgggggtccgctgatgaccacggctccgagcacatagtagatggagtgagctatgctgcagagctccatgttgttcactggaattcagacaaataccccagctttgttgaggcagctcatgaaccagatggactggctgtcttgggagtgtttttacagattggtgaacctaattcccaactgcaaaagattactgacactttggattccattaaagaaaagggtaaacaaactcgattcacaaattttgacctattgtctctgcttccaccatcctgggactactggacatatcctggttctcttacagttccacctcttcttgagagtgtcacatggattgttttaaagcaacctataaacatcagctctcaacagctggccaaatttcgcagtctcctgtgcacagcggagggtgaagcagcagcttttctggtgagcaatcaccgcccaccacagcctctaaagggccgcaaagtgagagcctctttccattaaaaattgtcaccaatgaactcccccaaacatggctgtggagagacaacaaaacaaaacaaagcacaaaagtctctgccaacaactcttttgtggaattctaatttataggaaacattttagtatgagcttcagtgtcacaaagaaaaccagatctctctctcttttttttttattttttttagtgatagagtctcactctgtcacccaggctggagggcagtggtacagtcttggctaattgcagcctccaactcctggactcaagtgatcctcccacctcagcctccagagtaagtaggaccacaggcatgcacaagcatgcctggctaatttttaaattttttttttttaagaaatagggtcttgctatgttgcccaggctggtctcaagctcctgccctaaagtaggcctcctgcctttgcctctcaaagtgctgggatttcaggcatgggtcatcaagcccagctgacccagagctctttactaacttatctgtctcttatttgcactcatggatattcacagtaagcattgtttgacatatattaaaacccatgaaatatgtctacttcaacctgtgtgaaaatatagttaacattgcaaactttagaatgtattaaaaattttaccttgccatagagactgaattagtcacagctctcagtgatgttagatggaaacttatatctcaaatgataggattgtgatgctttttttgtaacaagtgattctgcttaatattttgttattccagttcataaaaagtagattacgttttcctataaggataatttttgcagtgattatattgctaactctcattgcatgatacctttaataaaatgaacaatataagagttaagggcaatgggataaagctacttaatgtgtctcctccactgatcaaaaatattccatatagtcttggtgaggaattccccaggatataaatggctatttacactgtaatgaattataccatatatgatattcactcagtaatgttaataatgaactggctaataattgacaagatgcagtgcctgccagtttatgacattaacttggtttgaaactaacatatgacatagtaccagtgcagtcagagctgcccttaggcatgatgaacatgtggcccgtttttgcctggtgttttggcagcaaagcaggaagcaattttgtgtgggtcattgttctgtcaatttgtggaaaaaattacttcagtctcatataaatatagaatgggtccataaacccttcaactcatttccatggcaaaactcacttttctttttatacatgtccttcagtctcttaattttgtcaggtggagcttgatcttaattttaacctattatcttttatttttgtttgtttttggtgaaggataagagtggtgtttcttttgccctttctggtacaaacagagggacactaagcattaacttaataatcacatttaagacttgaacacatgctacccttttgtcatcttctgacataagtttacctgagtttccttgatttggaagatttgtttcttttatctctcttcctctggatgtagtttttttttgttttttttttgtttttggacggagtcttagtctgtcactgaggctggagtacagtggcacgatcttggctcactgcaacctccatctcccgggttcaaatgattctcctgcctcagcctcttgagtggctgggattacaggcacatgccaccacacccggctaatttttgtatttttagtagagatgggttttgcaatgttggccaggctggtctcaaactcctgacctcaagtgatctgcctgcctcggcctctcaaattgctggaattacagttgtgagccaccacacctggcttgaatgtagattttaataattgaatttattctgccgtgttgatagaataactgaatatcagtaaattgtgtaacagtggtggatactgttgcataagatgagctcctgaagagtgaagctaattctttggtcaatgttcttttcccctcagtgtctagtttaaggcttttagaagattgatctgtagcaattatttaatgaattgaatatttaaaaaattttttatttgctgtctttggtaattatctctctgcttgaaattaaatgcactataagttaatataacaagtaaaatacattgtcttttgaaaatagtttctttttaaaggaatactaattaattgtaacttgtaaaaccaaaagttctaatggtttttaaaaaccagtgttgagtggaaaagtgtttctttagtttggaaagacctgtgaagtatcctagtcagggaaagaacctgttttctggaagaatgtaagttgctatatgtggaggggcatgtaggacaggggttctaattactgtctgtgagagttactactttgtaacttatggtttctgcttcagtattgtgttggttctgtattataaattgcaccttaatagaccaaaaatatctatacagcactgatttccttgaatattgtgtgttaattgatatatcttctagaggcaaaaggtttaaatgtgttaaaatggttatattgcctcctttttaaacaaattaaagagttgtaaatactagtgtagatctcttttgtttaccacagcaaatactgattttatgattgttaagcatttcatattttaatttaaattggattcaaccacaataaagaaaatgagaaaagcttt

SEQ ID NO: 114207 - DNA, 2403 bp, Homo sapiens
  Payload ID: 2324
  Gene Symbol: CA14
  Gene Name: carbonic anhydrase XIV
  Uniprot ID: Q9ULX7
  ENST ID: ENST00000369111
  CDS Start-End: 971-1984
ttatccagcaaacaacgctccctccccgcactccccccaccccaggccacacaggcacgtggacccaggcctcaccgtgggaagggggtggtggcaggcacagaagagattgctccagatgagttctccttgcctcacttctcttccttagaacttaggacacaactcaggttttagttattgacttcctccacccctcccctgcaccctgagtccctaattccttcttgttatatatctcctaattctggactcttcccattccagggcagctcagattatgcagggaattgggaacaggtacccccaccatctgccgcataccacccagggagctgctcctcagaggagaaatcaggcggggggatgaaaatacagtgtccttttgagggggctgagttgaaccccaaagccccttccttgaccctgcctgctccagggaacacccatctaaacagcatctgtgtgactagcagaggaaggaagagctcaccccagctgggctcctgagccagggccagggctccagtgaaacttgccgcgctccagctccgagtggggccatcctgcatgcctaattggctatttaaggagctgttcaccagcagcccaggcagcacccccgtccccacatacaccagttcagagccaccttaaaagcaggaggcagttgtaaagtcgctggccagctagtggagtggagactgcagagggagataaagagagagggcaaagaggcagcaagagatttgtcctggggatccagaaacccatgataccctactgaacaccgaatcccctggaagcccacagagacagagacagcaagagaagcagagataaatacactcacgccaggagctcgctcgctctctctctctctctctcactcctccctccctctctctctgcctgtcctagtcctctagtcctcaaattcccagtcccctgcaccccttcctgggacactatgttgttctccgccctcctgctggaggtgatttggatcctggctgcagatgggggtcaacactggacgtatgagggcccacatggtcaggaccattggccagcctcttaccctgagtgtggaaacaatgcccagtcgcccatcgatattcagacagacagtgtgacatttgaccctgatttgcctgctctgcagccccacggatatgaccagcctggcaccgagcctttggacctgcacaacaatggccacacagtgcaactctctctgccctctaccctgtatctgggtggacttccccgaaaatatgtagctgcccagctccacctgcactggggtcagaaaggatccccaggggggtcagaacaccagatcaacagtgaagccacatttgcagagctccacattgtacattatgactctgattcctatgacagcttgagtgaggctgctgagaggcctcagggcctggctgtcctgggcatcctaattgaggtgggtgagactaagaatatagcttatgaacacattctgagtcacttgcatgaagtcaggcataaagatcagaagacctcagtgcctcccttcaacctaagagagctgctccccaaacagctggggcagtacttccgctacaatggctcgctcacaactcccccttgctaccagagtgtgctctggacagttttttatagaaggtcccagatttcaatggaacagctggaaaagcttcaggggacattgttctccacagaagaggagccctctaagcttctggtacagaactaccgagcccttcagcctctcaatcagcgcatggtctttgcttctttcatccaagcaggatcctcgtataccacaggtgaaatgctgagtctaggtgtaggaatcttggttggctgtctctgccttctcctggctgtttatttcattgctagaaagattcggaagaagaggctggaaaaccgaaagagtgtggtcttcacctcagcacaagccacgactgaggcataaattccttctcagataccatggatgtggatgacttcccttcatgcctatcaggaagcctctaaaatggggtgtaggatctggccagaaacactgtaggagtagtaagcagatgtcctccttcccctggacatctcctagagaggaatggacccaggctgtcattccaggaagaactgcagagccttcagcctctccaaacatgtaggaggaaatgaggaaatcgctgtgttgttaatgcagagaacaaactctgtttagttgcaggggaagtttgggatataccccaaagtcctctaccccctcacttttatggccctttccctagatatactgcgggatctctccttaggataaagagttgctgttgaagttgtatatttttgatcaatatatttggaaattaaagtttctgactttaa

SEQ ID NO: 114208 - DNA, 594 bp, Homo sapiens
  Payload ID: 2324
  Gene Symbol: CA14
  Gene Name: carbonic anhydrase XIV
  ENST ID: ENST00000607082
  CDS Start-End: 1-393
cagaagacctcagtgcctcccttcaacctaagagagctgctccccaaacagctggggcagtacttccgctacaatggctcgctcacaactcccccttgctaccagagtgtgctctggacagttttttatagaaggtcccagatttcaatggaacagctggaaaagcttcaggggacattgttctccacagaagaggagccctctaagcttctggtacagaactaccgagcccttcagcctctcaatcagcgcatggtctttgcttctttcatccaaggatcctcgtataccacaggaagaagaggctggaaaaccgaaagagtgtggtcttcacctcagcacaagccacgactgaggcataaattccttctcagataccatggatgtggatgacttcccttcatgcctatcaggaagcctctaaaatggggtgtaggatctggccagaaacactgtaggagtagtaagcagatgtcctccttcccctggacatctcctagagaggaatggacccaggctgtcattccaggaagaactgcagagccttcagcctctccaaacatgtaggaggaaatgaggaaatcgctgtgttgt

SEQ ID NO: 114209 - DNA, 938 bp, Homo sapiens
  Payload ID: 2324
  Gene Symbol: CA14
  Gene Name: carbonic anhydrase XIV
  ENST ID: ENST00000483993
  CDS Start-End: 36-164
aattcccagtcccctgcaccccttcctgggacactatgttgttctccgccctcctgctggaggtgatttggatcctggctgcagatgggggtcaacactggacgtatgaggctcctcccttctggatctcctcctgccttgagtttcacatatatggctcctagatcctgctctaatcatcaaatcctacacctcctgatttggcagaaaagctaggcccacatggtcaggaccattggccagcctcttaccctgagtgtggaaacaatgcccagtcgcccatcgatattcagacagacagtgtgacatttgaccctgatttgcctgctctgcagccccacggatatgaccagcctggcaccgagcctttggacctgcacaacaatggccacacagtgcaactctctctgccctctaccctgtatctgggtggacttccccgaaaatatgtagctgcccagctccacctgcactggggtcagaaaggatccccaggggggtcagaacaccagatcaacagtgaagccacatttgcagagctccacattgtacattatgactctgattcctatgacagcttgagtgaggctgctgagaggcctcagggcctggctgtcctgggcatcctaattgaggtgggtgagactaagaatatagcttatgaacacattctgagtcacttgcatgaagtcaggcataaagatcagaagacctcagtgcctcccttcaacctaagagagctgctccccaaacagctggggcagtacttccgctacaatggctcgctcacaactcccccttgctaccagagtgtgctctggacagttttttatagaaggtcccagatttcaatggaacagctggaaaagcttcaggggacattgttctccacagaagaggagccctctaagcttctggtacagaactaccgagccctt

SEQ ID NO: 114210 - DNA, 1293 bp, Homo sapiens
  Payload ID: 2325
  Gene Symbol: CBR1
  Gene Name: carbonyl reductase 1
  Uniprot ID: P16152
  ENST ID: ENST00000290349
  CDS Start-End: 176-1009
agccccgccccgctagggcggggcctgcgcctgcgcgctcagcggccgggcgtgtaacccacgggtgcgcgcccacgaccgccagactcgagcagtctctggaacacgctgcggggctcccgggcctgagccaggtctgttctccacgcaggtgttccgcgcgccccgttcagccatgtcgtccggcatccatgtagcgctggtgactggaggcaacaagggcatcggcttggccatcgtgcgcgacctgtgccggctgttctcgggggacgtggtgctcacggcgcgggacgtgacgcggggccaggcggccgtacagcagctgcaggcggagggcctgagcccgcgcttccaccagctggacatcgacgatctgcagagcatccgcgccctgcgcgacttcctgcgcaaggagtacgggggcctggacgtgctggtcaacaacgcgggcatcgccttcaaggttgctgatcccacaccctttcatattcaagctgaagtgacgatgaaaacaaatttctttggtacccgagatgtgtgcacagaattactccctctaataaaaccccaagggagagtggtgaacgtatctagcatcatgagcgtcagagcccttaaaagctgcagcccagagctgcagcagaagttccgcagtgagaccatcactgaggaggagctggtggggctcatgaacaagtttgtggaggatacaaagaagggagtgcaccagaaggagggctggcccagcagcgcatacggggtgacgaagattggcgtcaccgttctgtccaggatccacgccaggaaactgagtgagcagaggaaaggggacaagatcctcctgaatgcctgctgcccagggtgggtgagaactgacatggcgggacccaaggccaccaagagcccagaagaaggtgcagagacccctgtgtacttggcccttttgcccccagatgctgagggtccccatggacaatttgtttcagagaagagagttgaacagtggtgagctgggctcacagctccatccatgggccccattttgtaccttgtcctgagttggtccaaagggcatttacaatgtcataaatatccttatataagaaaaaaaatgatctcttatcaattagcactcactaatgtactactaattgagcaacctacgcactcagttgactacgtaaatctgtcaggtcttttgtgatttcctctgatgcaggagaggaaaaattgtaattgatgaaaataatgaatgaaaatcaacagatgaataaatggttctttataagtgtc

SEQ ID NO: 114211 - DNA, 838 bp, Homo sapiens
  Payload ID: 2325
  Gene Symbol: CBR1
  Gene Name: carbonyl reductase 1
  ENST ID: ENST00000399191
  CDS Start-End: 82-750
gtctctggaacacgctgcggggctcccgggcctgagccaggtctgttctccacgcaggtgttccgcgcgccccgttcagccatgtcgtccggcatccatgtagcgctggtgactggaggcaacaagggcatcggcttggccatcgtgcgcgacctgtgccggctgttctcgggggacgtggtgctcacggcgcgggacgtgacgcggggccaggcggccgtacagcagctgcaggcggagggcctgagcccgcgcttccaccagctggacatcgacgatctgcagagcatccgcgccctgcgcgacttcctgcgcaaggagtacgggggcctggacgtgctggtcaacaacgcgggcatcgccttcaaggttgctgatcccacaccctttcatattcaagctgaagtgacgatgaaaacaaatttctttggtacccgagatgtgtgcacagaattactccctctaataaaaccccaagttgtgctacttctaaggctctggttcaccaggacctcaaagggcagctcttccaaatctcacctgactctactcagccaaaattcgaaggcaggaatgaacttcttcatgcaactaccaccacactttctatgcgtattcctcttagaactcataccagtaactgtctctcatatgaaaattttctgctccaaaatccctgcaaatttggcattcacctctctacgggattgttgcacacctttctacataatgctttgtggtgtatcttagggagagtggtgaacgtatctagcatcatgagcgtcagagcccttaaaagctgcagcccagagctgcagcagaagttccgcagtgagac

SEQ ID NO: 114212 - DNA, 1024 bp, Homo sapiens
  Payload ID: 2325
  Gene Symbol: CBR1
  Gene Name: carbonyl reductase 1
  ENST ID: ENST00000439427
  CDS Start-End: 102-638
acgaccgccagactcgagcagtctctggaacacgctgcggggctcccgggcctgagccaggtctgttctccacgcaggtgttccgcgcgccccgttcagccatgtcgtccggcatccatgtagcgctggtgactggaggcaacaagggcatcggcttggccatcgtgcgcgacctgtgccggctgttctcgggggacgtggtgctcacggcgcgggacgtgacgcggggccaggcggccgtacagcagctgcaggcggagggcctgagcccgcgcttccaccagctggacatcgacgatctgcagagcatccgcgccctgcgcgacttcctgcgcaaggagtacgggggcctggacgtgctggtcaacaacgcgggcatcgccttcaaggttgctgatcccacaccctttcatattcaagctgaagtgacgatgaaaacaaatttctttggtacccgagatgtgtgcacagaattactccctctaataaaaccccaaggtgagtctgatgggaaacagcgcaccttctctttggggcttgatttggcccctgcttgcctgggatttctcctgcaggctcctgcttcctctccatgctgcacgtgcactgacctctgtgctttttctcctgccagctgatatgtgccattttgcctcaggactttgtcctcacttctcccactcccatggccattcgtcctccctgtcgcactggtctttgcacacctggctgactctcatccttcaggtcttagctcaaacgtctcctgagagatgctctttatttgctccattcccctctgcgtgggagtccatcctgtaccctttctctgctctttcagagagatcttattcaggctggtggaggctttactaccaccagttcattaggcccttctaatacctgtcacctgtctgaaacactccttaagctcccaaccacatggttgtcttgctgcctttccatctcttcctgatgcctttccccacaatctaagatatttccagaggatccctatcctttt

SEQ ID NO: 114213 - DNA, 1924 bp, Homo sapiens
  Payload ID: 2325
  Gene Symbol: CBR1
  Gene Name: carbonyl reductase 1
  Uniprot ID: P16152
  ENST ID: ENST00000530908
  CDS Start-End: 176-697
agccccgccccgctagggcggggcctgcgcctgcgcgctcagcggccgggcgtgtaacccacgggtgcgcgcccacgaccgccagactcgagcagtctctggaacacgctgcggggctcccgggcctgagccaggtctgttctccacgcaggtgttccgcgcgccccgttcagccatgtcgtccggcatccatgtagcgctggtgactggaggcaacaagggcatcggcttggccatcgtgcgcgacctgtgccggctgttctcgggggacgtggtgctcacggcgcgggacgtgacgcggggccaggcggccgtacagcagctgcaggcggagggcctgagcccgcgcttccaccagctggacatcgacgatctgcagagcatccgcgccctgcgcgacttcctgcgcaaggagtacgggggcctggacgtgctggtcaacaacgcgggcatcgccttcaaggttgctgatcccacaccctttcatattcaagctgaagtgacgatgaaaacaaatttctttggtacccgagatgtgtgcacagaattactccctctaataaaaccccaagcatcctgcgtactgtctgcatggtcatgcctctcccaaaatccttcaggaggaaagtccaagcccttagcatggttcacagagatgtccataatctgccgctgcttaactctgggcccattttaactccccttcaacgtgctgaaggtgctggacatgactatcacatgtctttggttgtaaactgctgtgatagttaccctaagtaatgggacaggagatgaacccacccattaaataacacagcaattaagcagccacttttagaaaaatttaaatgtgtggcttcgagttgggtacttgcatgtacagcttactctcagcttttatcctgtttccctgtcctgtcgtcctgttaagttgtgctacttctaaggctctggttcaccaggacctcaaagggcagctcttccaaatctcacctgactctactcagccaaaattcgaaggcaggaatgaacttcttcatgcaactaccaccacactttctatgcgtattcctcttagaactcataccagtaactgtctctcatatgaaaattttctgctccaaaatccctgcaaatttggcattcacctctctacgggattgttgcacacctttctacataatgctttgtggtgtatcttagggagagtggtgaacgtatctagcatcatgagcgtcagagcccttaaaagctgcagcccagagctgcagcagaagttccgcagtgagaccatcactgaggaggagctggtggggctcatgaacaagtttgtggaggatacaaagaagggagtgcaccagaaggagggctggcccagcagcgcatacggggtgacgaagattggcgtcaccgttctgtccaggatccacgccaggaaactgagtgagcagaggaaaggggacaagatcctcctgaatgcctgctgcccagggtgggtgagaactgacatggcgggacccaaggccaccaagagcccagaagaaggtgcagagacccctgtgtacttggcccttttgcccccagatgctgagggtccccatggacaatttgtttcagagaagagagttgaacagtggtgagctgggctcacagctccatccatgggccccattttgtaccttgtcctgagttggtccaaagggcatttacaatgtcataaatatccttatataagaaaaaaaatgatctcttatcaattagcactcactaatgtactactaattgagcaacctacgcactcagttgactacgtaaatctgtcaggtcttttgtgatttcctctgatgcaggagaggaaaaattgtaattgatgaaaataatgaatgaaaatcaacagatgaataaatggttctttataagtgtc

SEQ ID NO: 114214 - DNA, 1169 bp, Homo sapiens
  Payload ID: 2326
  Gene Symbol: CBR3
  Gene Name: carbonyl reductase 3
  Uniprot ID: O75828
  ENST ID: ENST00000290354
  CDS Start-End: 282-1115
cggacacctcgcagatcaccccgcggctcagagcccggatcctgaagggcgcagcgtgggcagggggcgggcccgggagttggaacagagggcacagacggcccctcctcggaggggagggaccggagccggggcctttttctttaagactcgcagcactggatcccagaacttagtctgcgcggcggcattgacactagctgggctcctcggggcgcgccccaggtggtccgaagcccggtccgccctccacgcaggtgccccgcgctccccgctcagccatgtcgtcctgcagccgcgtggcgctggtgaccggggccaacaggggcatcggcttggccatcgcgcgcgaactgtgccgacagttctctggggatgtggtgctcaccgcgcgggacgtggcgcggggccaggcggccgtgcagcagctgcaggcggagggcctgagcccgcgcttccaccaactggacatcgacgacttgcagagcatccgcgccctgcgcgacttcctgcgcaaggagtacggggggctcaacgtactggtcaacaacgcggccgtcgccttcaagagtgatgatccaatgccctttgacattaaagctgagatgacactgaagacaaatttttttgccactagaaacatgtgcaacgagttactgccgataatgaaacctcatgggagagtggtgaatatcagtagtttgcagtgtttaagggcttttgaaaactgcagtgaagatctgcaggaaaggttccacagtgagacactcacagaaggagacctggtggatctcatgaaaaagtttgtggaggacacaaaaaatgaggtgcatgagagggaaggctggcccaactcaccttatggggtgtccaagttgggggtcacggtcttatcgaggatcctggccaggcgtctggatgagaagaggaaagctgacaggattctggtgaatgcgtgctgcccaggaccagtgaagacagacatggatgggaaagacagcatcaggactgtggaggagggggctgagacccctgtctacttggccctcttgcctccagatgccactgagccacaaggccagttggtccatgacaaagttgtgcaaaactggtaaacgtctgcttcggagcttgctgcttaataaatgttggtggaatgaatgaatgaa

SEQ ID NO: 114215 - DNA, 3443 bp, Homo sapiens
  Payload ID: 2327
  Gene Symbol: CBR4
  Gene Name: carbonyl reductase 4
  Uniprot ID: Q8N4T8
  ENST ID: ENST00000306193
  CDS Start-End: 170-883
attactattgtgcggctgcaggaggtgtcgagcggcgttatttttttttgcggtttgcctttttttttcttttttttttttttggaaccgcggttgtttaaaagcctgagggaacctggagaggggctcccactccctaccctctttcctccgagtttgtgactccgagatggacaaagtgtgtgctgtttttggaggctcccgaggcattggcagagctgtggcccagttaatggcccggaaaggctaccgactggcggtcattgccagaaacctggaaggggccaaagccgccgccggtgacctcggcggagatcatttggcatttagctgtgatgttgctaaagaacatgatgttcaaaatacatttgaagagctggagaaacatttaggtcgagtaaatttcttggtaaatgcagctggtattaacagggatggtcttttagtaagaacaaaaactgaagatatggtatctcagcttcatactaacctcttgggttccatgctgacctgtaaagctgccatgaggactatgattcaacaacagggagggtctattgttaatgtaggaagcattgttggcttaaaaggcaactctggccagtccgtttacagtgccagtaaaggaggattagttggattttcacgtgctcttgctaaagaggtagcaagaaagaaaattagagtgaatgtagttgcaccaggatttgtacacacagatatgacgaaagacttgaaagaagaacatttaaagaaaaatattcctcttgggaggtttggagaaactattgaggtggcacatgcggttgtgtttcttttagaatcaccgtatattacagggcatgttctggtagtggatgggggattacaactcattttgtaatttgcagattattcagttataggggtgattagcatcaagggcacactttggctactgattagacaattatacctacatgggtaacatgtgctaatcaaacctgctgatgctacaaatgttaatttctgtctttataaaaatatgtctcaaaagaacaatgtgtgacaaattgtggtttttttttttttggtctaagttacatcagtgttgttttgtttaaaaagccttcatgagatacaattcacataccatataatcacacatttaaaatacacaattcagtggttttaacatatttaaatacatgtgcaatcatccccccagacaaattgtgttttctaaaggatgtgtatcacttacctttggttacctcatagactgtagcaatcttagtgtatagacattttgcaagtcatataaacaagtattgatttatatattttgtctcaaaagtggaaaaattatattgtctaattatgatgaattattttcttgtatcaagctgaattttctaaaagttaaccttgtgggctgttgccaaaataagagtatttagaggacactgattagttgtcaatactttagcaagcccactaaagataactatattccttttgcatgtgcttgggtgatcagtttttatacaggttgcaaaacatagtattcattaaagacatgaatttagaattgatttctttgagtggtatttctcttgattgagcagctagacaaaataatctgcaaatttaaatgtggcgcatttgactcattcttgagaaattctcataagtgaagaggattagcccttaaggttttaatacctggtacagtagtgaaccgcacagatttcatgaacttaggatgtgttttttattcatgaaaaacttagaatagtgaactattaatatttaaaaacgagaaatacaacatttaaaaaattaagagtattttgcattagtgattatgattcttatcccaaaattctagaaagtaataaattctgtatgaataagcataaaaaataaataaatatgcaataacattaaattaaatgtctttacaagaagcagtgaaggcactggtcttaagtgagaatatttgcctgggagtagagataaagacacaaaccgaatgtgaaataccaggtaataattattttgcattaaactctttttatcgggaatagtatgatattttcagtgtcactccattcatgttgatttggagctgacagttattttgtgtaagcagagatttaattttatattgaaagtcagtgcaaaattatgaataggatatactaataaatacaaagtaataacaaaagtcaaagcagtgttctaaataaaaattctgggttccttaaaaattattttaaatttatctttgaaatagttttcttagattaatctcaggatatgagaaagtcaattaagtgtgagtaaagttagtatcattaaacaaattgtctattaaatgcaagacgtggtaatatacagaatttatcaggcattaccaagtctaggcacatataggaaatgcagcactcagaatggtttcaatgtagtagttgatgcttgtaaggtaggggagcttattcagacatagtagatagtttctctaatgctgtctcaattgctggcctttggctacctgtacttccccattatggcagcccattcagtcttgagttttcttctctggacaccttatgctctgaaatcatgagcgaggctgattcaattggtgatttgggtagaaagcagtatgttttgctgacattaagatgtaggttatagataggtttagcctttaagtgtatgtttttatactttaaaataagaaatataaccttttaagctattccacctcctcccccagcctatctcaaactggtggaatatatggagagatcttgaaagaggtaaaataaaccttcactgctccactccaggtgaatccgcccactcccactgacctagtagaatttgtaatttaatacttaccttctatttctgaaatcagttgtgaactgttgccttatgttcagaggtttaagaacctcagtgaattcattttttaaaatctgctattctgagaagcattgaatgaattcttaacaagaagactcatctgtagctgtttgctgactcctatgagcccataagggttctgtgcttagcattaacaaaataaggtttataggtaaagccaatgtattaatttttttttgcatggagggctttaaaatttgtgctctttttcatattttattcatattcaatttatggtttgtaactgctttttagggagataattatatgttataaattagttttggggggaataattgtgcaaagaggataatttaatttacgtgcttctgttattcagaataaagagagaagactacgctgcatattcaagagttgtaccttaacattggtgaaacattttttctaagattttcaaaaggaatatgtgtaaattgagaaatcataaccactgtcctaacttggtaaacaaactgttcttaaataaagtatttaatgattttaaa

SEQ ID NO: 114216 - DNA, 562 bp, Homo sapiens
  Payload ID: 2327
  Gene Symbol: CBR4
  Gene Name: carbonyl reductase 4
  ENST ID: ENST00000506808
  CDS Start-End: 162-344
tgtgcggctgcaggaggtgtcgagcggcgttatttttttttgcggtttgcctttttttttcttttttttttttttggaaccgcggttgtttaaaagcctgagggaacctggagaggggctcccactccctaccctctttcctccgagtttgtgactccgagatggacaaagtgtgtgctgtttttggaggctcccgaggcattggcagagctgtggcccagttaatggcccggaaaggctaccgactggcggtcattgccagaaacctggaaggggccaaagccgccgccggtgacctcggcgagatcttctcgcctcagtctcccaaggacctgggactatagacgccaggagatcatttggcatttagctgtgatgttgctaaagaacatgatgttcaaaatacatttgaagagctggagaaacatttaggtcgagtaaatttcttggtaaatgcagctggtattaacagggatggtcttttagtaagaacaaaaactgaagatatggtatctcagcttcatactaacctcttgggttccatgctgacctgtaaagctgc

SEQ ID NO: 114217 - DNA, 1052 bp, Homo sapiens
  Payload ID: 2327
  Gene Symbol: CBR4
  Gene Name: carbonyl reductase 4
  ENST ID: ENST00000504561
  CDS Start-End: 1-561
gtgtgtgctgtttttggaggctcccgaggcattggcagagctgtggcccagttaatggcccggaaaggctaccgactggcggtcattgccagaaacctggaaggggccaaagccgccgccggtgacctcggcggagatcatttggcatttagctgtgatgttgctaaagaacatgatgttcaaaatacatttgaagagctggagaaacatttaggtcgagtaaatttcttggtaaatgcagctggtattaacagggatggtcttttagtaagaacaaaaactgaagatatggtatctcagcttcatactaacctcttgggttccatgctgacctgtaaagctgccatgaggactatgattcaacaacagggagggtctattgttaatgtaggccacagaagggagatgctgctccataaaagaagcattgttggcttaaaaggcaactctggccagtccgtttacagtgccagtaaaggaggattagttggattttcacgtgctcttgctaaagaggtagcaagaaagaaaattagagtgaatgtagttgcaccaggttagtgaaaactttattaaaataacttgattatgattattgttttatagggaagccattatttggaacattagtaattgacatctgggtagaatagtttgtaaaatgattgtgaaaagaatcaaataatgaactgggggactcaaaaaaattttttgtacctcatattctatataaagtctatgtgttagcctgtttgcattgctctaaaggactgtctgaggtaattcataaaaaaaagaggcttatttggctctcgggcctgcaggctgtacaagcatgacaccaacatctgctcagcttctggtgaggcccaggaaactttttttcagtcatggcggaaggtaaagaggtagcagccaagtcatatggggatagcaggagcaagagagagaggaggtggcaggctctaaacaaccagctctggcatgaactaacagtgagaactcattatttaccatgtggagggcaccaagctattcatgaggaatccgcc

SEQ ID NO: 114218 - DNA, 1198 bp, Homo sapiens
  Payload ID: 2327
  Gene Symbol: CBR4
  Gene Name: carbonyl reductase 4
  ENST ID: ENST00000510042
  CDS Start-End: 170-325
attactattgtgcggctgcaggaggtgtcgagcggcgttatttttttttgcggtttgcctttttttttcttttttttttttttggaaccgcggttgtttaaaagcctgagggaacctggagaggggctcccactccctaccctctttcctccgagtttgtgactccgagatggacaaagtgtgtgctgtttttggaggctcccgaggcattggcagagctgtggcccagttaatggcccggaaaggctaccgactggcggtcattgccagaaacctggaaggggccaaagccgccgccggtgacctcggcgggatggtcttttagtaagaacaaaaactgaagatatggtatctcagcttcatactaacctcttgggttccatgctgacctgtaaagctgccatgaggactatgattcaacaacagggagggtctattgttaatgtaggaagcattgttggcttaaaaggcaactctggccagtccgtttacagtgccagtaaaggaggattagttggattttcacgtgctcttgctaaagaggtagcaagaaagaaaattagagtgaatgtagttgcaccagaactcatcccaagaacagtatccataaggaagatggaaaagggggacagaataaatgttaccctaagaagtccagagcaacatggtacctgattagctgtttcctcttctggctcctgaatattaaagacagttgcactgtcagcacctagcagtcgacgagccattctttcttcgtatgttaacctctaaacaacatttaaacaacggaaaaagccactgaagtatgtatagtatctgtgcgccgagatacacaggaaagcatggaacatgtggatggaaggaaccgggatcatctcatccagctgagtaataagtacgtttggtgcagtgccacacaggaggccaccaacagagcccagagtagtaactaggttgcttcactcttagcctctcaagtgatgacaccaaggcatgatcttatctcttgattgtggccacccgtaaagaaaagcgtatctctaatctcagaagcacaaggagttcataccaggaaaccaagattagtaagtatttttgtggtgaataccttttgaataagacaggattaatgtaacagttaaaagtatagaaatataaaagttacgaacttactggtgatttttttctttggtgt

SEQ ID NO: 114219 - DNA, 547 bp, Homo sapiens
  Payload ID: 2327
  Gene Symbol: CBR4
  Gene Name: carbonyl reductase 4
  ENST ID: ENST00000507752
  CDS Start-End: 187-369
ttttcacggcgtcttgcattactattgtgcggctgcaggaggtgtcgagcggcgttatttttttttgcggtttgcctttttttttcttttttttttttttggaaccgcggttgtttaaaagcctgagggaacctggagaggggctcccactccctaccctctttcctccgagtttgtgactccgagatggacaaagtgtgtgctgtttttggaggctcccgaggcattggcagagctgtggcccagttaatggcccggaaaggctaccgactggcggtcattgccagaaacctggaaggggccaaagccgccgccggtgacctcggcgggcttcccattatgttgcccgtgctggaccccaactcctgatttactggctctagagatcttctcgcctcagtctcccaaggacctgggactatagacgccaggagatcatttggcatttagctgtgatgttgctaaagaacatgatgttcaaaatacatttgaagagctggagaaacatttaggtcgagtaaatttcttggtaaatgcagctggtatt

SEQ ID NO: 114220 - DNA, 1602 bp, Homo sapiens
  Payload ID: 2327
  Gene Symbol: CBR4
  Gene Name: carbonyl reductase 4
  Uniprot ID: Q8N4T8
  ENST ID: ENST00000504480
  CDS Start-End: 166-705
ctattgtgcggctgcaggaggtgtcgagcggcgttatttttttttgcggtttgcctttttttttcttttttttttttttggaaccgcggttgtttaaaagcctgagggaacctggagaggggctcccactccctaccctctttcctccgagtttgtgactccgagatggacaaagtgtgtgctgtttttggaggctcccgaggcattggcagagctgtggcccagttaatggcccggaaaggctaccgactggcggtcattgccagaaacctggaaggggccaaagccgccgccggtgacctcggcggagatcatttggcatttagctgtgatgttgctaaagaacatgatgttcaaaatacatttgaagagctggagaaacatttaggtcgagtaaatttcttggtaaatgcagctggtattaacagggatggtcttttagtaagaacaaaaactgaagatatggtatctcagcttcatactaacctcttgggttccatgctgacctgtaaagctgccatgaggactatgattcaacaacagggagggtctattgttaatgtaggaagcattgttggcttaaaaggcaactctggccagtccgtttacagtgccagtaaaggaggattagttggattttcacgtgctcttgctaaagaggtagcaagaaagaaaattagagtgaatgtagttgcaccaggttagtgaaaactttattaaaataacttgattatgattattgttttatagggaagccattatttggaacattagtaattgacatctgggtagaatagtttgtaaaatgattgtgaaaagaatcaaataatgaactgggggactcaaaaaaattttttgtacctcatattctatataaagtctatgtgttagcctgtttgcattgctctaaaggactgtctgaggtaattcataaaaaaaagaggcttatttggctctcgggcctgcaggctgtacaagcatgacaccaacatctgctcagcttctggtgaggcccaggaaactttttttcagtcatggcggaaggtaaagaggtagcagccaagtcatatggggatagcaggagcaagagagagaggaggtggcaggctctaaacaaccagctctggcatgaactaacagtgagaactcattatttaccatgtggagggcaccaagctattcatgaggaatccgcctccatgacccaaacacctcccgctaggcccacctccaacattgggaatcacatttcaacatgagatttggaggggacagacatccaaaccataagagtctttatttttaaattttgcactagtggaataacttaaggtggagagggtcttagaaataattttttccagtcatttttgtagattagaaaactgtacctgggattcagagtgacttgcctaaggttacacagctagtttatggaagaactgttactaaaagctttgtcttttgatttccacctaatgggagcttaaaaataatgtcctaccaggtatggtagctcatgtgggaggctgaggcaggagtattgtgaggccaggagttccagatcagcctgagcaacatagcaagatgctgtctgtaccg

SEQ ID NO: 114221 - DNA, 2384 bp, Homo sapiens
  Payload ID: 2328
  Gene Symbol: CEL
  Gene Name: carboxyl ester lipase
  ENST ID: ENST00000372080
  CDS Start-End: 17-2287
ggccacccagaggctgatgctcaccatggggcgcctgcaactggttgtgttgggcctcacctgctgctgggcagtggcgagtgccgcgaagctgggcgccgtgtacacagaaggtgggttcgtggaaggcgtcaataagaagctcggcctcctgggtgactctgtggacatcttcaagggcatccccttcgcagctcccaccaaggccctggaaaatcctcagccacatcctggctggcaagggaccctgaaggccaagaacttcaagaagagatgcctgcaggccaccatcacccaggacagcacctacggggatgaagactgcctgtacctcaacatttgggtgccccagggcaggaagcaagtctcccgggacctgcccgttatgatctggatctatggaggcgccttcctcatggggtccggccatggggccaacttcctcaacaactacctgtatgacggcgaggagatcgccacacgcggaaacgtcatcgtggtcaccttcaactaccgtgtcggcccccttgggttcctcagcactggggacgccaatctgccaggtaactatggccttcgggatcagcacatggccattgcttgggtgaagaggaatatcgcggccttcgggggggaccccaacaacatcacgctcttcggggagtctgctggaggtgccagcgtctctctgcagaccctctccccctacaacaagggcctcatccggcgagccatcagccagagcggcgtggccctgagtccctgggtcatccagaaaaacccactcttctgggccaaaaaggtggctgagaaggtgggttgccctgtgggtgatgccgccaggatggcccagtgtctgaaggttactgatccccgagccctgacgctggcctataaggtgccgctggcaggcctggagtaccccatgctgcactatgtgggcttcgtccctgtcattgatggagacttcatccccgctgacccgatcaacctgtacgccaacgccgccgacatcgactatatagcaggcaccaacaacatggacggccacatcttcgccagcatcgacatgcctgccatcaacaagggcaacaagaaagtcacggaggaggacttctacaagctggtcagtgagttcacaatcaccaaggggctcagaggcgccaagacgacctttgatgtctacaccgagtcctgggcccaggacccatcccaggagaataagaagaagactgtggtggactttgagaccgatgtcctcttcctggtgcccaccgagattgccctagcccagcacagagccaatgccaagagtgccaagacctacgcctacctgttttcccatccctctcggatgcccgtctaccccaaatgggtgggggccgaccatgcagatgacattcagtacgttttcgggaagcccttcgccacccccacgggctaccggccccaagacaggacagtctctaaggccatgatcgcctactggaccaactttgccaaaacaggggaccccaacatgggcgactcggctgtgcccacacactgggaaccctacactacggaaaacagcggctacctggagatcaccaagaagatgggcagcagctccatgaagcggagcctgagaaccaacttcctgcgctactggaccctcacctatctggcgctgcccacagtgaccgaccaggaggccacccctgtgccccccacaggggactccgaggccactcccgtgccccccacgggtgactccgagaccgcccccgtgccgcccacgggtgactccggggccccccccgtgccgcccacgggtgactccggggccccccccgtgccgcccacgggtgactccggggccccccccgtgccgcccacgggtgactccggggccccccccgtgccgcccacgggtgactccggggccccccccgtgccgcccacgggtgactccggggccccccccgtgccgcccacgggtgactccggggccccccccgtgccgcccacgggtgactccggcgccccccccgtgccgcccacgggtgacgccgggcccccccccgtgccgcccacgggtgactccggcgccccccccgtgccgcccacgggtgactccggggccccccccgtgacccccacgggtgactccgagaccgcccccgtgccgcccacgggtgactccggggccccccctgtgccccccacgggtgactctgaggctgcccctgtgccccccacagatgactccaaggaagctcagatgcctgcagtcattaggttttagcgtcccatgagccttggtatcaagaggccacaagagtgggaccccaggggctcccctcccatcttgagctcttcctgaataaagcctcatacccctg

SEQ ID NO: 114222 - DNA, 1213 bp, Homo sapiens
  Payload ID: 2328
  Gene Symbol: CEL
  Gene Name: carboxyl ester lipase
  ENST ID: ENST00000621209
  CDS Start-End: 14-193
cacccagaggctgatgctcaccatggggcgcctgcaactggttgtgttgggcctcacctgctgctgggcagtggcgagtgccgcgaagaccccatgctgcactatgtgggcttcgtccctgtcattgatggagacttcatccccgctgacccgatcaacctgtacgccaacgccgccgacatcgactatatagcaggcaccaacaacatggacggccacatcttcgccagcatcgacatgcctgccatcaacaagggcaacaagaaagtcacggaggaggacttctacaagctggtcagtgagttcacaatcaccaaggggctcagaggcgccaagacgacctttgatgtctacaccgagtcctgggcccaggacccatcccaggagaataagaagaagactgtggtggactttgagaccgatgtcctcttcctggtgcccaccgagattgccctagcccagcacagagccaatgccaagagtgccaagacctacgcctacctgttttcccatccctctcggatgcccgtctaccccaaatgggtgggggccgaccatgcagatgacattcagtacgttttcgggaagcccttcgccacccccacgggctaccggccccaagacaggacagtctctaaggccatgatcgcctactggaccaactttgccaaaacaggggaccccaacatgggcgactcggctgtgcccacacactgggaaccctacactacggaaaacagcggctacctggagatcaccaagaagatgggcagcagctccatgaagcggagcctgagaaccaacttcctgcgctactggaccctcacctatctggcgctgcccacagtgaccgaccaggaggccacccctgtgccccccacaggggactccgaggccactcccgtgccccccacgggtgactctcaggatgcccctgtgcccctcacaagtgactctgaggctgcccccgtgtccccctcaggtgactctgaggctcccccgtaccccctacgggtgactctgaggcccgtgcccaccttgggtgacactgaggctgcccctgtgtcccccacagatgactccgaggaagctcagatgctgcagtcattagtttctagtgtcccatcagccttggtctcaagaggccgagagggtgcaaccccaggggctcccctcccatcttgagctcttcctgaataaaacctcattcccc

SEQ ID NO: 114223 - DNA, 2006 bp, Homo sapiens
  Payload ID: 2329
  Gene Symbol: CES1
  Gene Name: carboxylesterase 1
  Uniprot ID: P23141
  ENST ID: ENST00000360526
  CDS Start-End: 104-1810
agggcggtaactctgggcggggctgggctccagggctggacagcacagtccctctgaactgcacagagacctcgcaggccccgagaactgtcgcccttccacgatgtggctccgtgcctttatcctggccactctctctgcttccgcggcttgggcagggcatccgtcctcgccacctgtggtggacaccgtgcatggcaaagtgctggggaagttcgtcagcttagaaggatttgcacagcctgtggccattttcctgggaatcccttttgccaagccgcctcttggacccctgaggtttactccaccgcagcctgcagaaccatggagctttgtgaagaatgccacctcgtaccctcctatgtgcacccaagatcccaaggcggggcagttactctcagagctatttacaaaccgaaaggagaacattcctctcaagctttctgaagactgtctttacctcaatatttacactcctgctgacttgaccaagaaaaacaggctgccggtgatggtgtggatccacggaggggggctgatggtgggtgcggcatcaacctatgatgggctggcccttgctgcccatgaaaacgtggtggtggtgaccattcaatatcgcctgggcatctggggattcttcagcacaggggatgaacacagccgggggaactggggtcacctggaccaggtggctgccctgcgctgggtccaggacaacattgccagctttggagggaacccaggctctgtgaccatctttggagagtcagcgggaggagaaagtgtctctgttcttgttttgtctccattggccaagaacctcttccaccgggccatttctgagagtggcgtggccctcacttctgttctggtgaagaaaggtgatgtcaagcccttggctgagcaaattgctatcactgctgggtgcaaaaccaccacctctgctgtcatggttcactgcctgcgacagaagacggaagaggagctcttggagacgacattgaaaatgaaattcttatctctggacttacagggagaccccagagagagtcaaccccttctgggcactgtgattgatgggatgctgctgctgaaaacacctgaagagcttcaagctgaaaggaatttccacactgtcccctacatggtcggaattaacaagcaggagtttggctggttgattccaatgcagttgatgagctatccactctccgaagggcaactggaccagaagacagccatgtcactcctgtggaagtcctatccccttgtttgcattgctaaggaactgattccagaagccactgagaaatacttaggaggaacagacgacactgtcaaaaagaaagacctgttcctggacttgatagcagatgtgatgtttggtgtcccatctgtgattgtggcccggaaccacagagatgctggagcacccacctacatgtatgagtttcagtaccgtccaagcttctcatcagacatgaaacccaagacggtgataggagaccacggggatgagctcttctccgtctttggggccccatttttaaaagagggtgcctcagaagaggagatcagacttagcaagatggtgatgaaattctgggccaactttgctcgcaatggaaaccccaatggggaagggctgccccactggccagagtacaaccagaaggaagggtatctgcagattggtgccaacacccaggcggcccagaagctgaaggacaaagaagtagctttctggaccaacctctttgccaagaaggcagtggagaagccaccccagacagaacacatagagctgtgaatgaagatccagccggccttgggagcctggaggagcaaagactggggtcttttgcgaaagggattgcaggttcagaaggcatcttaccatggctggggaattgtctggtggtggggggcaggggacagaggccatgaaggagcaagttttgtatttgtgacctcagctttgggaataaaggatcttttgaaggcca

SEQ ID NO: 114224 - DNA, 1835 bp, Homo sapiens
  Payload ID: 2329
  Gene Symbol: CES1
  Gene Name: carboxylesterase 1
  Uniprot ID: P23141
  ENST ID: ENST00000361503
  CDS Start-End: 132-1835
aattagaggattaggcaattggcagcgcagggcggtaactctgggcggggctgggctccagggctggacagcacagtccctctgaactgcacagagacctcgcaggccccgagaactgtcgcccttccacgatgtggctccgtgcctttatcctggccactctctctgcttccgcggcttgggggcatccgtcctcgccacctgtggtggacaccgtgcatggcaaagtgctggggaagttcgtcagcttagaaggatttgcacagcctgtggccattttcctgggaatcccttttgccaagccgcctcttggacccctgaggtttactccaccgcagcctgcagaaccatggagctttgtgaagaatgccacctcgtaccctcctatgtgcacccaagatcccaaggcggggcagttactctcagagctatttacaaaccgaaaggagaacattcctctcaagctttctgaagactgtctttacctcaatatttacactcctgctgacttgaccaagaaaaacaggctgccggtgatggtgtggatccacggaggggggctgatggtgggtgcggcatcaacctatgatgggctggcccttgctgcccatgaaaacgtggtggtggtgaccattcaatatcgcctgggcatctggggattcttcagcacaggggatgaacacagccgggggaactggggtcacctggaccaggtggctgccctgcgctgggtccaggacaacattgccagctttggagggaacccaggctctgtgaccatctttggagagtcagcgggaggagaaagtgtctctgttcttgttttgtctccattggccaagaacctcttccaccgggccatttctgagagtggcgtggccctcacttctgttctggtgaagaaaggtgatgtcaagcccttggctgagcaaattgctatcactgctgggtgcaaaaccaccacctctgctgtcatggttcactgcctgcgacagaagacggaagaggagctcttggagacgacattgaaaatgaaattcttatctctggacttacagggagaccccagagagagtcaaccccttctgggcactgtgattgatgggatgctgctgctgaaaacacctgaagagcttcaagctgaaaggaatttccacactgtcccctacatggtcggaattaacaagcaggagtttggctggttgattccaatgcagttgatgagctatccactctccgaagggcaactggaccagaagacagccatgtcactcctgtggaagtcctatccccttgtttgcattgctaaggaactgattccagaagccactgagaaatacttaggaggaacagacgacactgtcaaaaagaaagacctgttcctggacttgatagcagatgtgatgtttggtgtcccatctgtgattgtggcccggaaccacagagatgctggagcacccacctacatgtatgagtttcagtaccgtccaagcttctcatcagacatgaaacccaagacggtgataggagaccacggggatgagctcttctccgtctttggggccccatttttaaaagagggtgcctcagaagaggagatcagacttagcaagatggtgatgaaattctgggccaactttgctcgcaatggaaaccccaatggggaagggctgccccactggccagagtacaaccagaaggaagggtatctgcagattggtgccaacacccaggcggcccagaagctgaaggacaaagaagtagctttctggaccaacctctttgccaagaaggcagtggagaagccaccccagacagaacacatagagctgtga

SEQ ID NO: 114225 - DNA, 2178 bp, Homo sapiens
  Payload ID: 2329
  Gene Symbol: CES1
  Gene Name: carboxylesterase 1
  Uniprot ID: P23141
  ENST ID: ENST00000422046
  CDS Start-End: 283-1983
gtagttgggcaagtttacagctctctgtaatctgacagtagagtccagactggtttgatgaaagagggtaaactgtgggtgggcgtggcctgaggccccactagaagcccagggagatctgaggaaagggagggcttttctgatctctcccaattagaggattaggcaattggcagcgcagggcggtaactctgggcggggctgggctccagggctggacagcacagtccctctgaactgcacagagacctcgcaggccccgagaactgtcgcccttccacgatgtggctccgtgcctttatcctggccactctctctgcttccgcggcttgggggcatccgtcctcgccacctgtggtggacaccgtgcatggcaaagtgctggggaagttcgtcagcttagaaggatttgcacagcctgtggccattttcctgggaatcccttttgccaagccgcctcttggacccctgaggtttactccaccgcagcctgcagaaccatggagctttgtgaagaatgccacctcgtaccctcctatgtgcacccaagatcccaaggcggggcagttactctcagagctatttacaaaccgaaaggagaacattcctctcaagctttctgaagactgtctttacctcaatatttacactcctgctgacttgaccaagaaaaacaggctgccggtgatggtgtggatccacggaggggggctgatggtgggtgcggcatcaacctatgatgggctggcccttgctgcccatgaaaacgtggtggtggtgaccattcaatatcgcctgggcatctggggattcttcagcacaggggatgaacacagccgggggaactggggtcacctggaccaggtggctgccctgcgctgggtccaggacaacattgccagctttggagggaacccaggctctgtgaccatctttggagagtcagcgggaggagaaagtgtctctgttcttgttttgtctccattggccaagaacctcttccaccgggccatttctgagagtggcgtggccctcacttctgttctggtgaagaaaggtgatgtcaagcccttggctgagcaaattgctatcactgctgggtgcaaaaccaccacctctgctgtcatggttcactgcctgcgacagaagacggaagaggagctcttggagacgacattgaaaatgaaattcttatctctggacttacagggagaccccagagagagtcaaccccttctgggcactgtgattgatgggatgctgctgctgaaaacacctgaagagcttcaagctgaaaggaatttccacactgtcccctacatggtcggaattaacaagcaggagtttggctggttgattccaatgttgatgagctatccactctccgaagggcaactggaccagaagacagccatgtcactcctgtggaagtcctatccccttgtttgcattgctaaggaactgattccagaagccactgagaaatacttaggaggaacagacgacactgtcaaaaagaaagacctgttcctggacttgatagcagatgtgatgtttggtgtcccatctgtgattgtggcccggaaccacagagatgctggagcacccacctacatgtatgagtttcagtaccgtccaagcttctcatcagacatgaaacccaagacggtgataggagaccacggggatgagctcttctccgtctttggggccccatttttaaaagagggtgcctcagaagaggagatcagacttagcaagatggtgatgaaattctgggccaactttgctcgcaatggaaaccccaatggggaagggctgccccactggccagagtacaaccagaaggaagggtatctgcagattggtgccaacacccaggcggcccagaagctgaaggacaaagaagtagctttctggaccaacctctttgccaagaaggcagtggagaagccaccccagacagaacacatagagctgtgaatgaagatccagccggccttgggagcctggaggagcaaagactggggtcttttgcgaaagggattgcaggttcagaaggcatcttaccatggctggggaattgtctggtggtggggggcaggggacagaggccatgaaggagcaagttttgtatttgtgacctcagctttgggaataaaggatcttttgaaggcc

SEQ ID NO: 114226 - DNA, 659 bp, Homo sapiens
  Payload ID: 2329
  Gene Symbol: CES1
  Gene Name: carboxylesterase 1
  ENST ID: ENST00000565568
  CDS Start-End: 1-135
gaaaggaatttccacactgtcccctacatggtcggaattaacaagcaggagtttggctggttgattccaatgatgctggagcacccacctacatgtatgagtttcagtaccgtccaagcttctcatcagacatgaaacccaagacggtgataggagaccacggggatgagctcttctccgtctttggggccccatttttaaaagagggtgcctcagaagaggagatcagacttagcaagatggtgatgaaattctgggccaactttgctcgcaatggaaaccccaatggggaagggctgccccactggccagagtacaaccagaaggaagggtatctgcagattggtgccaacacccaggcggcccagaagctgaaggacaaagaagtagctttctggaccaacctctttgccaagaaggcagtggagaagccaccccagacagaacacatagagctgtgaatgaagatccagccggccttgggagcctggaggagcaaagactggggtcttttgcgaaagggattgcaggttcagaaggcatcttaccatggctggggaattgtctggtggtggggggcaggggacagaggccatgaaggagcaagttttgtatttgtgacctcagctttgggaataaaggatcttttgaaggccaaa

SEQ ID NO: 114227 - DNA, 509 bp, Homo sapiens
  Payload ID: 2329
  Gene Symbol: CES1
  Gene Name: carboxylesterase 1
  ENST ID: ENST00000563241
  CDS Start-End: 1-396
aaggaactgattccagaagccactgagaaatacttaggaggaacagacgacactgtcaaaaagaaagacctgttcctggacttgatagcagatgtgatgtttggtgtcccatctgtgattgtggcccggaaccacagagagggtgcctcagaagaggagatcagacttagcaagatggtgatgaaattctgggccaactttgctcgcaatggaaaccccaatggggaagggctgccccactggccagagtacaaccagaaggaagggtatctgcagattggtgccaacacccaggcggcccagaagctgaaggacaaagaagtagctttctggaccaacctctttgccaagaaggcagtggagaagccaccccagacagaacacatagagctgtgaatgaagatccagccggccttgggagcctggaggagcaaagactggggtcttttgcgaaagggattgcaggttcagaaggcatcttaccatggctggggaattgtctggtggtg

SEQ ID NO: 114228 - DNA, 659 bp, Homo sapiens; identical to SEQ ID NO: 114226
  Payload ID: 2329
  Gene Symbol: CES1
  Gene Name: carboxylesterase 1
  ENST ID: ENST00000561966
  CDS Start-End: 1-135

SEQ ID NO: 114229 - DNA, 499 bp, Homo sapiens
  Payload ID: 2329
  Gene Symbol: CES1
  Gene Name: carboxylesterase 1
  ENST ID: ENST00000569260
  CDS Start-End: 1-253
gcgacagaagacggaagaggagctcttggagacgacattgaaaatgaaattcttatctctggacttacagggagaccccagagagagtcaaccccttctgggcactgtgattgatgggatgctgctgctgaaaacacctgaagagcttcaagctgaaaggaatttccacactgtcccctacatggtcggaattaacaagcaggagtttggctggttgattccaatgggaacagcagacatcagcgtctactaagagagtggatggtcagaggaagatgaggatggaaaagctacctaatcgggtgctatgctcaatacctgcagttgatgagctatccactctccgaagggcaactggaccagaagacagccatgtcactcctgtggaagtcctatccccttgtttgcattgctaaggaactgattccagaagccactgagaaatacttaggaggaacagacgacactgtcaaaaagaaagacctgttcctggacttga

SEQ ID NO: 114230 - DNA, 1991 bp, Homo sapiens
  Payload ID: 2329
  Gene Symbol: CES1
  Gene Name: carboxylesterase 1
  Uniprot ID: P23141
  ENST ID: ENST00000576783
  CDS Start-End: 96-1796
aactctgggcggggctgggcgccagggctggacagcacagtccctctgagctgcacggagacctcgcaggcccccggaactgtcgcccttccaggatgtggctccctgctcttgtcctggccactctcgctgcttccgcggcttgggggcatccgtcctcgccacctgtggtggacaccgtgcatggcaaagtgctggggaagttcgtcagcttagaaggatttgcacagcctgtggccattttcctgggaatcccttttgccaagccgcctcttggacccctgaggtttactccaccgcagcctgcagaaccatggagctttgtgaagaatgccacctcgtaccctcctatgtgcacccaagatcccaaggcggggcagttactctcagagctatttacaaaccgaaaggagaacattcctctcaagctttctgaagactgtctttacctcaatatttacactcctgctgacttgaccaagaaaaacaggctgccggtgatggtgtggatccacggaggggggctgatggtgggtgcggcatcaacctatgatgggctggcccttgctgcccatgaaaacgtggtggtggtgaccattcaatatcgcctgggcatctggggattcttcagcacaggggatgaacacagccgggggaactggggtcacctggaccaggtggctgccctgcgctgggtccaggacaacattgccagctttggagggaacccaggctctgtgaccatctttggagagtcagcgggaggagaaagtgtctctgttcttgttttgtctccattggccaagaacctcttccaccgggccatttctgagagtggcgtggccctcacttctgttctggtgaagaaaggtgatgtcaagcccttggctgagcaaattgctatcactgctgggtgcaaaaccaccacctctgctgtcatggttcactgcctgcgacagaagacggaagaggagctcttggagacgacattgaaaatgaaattcttatctctggacttacagggagaccccagagagagtcaaccccttctgggcactgtgattgatgggatgctgctgctgaaaacacctgaagagcttcaagctgaaaggaatttccacactgtcccctacatggtcggaattaacaagcaggagtttggctggttgattccaatgttgatgagctatccactctccgaagggcaactggaccagaagacagccatgtcactcctgtggaagtcctatccccttgtttgcattgctaaggaactgattccagaagccactgagaaatacttaggaggaacagacgacactgtcaaaaagaaagacctgttcctggacttgatagcagatgtgatgtttggtgtcccatctgtgattgtggcccggaaccacagagatgctggagcacccacctacatgtatgagtttcagtaccgtccaagcttctcatcagacatgaaacccaagacggtgataggagaccacggggatgagctcttctccgtctttggggccccatttttaaaagagggtgcctcagaagaggagatcagacttagcaagatggtgatgaaattctgggccaactttgctcgcaatggaaaccccaatggggaagggctgccccactggccagagtacaaccagaaggaagggtatctgcagattggtgccaacacccaggcggcccagaagctgaaggacaaagaagtagctttctggaccaacctctttgccaagaaggcagtggagaagccaccccagacagaacacatagagctgtgaatgaagatccagccggccttgggagcctggaggagcaaagactggggtcttttgcgaaagggattgcaggttcagaaggcatcttaccatggctggggaattgtctggtggtggggggcaggggacagaggccatgaaggagcaagttttgtatttgtgacctcagctttgggaataaaggatcttttgaaggcc

SEQ ID NO: 114231 - DNA, 518 bp, Homo sapiens
  Payload ID: 2329
  Gene Symbol: CES1
  Gene Name: carboxylesterase 1
  ENST ID: ENST00000576185
  CDS Start-End: 1-405
tgcattgctaaggaactgattccagaagccactgagaaatacttaggaggaacagacgacactgtcaaaaagaaagacctgttcctggacttgatagcagatgtgatgtttggtgtcccatctgtgattgtggcccggaaccacagagagggtgcctcagaagaggagatcagacttagcaagatggtgatgaaattctgggccaactttgctcgcaatggaaaccccaatggggaagggctgccccactggccagagtacaaccagaaggaagggtatctgcagattggtgccaacacccaggcggcccagaagctgaaggacaaagaagtagctttctggaccaacctctttgccaagaaggcagtggagaagccaccccagacagaacacatagagctgtgaatgaagatccagccggccttgggagcctggaggagcaaagactggggtcttttgcgaaagggattgcaggttcagaaggcatcttaccatggctggggaattgtctggtggtg

SEQ ID NO: 114232 - DNA, 499 bp, Homo sapiens; identical to SEQ ID NO: 114229
  Payload ID: 2329
  Gene Symbol: CES1
  Gene Name: carboxylesterase 1
  ENST ID: ENST00000574235
  CDS Start-End: 1-253

SEQ ID NO: 114233 - DNA, 1958 bp, Homo sapiens
  Payload ID: 2329
  Gene Symbol: CES1
  Gene Name: carboxylesterase 1
  Uniprot ID: P23141
  ENST ID: ENST00000571922
  CDS Start-End: 60-1763
acagtccctctgagctgcacggagacctcgcaggcccccggaactgtcgcccttccaggatgtggctccctgctcttgtcctggccactctcgctgcttccgcggcttgggggcatccgtcctcgccacctgtggtggacaccgtgcatggcaaagtgctggggaagttcgtcagcttagaaggatttgcacagcctgtggccattttcctgggaatcccttttgccaagccgcctcttggacccctgaggtttactccaccgcagcctgcagaaccatggagctttgtgaagaatgccacctcgtaccctcctatgtgcacccaagatcccaaggcggggcagttactctcagagctatttacaaaccgaaaggagaacattcctctcaagctttctgaagactgtctttacctcaatatttacactcctgctgacttgaccaagaaaaacaggctgccggtgatggtgtggatccacggaggggggctgatggtgggtgcggcatcaacctatgatgggctggcccttgctgcccatgaaaacgtggtggtggtgaccattcaatatcgcctgggcatctggggattcttcagcacaggggatgaacacagccgggggaactggggtcacctggaccaggtggctgccctgcgctgggtccaggacaacattgccagctttggagggaacccaggctctgtgaccatctttggagagtcagcgggaggagaaagtgtctctgttcttgttttgtctccattggccaagaacctcttccaccgggccatttctgagagtggcgtggccctcacttctgttctggtgaagaaaggtgatgtcaagcccttggctgagcaaattgctatcactgctgggtgcaaaaccaccacctctgctgtcatggttcactgcctgcgacagaagacggaagaggagctcttggagacgacattgaaaatgaaattcttatctctggacttacagggagaccccagagagagtcaaccccttctgggcactgtgattgatgggatgctgctgctgaaaacacctgaagagcttcaagctgaaaggaatttccacactgtcccctacatggtcggaattaacaagcaggagtttggctggttgattccaatgcagttgatgagctatccactctccgaagggcaactggaccagaagacagccatgtcactcctgtggaagtcctatccccttgtttgcattgctaaggaactgattccagaagccactgagaaatacttaggaggaacagacgacactgtcaaaaagaaagacctgttcctggacttgatagcagatgtgatgtttggtgtcccatctgtgattgtggcccggaaccacagagatgctggagcacccacctacatgtatgagtttcagtaccgtccaagcttctcatcagacatgaaacccaagacggtgataggagaccacggggatgagctcttctccgtctttggggccccatttttaaaagagggtgcctcagaagaggagatcagacttagcaagatggtgatgaaattctgggccaactttgctcgcaatggaaaccccaatggggaagggctgccccactggccagagtacaaccagaaggaagggtatctgcagattggtgccaacacccaggcggcccagaagctgaaggacaaagaagtagctttctggaccaacctctttgccaagaaggcagtggagaagccaccccagacagaacacatagagctgtgaatgaagatccagccggccttgggagcctggaggagcaaagactggggtcttttgcgaaagggattgcaggttcagaaggcatcttaccatggctggggaattgtctggtggtggggggcaggggacagaggccatgaaggagcaagttttgtatttgtgacctcagctttgggaataaaggatcttttgaaggcc

SEQ ID NO: 114234 - DNA, 1997 bp, Homo sapiens
  Payload ID: 2329
  Gene Symbol: CES1
  Gene Name: carboxylesterase 1
  Uniprot ID: P23141
  ENST ID: ENST00000574513
  CDS Start-End: 96-1802
aactctgggcggggctgggcgccagggctggacagcacagtccctctgagctgcacggagacctcgcaggcccccggaactgtcgcccttccaggatgtggctccctgctcttgtcctggccactctcgctgcttccgcggcttgggcagggcatccgtcctcgccacctgtggtggacaccgtgcatggcaaagtgctggggaagttcgtcagcttagaaggatttgcacagcctgtggccattttcctgggaatcccttttgccaagccgcctcttggacccctgaggtttactccaccgcagcctgcagaaccatggagctttgtgaagaatgccacctcgtaccctcctatgtgcacccaagatcccaaggcggggcagttactctcagagctatttacaaaccgaaaggagaacattcctctcaagctttctgaagactgtctttacctcaatatttacactcctgctgacttgaccaagaaaaacaggctgccggtgatggtgtggatccacggaggggggctgatggtgggtgcggcatcaacctatgatgggctggcccttgctgcccatgaaaacgtggtggtggtgaccattcaatatcgcctgggcatctggggattcttcagcacaggggatgaacacagccgggggaactggggtcacctggaccaggtggctgccctgcgctgggtccaggacaacattgccagctttggagggaacccaggctctgtgaccatctttggagagtcagcgggaggagaaagtgtctctgttcttgttttgtctccattggccaagaacctcttccaccgggccatttctgagagtggcgtggccctcacttctgttctggtgaagaaaggtgatgtcaagcccttggctgagcaaattgctatcactgctgggtgcaaaaccaccacctctgctgtcatggttcactgcctgcgacagaagacggaagaggagctcttggagacgacattgaaaatgaaattcttatctctggacttacagggagaccccagagagagtcaaccccttctgggcactgtgattgatgggatgctgctgctgaaaacacctgaagagcttcaagctgaaaggaatttccacactgtcccctacatggtcggaattaacaagcaggagtttggctggttgattccaatgcagttgatgagctatccactctccgaagggcaactggaccagaagacagccatgtcactcctgtggaagtcctatccccttgtttgcattgctaaggaactgattccagaagccactgagaaatacttaggaggaacagacgacactgtcaaaaagaaagacctgttcctggacttgatagcagatgtgatgtttggtgtcccatctgtgattgtggcccggaaccacagagatgctggagcacccacctacatgtatgagtttcagtaccgtccaagcttctcatcagacatgaaacccaagacggtgataggagaccacggggatgagctcttctccgtctttggggccccatttttaaaagagggtgcctcagaagaggagatcagacttagcaagatggtgatgaaattctgggccaactttgctcgcaatggaaaccccaatggggaagggctgccccactggccagagtacaaccagaaggaagggtatctgcagattggtgccaacacccaggcggcccagaagctgaaggacaaagaagtagctttctggaccaacctctttgccaagaaggcagtggagaagccaccccagacagaacacatagagctgtgaatgaagatccagccggccttgggagcctggaggagcaaagactggggtcttttgcgaaagggattgcaggttcagaaggcatcttaccatggctggggaattgtctggtggtggggggcaggggacagaggccatgaaggagcaagttttgtatttgtgacctcagctttgggaataaaggatcttttgaaggcc

SEQ ID NO: 114235 - DNA, 3927 bp, Homo sapiens
  Payload ID: 2330
  Gene Symbol: CES2
  Gene Name: carboxylesterase 2
  ENST ID: ENST00000317091
  CDS Start-End: 985-2856
gtcgcgcgagggacacgccgcgttgtgggttctcggcctgaggtgcgagagaagcggtgaccgcggccctggctgctcggacccgggaacatgatggtcgctggagcagaaggcgctgagaagggaccacggcggcgctgggtcgtgcgagccagtagcgggctgaaacgtagaggccagaaccaggtctcagggggcactaaaggcggtcggaggtaatccccacaccgcttcctcctggaagtcaggctggccgggagctcccgtatccaggacggttggtcgcctctggcctggcagggatcctagtgtctcgggacctcccggtgacgcgcctgcctcccctgctgcaccataggcccgggagtacggcgtccccacagcttggaccggcaggggctcgtgaaatgtttgtcaagtggataaatgaccatggccgtggtctccgcgggaggtgaggaaactgaaagccaccgaggaaaaggggggcgctccttaagaagtgccgcggtcacgtgtacgtttcaaaagaatggcgtgactgagtagggaggggaccgcggagaccctcagaccctggactgtaaggagatgaggggccgtgaaggggaacccaggaaactgagtcctgaaagcaaggaggaacttccagaatgaagggcgccgacactccttcctgcctttgctcaagcggttccttcaccccgatcaagttccttcccatttctccatctgggggatcctgaacgtgcacatcctcagagaagccctcctggggtctccaattctagtttattgccccctcctatcgatcccccagcgcgctcatcgggcctgtggacaaggacaggtttgaagagaggattccctggatcgcggaagggctgcaggaatggcacagccccttccgaggatgccaaaggagcccgggcaaaggaaagtggccgtgcccgggcctgcctaccactagatccccacccacctatgactgctcagtcccgctctcctaccacacccacctttcccggcccaagccagcgcaccccgctgactccctgcccagtccaaactccaaggctgggcaaggcactgatccactgctggacagacccggggcagcctctgggtgaacagcagcgtgtccgccggcagcgaaccgagaccagcgagccgaccatgcggctgcacagacttcgtgcgcggctgagcgcggtggcctgtgggcttctgctgcttcttgtccggggccagggccaggactcagccagtcccatccggaccacacacacggggcaggtgctggggagtcttgtccatgtgaagggcgccaatgccggggtccaaaccttcctgggaattccatttgccaagccacctctaggtccgctgcgatttgcaccccctgagccccctgaatcttggagtggtgtgagggatggaaccacccatccggccatgtgtctacaggacctcaccgcagtggagtcagagtttcttagccagttcaacatgaccttcccttccgactccatgtctgaggactgcctgtacctcagcatctacacgccggcccatagccatgaaggctctaacctgccggtgatggtgtggatccacggtggtgcgcttgtttttggcatggcttccttgtatgatggttccatgctggctgccttggagaacgtggtggtggtcatcatccagtaccgcctgggtgtcctgggcttcttcagcactggagacaagcacgcaaccggcaactggggctacctggaccaagtggctgcactacgctgggtccagcagaatatcgcccactttggaggcaaccctgaccgtgtcaccatttttggcgagtctgcgggtggcacgagtgtgtcttcgcttgttgtgtcccccatatcccaaggactcttccacggagccatcatggagagtggcgtggccctcctgcccggcctcattgccagctcagctgatgtcatctccacggtggtggccaacctgtctgcctgtgaccaagttgactctgaggccctggtgggctgcctgcggggcaagagtaaagaggagattcttgcaattaacaagcctttcaagatgatccccggagtggtggatggggtcttcctgcccaggcacccccaggagctgctggcctctgccgactttcagcctgtccctagcattgttggtgtcaacaacaatgaattcggctggctcatccccaaggtcatgaggatctatgatacccagaaggaaatggacagagaggcctcccaggctgctctgcagaaaatgttaacgctgctgatgttgcctcctacatttggtgacctgctgagggaggagtacattggggacaatggggatccccagaccctccaagcgcagttccaggagatgatggcggactccatgtttgtgatccctgcactccaagtagcacattttcagtgttcccgggcccctgtgtacttctacgagttccagcatcagcccagctggctcaagaacatcaggccaccgcacatgaaggcagaccatggtgatgagcttccttttgttttcagaagtttctttgggggcaactacattaaattcactgaggaagaggagcagctaagcaggaagatgatgaagtactgggccaactttgcgagaaatgggaaccccaatggcgagggtctgccacactggccgctgttcgaccaggaggagcaatacctgcagctgaacctacagcctgcggtgggccgggctctgaaggcccacaggctccagttctggaagaaggcgctgccccaaaagatccaggagctcgaggagcctgaagagagacacacagagctgtagctccctgtgccggggaggagggggtgggttcgctgacaggcgagggtcagcctgctgtgcccacacacacccactaaggagaaagaagttgattccttcattcacttcgccattcattcatacttccgtccatccattcagaaagcatttattaagaatttactcaggcatgatggcccatacttgtaatcccagctattgggaaggatgagatgggaggatggcttgaggccagaggtttgagaccgaccagccagggcaacacagtgagaccccttctcaaaaaaaaaaaaaaaaaagagagagtgtgtgattagaagctaaataggaaagttttgagcttcaagtcagtgaggagtaaaaaagatttttaaaaagcaaagaaaacaaaatataagggaaaaatatgagaaaaataaaaataaaaagagaataataggccaggcactgtggctcatgcccctaatcccagcacttttgggaggtcaaggtgagcagaacacctgaggacaggagtttgagaccagcctgcccaacgtggtgaaaccccatctctatgaaaaatacaaaaatcagacgggcacagtggtggtgcccacctgtgatcccagctactcaggaggctgaggcaggagaattacttgaacctgggaggcagaggttgcagtgagctgagattgtgccactgtactccagcctgggcaacaagagcgagactccgtttccaaaaaaataagagagaatagaagaagctactgcatgatgttagttaccaagcctgccatgggtcctctcttgctagacacactccatagatccccccactgagctgtggatgggcaaaccccggtggaatcccaccctccccaacaccccactgagccctgggccccctcctcccttcctcacctccaccttctccctgccttctctcttctctcgtctgagcccccaggccttttccactttgagggaggtgcttcgaagaatgttgcccacacctaagtgttagaagcctatgtccgttcatccctgagaggtctgaaagaataaaaataaattctaaaaaaa

SEQ ID NO: 114236 - DNA, 3868 bp, Homo sapiens
  Payload ID: 2330
  Gene Symbol: CES2
  Gene Name: carboxylesterase 2
  Uniprot ID: O00748
  ENST ID: ENST00000417689
  CDS Start-End: 1001-2824
gtggcgtggcgacggagtcgcgcgagggacacgccgcgttgtgggttctcggcctgaggtgcgagagaagcggtgaccgcggccctggctgctcggacccgggaacatgatggtcgctggagcagaaggcgctgagaagggaccacggcggcgctgggtcgtgcgagccagtagcgggctgaaacgtagaggccagaaccaggtctcagggggcactaaaggcggtcggaggtaatccccacaccgcttcctcctggaagtcaggctggccgggagctcccgtatccaggacggttggtcgcctctggcctggcagggatcctagtgtctcgggacctcccggtgacgcgcctgcctcccctgctgcaccataggcccgggagtacggcgtccccacagcttggaccggcaggggctcgtgaaatgtttgtcaagtggataaatgaccatggccgtggtctccgcgggaggtgaggaaactgaaagccaccgaggaaaaggggggcgctccttaagaagtgccgcggtcacgtgtacgtttcaaaagaatggcgtgactgagtagggaggggaccgcggagaccctcagaccctggactgtaaggagatgaggggccgtgaaggggaacccaggaaactgagtcctgaaagcaaggaggaacttccagaatgaagggcgccgacactccttcctgcctttgctcaagcggttccttcaccccgatcaagttccttcccatttctccatctgggggatcctgaacgtgcacatcctcagagaagccctcctggggtctccaattctagtttattgccccctcctatcgatcccccagcgcgctcatcgggcctgtggacaaggacaggtttgaagagaggattccctggatcgcggaagggctgcaggaatggcacagccccttccgaggatgccaaaggagcccgggcaaaggaaagtggccgtgcccgggcctgcctaccactagatccccacccacctatgactgctcagtcccgctctcctaccacacccacctttcccggcccaagccagcgcaccccgctgactccctgcccagtccaaactccaaggctgggcaaggcactgatccactgctggacagacccggggcagcctctgggtgaacagcagcgtgtccgccggcagcgaaccgagaccagcgagccgaccatgcggctgcacagacttcgtgcgcggctgagcgcggtggcctgtgggcttctgctgcttcttgtccggggccagggccaggactcagccagtcccatccggaccacacacacggggcaggtgctggggagtcttgtccatgtgaagggcgccaatgccggggtccaaaccttcctgggaattccatttgccaagccacctctaggtccgctgcgatttgcaccccctgagccccctgaatcttggagtggtgtgagggatggaaccacccatccggccatgtgtctacaggacctcaccgcagtggagtcagagtttcttagccagttcaacatgaccttcccttccgactccatgtctgaggactgcctgtacctcagcatctacacgccggcccatagccatgaaggctctaacctgccggtgatggtgtggatccacggtggtgcgcttgtttttggcatggcttccttgtatgatggttccatgctggctgccttggagaacgtggtggtggtcatcatccagtaccgcctgggtgtcctgggcttcttcagcactggagacaagcacgcaaccggcaactggggctacctggaccaagtggctgcactacgctgggtccagcagaatatcgcccactttggaggcaaccctgaccgtgtcaccatttttggcgagtctgcgggtggcacgagtgtgtcttcgcttgttgtgtcccccatatcccaaggactcttccacggagccatcatggagagtggcgtggccctcctgcccggcctcattgccagctcagctgatgtcatctccacggtggtggccaacctgtctgcctgtgaccaagttgactctgaggccctggtgggctgcctgcggggcaagagtaaagaggagattcttgcaattaacaagcctttcaagatgatccccggagtggtggatggggtcttcctgcccaggcacccccaggagctgctggcctctgccgactttcagcctgtccctagcattgttggtgtcaacaacaatgaattcggctggctcatccccaaggtcatgaggatctatgatacccagaaggaaatggacagagaggcctcccaggctgctctgcagaaaatgttaacgctgctgatgttgcctcctacatttggtgacctgctgagggaggagtacattggggacaatggggatccccagaccctccaagcgcagttccaggagatgatggcggactccatgtttgtgatccctgcactccaagtagcacattttcagtgttcccgggcccctgtgtacttctacgagttccagcatcagcccagctggctcaagaacatcaggccaccgcacatgaaggcagaccatgttaaattcactgaggaagaggagcagctaagcaggaagatgatgaagtactgggccaactttgcgagaaatgggaaccccaatggcgagggtctgccacactggccgctgttcgaccaggaggagcaatacctgcagctgaacctacagcctgcggtgggccgggctctgaaggcccacaggctccagttctggaagaaggcgctgccccaaaagatccaggagctcgaggagcctgaagagagacacacagagctgtagctccctgtgccggggaggagggggtgggttcgctgacaggcgagggtcagcctgctgtgcccacacacacccactaaggagaaagaagttgattccttcattcacttcgccattcattcatacttccgtccatccattcagaaagcatttattaagaatttactcaggcatgatggcccatacttgtaatcccagctattgggaaggatgagatgggaggatggcttgaggccagaggtttgagaccgaccagccagggcaacacagtgagaccccttctcaaaaaaaaaaaaaaaaaagagagagtgtgtgattagaagctaaataggaaagttttgagcttcaagtcagtgaggagtaaaaaagatttttaaaaagcaaagaaaacaaaatataagggaaaaatatgagaaaaataaaaataaaaagagaataataggccaggcactgtggctcatgcccctaatcccagcacttttgggaggtcaaggtgagcagaacacctgaggacaggagtttgagaccagcctgcccaacgtggtgaaaccccatctctatgaaaaatacaaaaatcagacgggcacagtggtggtgcccacctgtgatcccagctactcaggaggctgaggcaggagaattacttgaacctgggaggcagaggttgcagtgagctgagattgtgccactgtactccagcctgggcaacaagagcgagactccgtttccaaaaaaataagagagaatagaagaagctactgcatgatgttagttaccaagcctgccatgggtcctctcttgctagacacactccatagatccccccactgagctgtggatgggcaaaccccggtggaatcccaccctccccaacaccccactgagccctgggccccctcctcccttcctcacctccaccttctccctgccttctctcttctctcgtctgagcccccaggccttttccactttgagggaggtgcttcgaagaatgttgcccacacctaagtgttagaagcctatgtccgttcatccctgagaggtctg

SEQ ID NO: 114237 - DNA, 3391 bp, Homo sapiens
  Payload ID: 2330
  Gene Symbol: CES2
  Gene Name: carboxylesterase 2
  ENST ID: ENST00000568470
  CDS Start-End: 974-1342
gacacgccgcgttgtgggttctcggcctgaggtgcgagagaagcggtgaccgcggccctggctgctcggacccgggaacatgatggtcgctggagcagaaggcgctgagaagggaccacggcggcgctgggtcgtgcgagccagtagcgggctgaaacgtagaggccagaaccaggtctcagggggcactaaaggcggtcggaggtaatccccacaccgcttcctcctggaagtcaggctggccgggagctcccgtatccaggacggttggtcgcctctggcctggcagggatcctagtgtctcgggacctcccggtgacgcgcctgcctcccctgctgcaccataggcccgggagtacggcgtccccacagcttggaccggcaggggctcgtgaaatgtttgtcaagtggataaatgaccatggccgtggtctccgcgggaggtgaggaaactgaaagccaccgaggaaaaggggggcgctccttaagaagtgccgcggtcacgtgtacgtttcaaaagaatggcgtgactgagtagggaggggaccgcggagaccctcagaccctggactgtaaggagatgaggggccgtgaaggggaacccaggaaactgagtcctgaaagcaaggaggaacttccagaatgaagggcgccgacactccttcctgcctttgctcaagcggttccttcaccccgatcaagttccttcccatttctccatctgggggatcctgaacgtgcacatcctcagagaagccctcctggggtctccaattctagtttattgccccctcctatcgatcccccagcgcgctcatcgggcctgtggacaaggacaggtttgaagagaggattccctggatcgcggaagggctgcaggaatggcacagccccttccgaggatgccaaaggagcccgggcaaaggaaagtggccgtgcccgggcctgcctaccactagatccccacccacctatgactgctcagtcccgctctcctaccacacccacctttcccggcccaagccagcgcaccccgctgactccctgcccagtccaaactccaaggctgggcaaggcactgatccactgctggacagacccggggcagcctctgggtgaacagcagcgtgtccgccggcagcgaaccgagaccagcgagccgaccatgcggctgcacagacttcgtgcgcggctgagcgcggtggcctgtgggcttctgctgcttcttgtccggggccagggtgaggctccctcggaggggcgacagggaccgggctcagatctgccaaatgctgcggaggcagaacctgacagtgcgggagggcaggcgcctgggaggtaggagctggtggagatgacagcgtggaactcgtgagccccacgcaacgcctccccgccgcccaaggtgggctcctagaagcacagaaagggtcgggctgggggacaccacggcaaggaaccagcggagtacaggggccccaggagcgccgggacatgccaggccgggccaggactcagccagtcccatccggaccacacacacggggcaggtgctggggagtcttgtccatgtgaagggcgccaatgccggggtccaaaccttcctgggaattccatttgccaagccacctctaggtccgctgcgatttgcaccccctgagccccctgaatcttggagtggtgtgagggatggaaccacccatccggccatgtgtctacaggacctcaccgcagtggagtcagagtttcttagccagttcaacatgaccttcccttccgactccatgtctgaggactgcctgtacctcagcatctacacgccggcccatagccatgaaggctctaacctgccggtgatggtgtggatccacggtggtgcgcttgtttttggcatggcttccttgtatgatggttccatgctggctgccttggagaacgtggtggtggtcatcatccagtaccgcctgggtgtcctgggcttcttcagcactggagacaagcacgcaaccggcaactggggctacctggaccaagtggctgcactacgctgggtccagcagaatatcgcccactttggaggcaaccctgaccgtgtcaccatttttggcgagtctgcgggtggcacgagtgtgtcttcgcttgttgtgtcccccatatcccaaggactcttccacggagccatcatggagagtggcgtggccctcctgcccggcctcattgccagctcagctgatgtcatctccacggtggtggccaacctgtctgcctgtgaccaagttgactctgaggccctggtgggctgcctgcggggcaagagtaaagaggagattcttgcaattaacaagcctttcaagatgatccccggagtggtggatggggtcttcctgcccaggcacccccaggagctgctggcctctgccgactttcagcctgtccctagcattgttggtgtcaacaacaatgaattcggctggctcatccccaaggtcatgaggatctatgatacccagaaggaaatggacagagaggcctcccaggctgctctgcagaaaatgttaacgctgctgatgttgcctcctacatttggtgacctgctgagggaggagtacattggggacaatggggatccccagaccctccaagcgcagttccaggagatgatggcggactccatgtttgtgatccctgcactccaagtagcacattttcagtgttcccgggcccctgtgtacttctacgagttccagcatcagcccagctggctcaagaacatcaggccaccgcacatgaaggcagaccatggtgatgagcttccttttgttttcagaagtttctttgggggcaactacattaaattcactgaggaagaggagcagctaagcaggaagatgatgaagtactgggccaactttgcgagaaatgggaaccccaatggcgagggtctgccacactggccgctgttcgaccaggaggagcaatacctgcagctgaacctacagcctgcggtgggccgggctctgaaggcccacaggctccagttctggaagaaggcgctgccccaaaagatccaggagctcgaggagcctgaagagagacacacagagctgtagctccctgtgccggggaggagggggtgggttcgctgacaggcgagggtcagcctgctgtgcccacacacacccactaaggagaaagaagttgattccttcattcacttcgccattcattcatacttccgtccatccattcagaaagcatttattaagaatttactcaggcatgatggcccatacttgtaatcccagctattgggaaggatgagatgggaggatggcttgaggccagaggtttgagaccgaccagccagggcaacacagtgagaccccttctc

SEQ ID NO: 114238 - DNA, 739 bp, Homo sapiens
  Payload ID: 2330
  Gene Symbol: CES2
  Gene Name: carboxylesterase 2
  ENST ID: ENST00000570032
  CDS Start-End: 110-478
gcggaagggctgcaggaatggcacagccccttccgaggatgccaaaggagcccgggcaaaggaaagtggccgtgcccgggcctgcctaccactagatccccacccacctatgactgctcagtcccgctctcctaccacacccacctttcccggcccaagccagcgcaccccgctgactccctgcccagtccaaactccaaggctgggcaaggcactgatccactgctggacagacccggggcagcctctgggtgaacagcagcgtgtccgccggcagcgaaccgagaccagcgagccgaccatgcggctgcacagacttcgtgcgcggctgagcgcggtggcctgtgggcttctgctgcttcttgtccggggccagggtgaggctccctcggaggggcgacagggaccgggctcagatctgccaaatgctgcggaggcagaacctgacagtgcgggagggcaggcgcctgggaggtaggagctggtggagatgacagcgtggaactcgtgagccccacgcaacgcctccccgccgcccaaggccaggactcagccagtcccatccggaccacacacacggggcaggtgctggggagtcttgtccatgtgaagggcgccaatgccggggtccaaaccttcctgggaattccatttgccaagccacctctaggtccgctgcgatttgcaccccctgagccccctgaatcttggagtggtgtgagggatggaaccacccatc

SEQ ID NO: 114239 - DNA, 891 bp, Homo sapiens
  Payload ID: 2330
  Gene Symbol: CES2
  Gene Name: carboxylesterase 2
  ENST ID: ENST00000566182
  CDS Start-End: 827-891
cgccgcgttgtgggttctcggcctgaggtgcgagagaagcggtgaccgcggccctggctgctcggacccgggaacatgatggtcgctggagcagaaggcgctgagaagggaccacggcggcgctgggtcgtgcgagccagtagcgggctgaaacgtagaggccagaaccaggtctcagggggcactaaaggcggtcggaggcccgggagtacggcgtccccacagcttggaccggcaggggctcgtgaaatgtttgtcaagtggataaatgaccatggccgtggtctccgcgggaggtgaggaaactgaaagccaccgaggaaaaggggggcgctccttaagaagtgccgcggtcacgtgtacgtttcaaaagaatggcgtgactgagtagggaggggaccgcggagaccctcagaccctggactgtaaggagatgaggggccgtgaaggggaacccaggaaactgagtcctgaaagcaaggaggaacttccagaatgaagggcgccgacactccttcctgcctttgctcaagcggttccttcaccccgatcaagttccttcccatttctccatctgggggatcctgaacgtgcacatcctcagagaagccctcctggggtctccaattctagtttattgccccctcctatcgatcccccagcgcgctcatcgggcctgtggacaaggacaggtttgaagagaggattccctggatcgcggaagggctgcaggaatggcacagccccttccgaggatgccaaaggagcccgggcaaaggaaagtggccgtgcccgggcctgcctaccactagatccccacccacctatgactgctcagtcccgctctcctaccacacccacctttcccggcccaagccagcgcaccccgct

SEQ ID NO: 114240 - DNA, 918 bp, Homo sapiens
  Payload ID: 2330
  Gene Symbol: CES2
  Gene Name: carboxylesterase 2
  ENST ID: ENST00000561697
  CDS Start-End: 543-918
cggagtcgcgcgagggacacgccgcgttgtgggttctcggcctgaggtgcgagagaagcggtgaccgcggccctggctgctcggacccgggaacatgatggtcgctggagcagaaggcgctgagaagggaccacggcggcgctgggtcgtgcgagccagtagcgggctgaaacgtagaggccagaaccaggtctcagggggcactaaaggcggtcggaggtaatccccacaccgcttcctcctggaagtcaggctggccgggagctcccgtatccaggacggttggtcgcctctggcctggcagggatcctagtgtctcgggacctcccggtgacgcgcctgcctcccctgctgcaccataggcccgggagtacggcgtccccacagcttggaccggcaggggctcgtgaaatgtttgtcaagtggataaatgaccatggccgtggtctccgcgggagccacctctaggtccgctgcgatttgcaccccctgagccccctgaatcttggagtggtgtgagggatggaaccacccatccggccatgtgtctacaggacctcaccgcagtggagtcagagtttcttagccagttcaacatgaccttcccttccgactccatgtctgaggactgcctgtacctcagcatctacacgccggcccatagccatgaaggctctaacctgccggtgatggtgtggatccacggtggtgcgcttgtttttggcatggcttccttgtatgatggttccatgctggctgccttggagaacgtggtggtggtcatcatccagtaccgcctgggtgtcctgggcttcttcagcactggagacaagcacgcaaccggcaactggggctacctggaccaagtggctgcactacgctgggtccagcagaatatcgcccactttggaggcaacc

SEQ ID NO: 114241 - DNA, 862 bp, Homo sapiens
  Payload ID: 2330
  Gene Symbol: CES2
  Gene Name: carboxylesterase 2
  ENST ID: ENST00000564420
  CDS Start-End: 1-605
aagttgactctgaggccctggtgggctgcctgcggggcaagagtaaagaggagattcttgcaattaacaagcctttcaagatgatccccggagtggtggatggggtcttcctgcccaggcacccccaggagctgctggcctctgccgactttcagcctgtccctagcattgttggtgtcaacaacaatgaattcggctggctcatccccaaggtcatgaggatctatgatacccagaaggaaatggacagagaggcctcccaggctgctctgcagaaaatgttaacgctgctgatgttgcctcctacatttggtgacctgctgagggaggagtacattggggacaatggggatccccagaccctccaagcgcagttccaggagatgatggcggactccatgtttgtgatccctgcactccaagtagcacattttcagtgttcccgggcccctgtgtacttctacgagttccagcatcagcccagctggctcaagaacatcaggccaccgcacatgaaggcagaccatgttaaattcactgaggaagaggagcagctaagcaggaagatgatgaagtactgggccaactttgcgagaaatgggtgagacagcacacccctgcctcaacctccccgattgggggacttgtgcccatccagtgctctcctagtctggggtgacctcatgagcacacccgcatccttcatcacatgatggccccttccccagctccgggacccactcagacagggtgggggtgcgtggggcagtggacacgctctatctctccagtctacctggagggtgggcgccagtgctgtgccaccgtcagggcctccctctcagagagagggacacaacag

SEQ ID NO: 114242 - DNA, 3834 bp, Homo sapiens
  Payload ID: 2331
  Gene Symbol: CES3
  Gene Name: carboxylesterase 3
  Uniprot ID: Q6UWW8
  ENST ID: ENST00000303334
  CDS Start-End: 72-1787
gatcggtggtgctgaagggcagggatcttattccaccttctgaagcttctgtcgaaccagttgtaaggagaatggagagagcagtgagagtggagtccggggtcctggtcggggtggtctgtctgctcctggcatgccctgccacagccactgggcccgaagttgctcagcctgaagtagacaccaccctgggtcgtgtgcgaggccggcaggtgggcgtgaagggcacagaccgccttgtgaatgtctttctgggcattccatttgcccagccgccactgggccctgaccggttctcagccccacacccagcacagccctgggagggtgtgcgggatgccagcactgcgcccccaatgtgcctacaagacgtggagagcatgaacagcagcagatttgtcctcaacggaaaacagcagatcttctccgtttcagaggactgcctggtcctcaacgtctatagcccagctgaggtccccgcagggtccggtaggccggtcatggtatgggtccatggaggcgctctgataactggcgctgccacctcctacgatggatcagctctggctgcctatggggatgtggtcgtggttacagtccagtaccgccttggggtccttggcttcttcagcactggagatgagcatgcacctggcaaccagggcttcctagatgtggtagctgctttgcgctgggtgcaagaaaacatcgcccccttcgggggtgacctcaactgtgtcactgtctttggtggatctgccggtgggagcatcatctctggcctggtcctgtccccagtggctgcagggctgttccacagagccatcacacagagtggggtcatcaccaccccagggatcatcgactctcacccttggcccctagctcagaaaatcgcaaacaccttggcctgcagctccagctccccggctgagatggtgcagtgccttcagcagaaagaaggagaagagctggtccttagcaagaagctgaaaaatactatctatcctctcaccgttgatggcactgtcttccccaaaagccccaaggaactcctgaaggagaagcccttccactctgtgcccttcctcatgggtgtcaacaaccatgagttcagctggctcatccccaggggctggggtctcctggatacaatggagcagatgagccgggaggacatgctggccatctcaacacccgtcttgaccagtctggatgtgccccctgagatgatgcccaccgtcatagatgaatacctaggaagcaactcggacgcacaagccaaatgccaggcgttccaggaattcatgggtgacgtattcatcaatgttcccaccgtcagtttttcaagataccttcgagattctggaagccctgtctttttctatgagttccagcatcgacccagttcttttgcgaagatcaaacctgcctgggtgaaggctgatcatggggccgagggtgcttttgtgttcggaggtcccttcctcatggacgagagctcccgcctggcctttccagaggccacagaggaggagaagcagctaagcctcaccatgatggcccagtggacccactttgcccggacaggggaccccaatagcaaggctctgcctccttggccccaattcaaccaggcggaacaatatctggagatcaacccagtgccacgggccggacagaagttcagggaggcctggatgcagttctggtcagagacgctccccagcaagatacaacagtggcaccagaagcagaagaacaggaaggcccaggaggacctctgaggccaggcctgaaccttcttggctggggcaaaccactcttcaagtggtggcagagtcccagcacggcagcccgcctctccccctgctgagactttaatctccaccagcccttaaagtgtcggccgctctgtgactggagttatgctcttttgaaatgtcacaaggccgcctcccacctctggggcattgtacaagttcttccctctccctgaagtgcctttcctgctttcttcgtggtaggttctagcacattcctctagcttcctggaggactcactcccccaggaagccttccctgccttctctgggctgtgcggccccgagtctgcgtccattagagcacagtccacccgaggctagcaccgtgtctgtgtctgtctccccctcagaggagctctctcaaaatggggattagcctaaccccactctgtcacccacaccaggatcgggtgggacctggagctagggggtgtttgctgagtgagtgagtgaaacacagaatatgggaatggcagctgctgaacttgaacccagagccttcaggtgccaaagccatactcaggcccccaccgacattgtccaccctggccagaagggtgcatgccaatggcagagacctgggatgggagaagtcctggggcgccaggggatccagcctagagcagaccttagcccctgactaaggcctcagactagggcgggaggggtctcctcctctctgctgcccagtcctggcccctgcacaagacaacagaatccatcagggccatgagtgtcacccagacctgaccctcaccaattccagccctgaccctcaggacgctggatgccagctcccagccccagtgccgggtcctccctcccttcctggcttggggagaccagtttctggggagcttccaagagcacccaccaagacacagcaggacaggccaggggagggcatctggaccagggcatccgtcgggctattgtcacagagaaaagaagagacccacccactcgggctgcaaaaggtgaaaagcaccaagaggttttcagatggaagtgagaggtgacagtgtgctggcagccctcacagccctcgcttgctctccctgccgcctctgcctgggctcccactttggcagcacttgaggagcccttcaacccgccgctgcactgtaggagcccctttctgggctggccaaggccggagccagctccctcagcttgcggggaggtgcggagggagaggggcgggcaggaaccggggctgcgcgcagcgcttgcgggccagagtgagttccgggtgggcgtgggctcggcggggccccactcagagcagctggccggccccaggcagtgagggccttagcacctgggccagcagctgctgtgctcgatttctcgctgggccttagctgcctccccgcggggcagggctcgggacctgcagccctccatgcctgaccctccccccaccccccgtgggctcctgtgcggccggagcctccccaaggagcgccgccccctgctccacagcgcccagtcccatcgaccacccaagggctgaggagtgcgggtgcacagcgcgggactggcaggcagctccacctgctgccccagtgctggatccactgggtgaagccagctgggctcctgagtctggtggggacttggagaacctttatgtctagctaagggattgtaaatacaccgatgggcactctgtatctagctcaaggtttgtaaacacaccaatcagcaccctgtgtctagctcagtgtttgtgaatgcaccaatccacactctgtatctggctactctggtggggacttggagaacctttgtgtccacactctgtatctagctaatctagtggggatgtggagaacctttgtgtctagctcagggatcgtaaacgcaccaatcagcaccctgtcaaaacagaccacttgactctctgtaaaatggaccaatcagcaggatgtgggtggggcgagacaagagaataaaagcaggctgcctgagccagcagtgacaacccccctcgggtcccctccca

SEQ ID NO: 114243 - DNA, 3817 bp, Homo sapiens
  Payload ID: 2331
  Gene Symbol: CES3
  Gene Name: carboxylesterase 3
  ENST ID: ENST00000394037
  CDS Start-End: 64-1770
gtgctgaagggcagggatcttattccaccttctgaagcttctgtcgaaccagttgtaaggagaatggagagagcagtgagagtggagtccggggtcctggtcggggtggtctgtctgctcctggcatgccctgccacagccactgggcccgaagttgctcagcctgaagtagacaccaccctgggtcgtgtgcgaggccggcaggtgggcgtgaagggcacagaccgccttgtgaatgtctttctgggcattccatttgcccagccgccactgggccctgaccggttctcagccccacacccagcacagccctgggagggtgtgcgggatgccagcactgcgcccccaatgtgcctacaagacgtggagagcatgaacagcagcagatttgtcctcaacggaaaacagcagatcttctccgtttcagaggactgcctggtcctcaacgtctatagcccagctgaggtccccgcagggtccggtaggccggtcatggtatgggtccatggaggcgctctgataactggcgctgccacctcctacgatggatcagctctggctgcctatggggatgtggtcgtggttacagtccagtaccgccttggggtccttggcttcttcagcactggagatgagcatgcacctggcaaccagggcttcctagatgtggtagctgctttgcgctgggtgcaagaaaacatcgcccccttcgggggtgacctcaactgtgtcactgtctttggtggatctgccggtgggagcatcatctctggcctggtcctgtccccagtggctgcagggctgttccacagagccatcacacagagtggggtcatcaccaccccagggatcatcgactctcacccttggcccctagctcagaaaatcgcaaacaccttggcctgcagctccagctccccggctgagatggtgcagtgccttcagcagaaagaaggagaagagctggtccttagcaagaagctgaaaaatactatctatcctctcaccgttgatggcactgtcttccccaaaagccccaaggaactcctgaaggagaagcccttccactctgtgcccttcctcatgggtgtcaacaaccatgagttcagctggctcatccccaggggctggggtctcctggatacaatggagcagatgagccgggaggacatgctggccatctcaacacccgtcttgaccagtctggatgtgccccctgagatgatgcccaccgtcatagatgaatacctaggaagcaactcggacgcacaagccaaatgccaggcgttccaggaattcatgggtgacgtattcatcaatgttcccaccgtcagtttttcaagataccttcgagattctggaagccctgtctttttctatgagttccagcatcgacccagttcttttgcgaagatcaaacctgcctgggtgaaggctgatcatggggccgagggtgcttttgtgttcggaggtcccttcctcatggacgagagctcccgcctggaggccacagaggaggagaagcagctaagcctcaccatgatggcccagtggacccactttgcccggacaggggaccccaatagcaaggctctgcctccttggccccaattcaaccaggcggaacaatatctggagatcaacccagtgccacgggccggacagaagttcagggaggcctggatgcagttctggtcagagacgctccccagcaagatacaacagtggcaccagaagcagaagaacaggaaggcccaggaggacctctgaggccaggcctgaaccttcttggctggggcaaaccactcttcaagtggtggcagagtcccagcacggcagcccgcctctccccctgctgagactttaatctccaccagcccttaaagtgtcggccgctctgtgactggagttatgctcttttgaaatgtcacaaggccgcctcccacctctggggcattgtacaagttcttccctctccctgaagtgcctttcctgctttcttcgtggtaggttctagcacattcctctagcttcctggaggactcactcccccaggaagccttccctgccttctctgggctgtgcggccccgagtctgcgtccattagagcacagtccacccgaggctagcaccgtgtctgtgtctgtctccccctcagaggagctctctcaaaatggggattagcctaaccccactctgtcacccacaccaggatcgggtgggacctggagctagggggtgtttgctgagtgagtgagtgaaacacagaatatgggaatggcagctgctgaacttgaacccagagccttcaggtgccaaagccatactcaggcccccaccgacattgtccaccctggccagaagggtgcatgccaatggcagagacctgggatgggagaagtcctggggcgccaggggatccagcctagagcagaccttagcccctgactaaggcctcagactagggcgggaggggtctcctcctctctgctgcccagtcctggcccctgcacaagacaacagaatccatcagggccatgagtgtcacccagacctgaccctcaccaattccagccctgaccctcaggacgctggatgccagctcccagccccagtgccgggtcctccctcccttcctggcttggggagaccagtttctggggagcttccaagagcacccaccaagacacagcaggacaggccaggggagggcatctggaccagggcatccgtcgggctattgtcacagagaaaagaagagacccacccactcgggctgcaaaaggtgaaaagcaccaagaggttttcagatggaagtgagaggtgacagtgtgctggcagccctcacagccctcgcttgctctccctgccgcctctgcctgggctcccactttggcagcacttgaggagcccttcaacccgccgctgcactgtaggagcccctttctgggctggccaaggccggagccagctccctcagcttgcggggaggtgcggagggagaggggcgggcaggaaccggggctgcgcgcagcgcttgcgggccagagtgagttccgggtgggcgtgggctcggcggggccccactcagagcagctggccggccccaggcagtgagggccttagcacctgggccagcagctgctgtgctcgatttctcgctgggccttagctgcctccccgcggggcagggctcgggacctgcagccctccatgcctgaccctccccccaccccccgtgggctcctgtgcggccggagcctccccaaggagcgccgccccctgctccacagcgcccagtcccatcgaccacccaagggctgaggagtgcgggtgcacagcgcgggactggcaggcagctccacctgctgccccagtgctggatccactgggtgaagccagctgggctcctgagtctggtggggacttggagaacctttatgtctagctaagggattgtaaatacaccgatgggcactctgtatctagctcaaggtttgtaaacacaccaatcagcaccctgtgtctagctcagtgtttgtgaatgcaccaatccacactctgtatctggctactctggtggggacttggagaacctttgtgtccacactctgtatctagctaatctagtggggatgtggagaacctttgtgtctagctcagggatcgtaaacgcaccaatcagcaccctgtcaaaacagaccacttgactctctgtaaaatggaccaatcagcaggatgtgggtggggcgagacaagagaataaaagcaggctgcctgagccagcagtgacaacccccctcgggtcccctccca

SEQ ID NO: 114244 - DNA, 3178 bp, Homo sapiens
  Payload ID: 2331
  Gene Symbol: CES3
  Gene Name: carboxylesterase 3
  Uniprot ID: Q6UWW8
  ENST ID: ENST00000543856
  CDS Start-End: 447-1079
gtgtgactctgtgccagagcaattgactaaaactctcaggttttagatatcaagccaccggggacttcatgagccaagtcccttccattcctttccaggtgcatagaacttcccacaagagtgtcagcactgtgctttcatcccgagcatcttgtttctgtcattcttattcttctacccatcttcacagcaatcattttcttcacttttctttttttttttttttcgtcttggcccattgcacaccctaagacaaagcaatccatttttgttgttgttgttgtttgtgtgtttgtttgttttttgagacagagcctcgatccatcatccaggctgcagtgcagcagcgccatcatgactctctactgcctcaacctctcaggcccgagcaatcctcccagcttcctgagtagctcgggcctcagggctggggtctcctggatacaatggagcagatgagccgggaggacatgctggccatctcaacacccgtcttgaccagtctggatgtgccccctgagatgatgcccaccgtcatagatgaatacctaggaagcaactcggacgcacaagccaaatgccaggcgttccaggaattcatgggtgacgtattcatcaatgttcccaccgtcagtttttcaagataccttcgagattctggaagccctgtctttttctatgagttccagcatcgacccagttcttttgcgaagatcaaacctgcctgggtgaaggctgatcatggggccgagggtgcttttgtgttcggaggtcccttcctcatggacgagagctcccgcctggcctttccagaggccacagaggaggagaagcagctaagcctcaccatgatggcccagtggacccactttgcccggacaggggaccccaatagcaaggctctgcctccttggccccaattcaaccaggcggaacaatatctggagatcaacccagtgccacgggccggacagaagttcagggaggcctggatgcagttctggtcagagacgctccccagcaagatacaacagtggcaccagaagcagaagaacaggaaggcccaggaggacctctgaggccaggcctgaaccttcttggctggggcaaaccactcttcaagtggtggcagagtcccagcacggcagcccgcctctccccctgctgagactttaatctccaccagcccttaaagtgtcggccgctctgtgactggagttatgctcttttgaaatgtcacaaggccgcctcccacctctggggcattgtacaagttcttccctctccctgaagtgcctttcctgctttcttcgtggtaggttctagcacattcctctagcttcctggaggactcactcccccaggaagccttccctgccttctctgggctgtgcggccccgagtctgcgtccattagagcacagtccacccgaggctagcaccgtgtctgtgtctgtctccccctcagaggagctctctcaaaatggggattagcctaaccccactctgtcacccacaccaggatcgggtgggacctggagctagggggtgtttgctgagtgagtgagtgaaacacagaatatgggaatggcagctgctgaacttgaacccagagccttcaggtgccaaagccatactcaggcccccaccgacattgtccaccctggccagaagggtgcatgccaatggcagagacctgggatgggagaagtcctggggcgccaggggatccagcctagagcagaccttagcccctgactaaggcctcagactagggcgggaggggtctcctcctctctgctgcccagtcctggcccctgcacaagacaacagaatccatcagggccatgagtgtcacccagacctgaccctcaccaattccagccctgaccctcaggacgctggatgccagctcccagccccagtgccgggtcctccctcccttcctggcttggggagaccagtttctggggagcttccaagagcacccaccaagacacagcaggacaggccaggggagggcatctggaccagggcatccgtcgggctattgtcacagagaaaagaagagacccacccactcgggctgcaaaaggtgaaaagcaccaagaggttttcagatggaagtgagaggtgacagtgtgctggcagccctcacagccctcgcttgctctccctgccgcctctgcctgggctcccactttggcagcacttgaggagcccttcaacccgccgctgcactgtaggagcccctttctgggctggccaaggccggagccagctccctcagcttgcggggaggtgcggagggagaggggcgggcaggaaccggggctgcgcgcagcgcttgcgggccagagtgagttccgggtgggcgtgggctcggcggggccccactcagagcagctggccggccccaggcagtgagggccttagcacctgggccagcagctgctgtgctcgatttctcgctgggccttagctgcctccccgcggggcagggctcgggacctgcagccctccatgcctgaccctccccccaccccccgtgggctcctgtgcggccggagcctccccaaggagcgccgccccctgctccacagcgcccagtcccatcgaccacccaagggctgaggagtgcgggtgcacagcgcgggactggcaggcagctccacctgctgccccagtgctggatccactgggtgaagccagctgggctcctgagtctggtggggacttggagaacctttatgtctagctaagggattgtaaatacaccgatgggcactctgtatctagctcaaggtttgtaaacacaccaatcagcaccctgtgtctagctcagtgtttgtgaatgcaccaatccacactctgtatctggctactctggtggggacttggagaacctttgtgtccacactctgtatctagctaatctagtggggatgtggagaacctttgtgtctagctcagggatcgtaaacgcaccaatcagcaccctgtcaaaacagaccacttgactctctgtaaaatggaccaatcagcaggatgtgggtggggcgagacaagagaataaaagcaggctgcctgagccagcagtgacaacccccctcgggtcccctcccacgccgtggaagctttgttctttcgctctttgcaataaatcttgctactgccc

SEQ ID NO: 114245 - DNA, 887 bp, Homo sapiens
  Payload ID: 2331
  Gene Symbol: CES3
  Gene Name: carboxylesterase 3
  ENST ID: ENST00000566453
  CDS Start-End: 51-173
gggatcttattccaccttctgaagcttctgtcgaaccagttgtaaggagaatggagagagcagtgagagtggagtccggggtcctggtcggggtggtctgtctgctcctggcatgccctgccacagccactggttaccaagatgctgtgtgggcccgaagttgctcagcctgaagtagacaccaccctgggtcgtgtgcgaggccggcaggtgggcgtgaagggcacagaccgccttgtgaatgtctttctgggcattccatttgcccagccgccactgggccctgaccggttctcagccccacacccagcacagccctgggagggtgtgcgggatgccagcactgcgcccccaatgtgcctacaagacgtggagagcatgaacagcagcagatttgtcctcaacggaaaacagcagatcttctccgtttcagaggactgcctggtcctcaacgtctatagcccagctgaggtccccgcagggtccggtaggccggtcatggtatgggtccatggaggcgctctgataactggcgctgccacctcctacgatggatcagctctggctgcctatggggatgtggtcgtggttacagtccagtaccgccttggggtccttggcttcttcagcactggagatgagcatgcacctggcaaccagggcttcctagatgtggtagctgctttgcgctgggtgcaagaaaacatcgcccccttcgggggtgacctcaactgtgtcactgtctttggtggatctgccggtgggagcatcatctctggcctggtcctgtccccagtggctgcagggctgttccacagagccatcacacagagtggggtcatcaccaccccagggatcatcgactctcacccttggcccctagctca

SEQ ID NO: 114246 - DNA, 1826 bp, Homo sapiens
  Payload ID: 2331
  Gene Symbol: CES3
  Gene Name: carboxylesterase 3
  ENST ID: ENST00000570236
  CDS Start-End: 6-1145
ggagaatggagagagcagtgagagtggagtccggggtcctggtcggggtggtctgtctgctcctggcatgccctgccacagccactgggcccgaagttgctcagcctgaagtagacaccaccctgggtcgtgtgcgaggccggcaggtgggcgtgaagggcacagaccgccttgtgaatgtctttctgggcattccatttgcccagccgccactgggccctgaccggttctcagccccacacccagcacagccctgggagggtgtgcgggatgccagcactgcgcccccaatgtgcctacaagacgtggagagcatgaacagcagcagatttgtcctcaacggaaaacagcagatcttctccgtttcagaggactgcctggtcctcaacgtctatagcccagctgaggtccccgcagggtccggtaggccggtcatggtatgggtccatggaggcgctctgataactggcgctgccacctcctacgatggatcagctctggctgcctatggggatgtggtcgtggttacagtccagtaccgccttggggtccttggcttcttcagcactggagatgagcatgcacctggcaaccagggcttcctagatgtggtagctgctttgcgctgggtgcaagaaaacatcgcccccttcgggggtgacctcaactgtgtcactgtctttggtggatctgccggtgggagcatcatctctggcctggtcctgtccccagtggctgcagggctgttccacagagccatcacacagagtggggtcatcaccaccccagggatcatcgactctcacccttggcccctagctcagaaaatcgcaaacaccttggcctgcagctccagctccccggctgagatggtgcagtgccttcagcagaaagaaggagaagagctggtccttagcaagaagctgaaaaatactatctatcctctcaccgttgatggcactgtcttccccaaaagccccaaggaactcctgaaggagaagcccttccactctgtgcccttcctcatgggtgtcaacaaccatgagttcagctggctcatccccaggattctggaagccctgtctttttctatgagttccagcatcgacccagttcttttgcgaagatcaaacctgcctgggtgaaggctgatcatggggccgagggtgcttttgtgttcggaggtcccttcctcatggacgagagctcccgcctggcctttccagaggccacagaggaggagaagcagctaagcctcaccatgatggcccagtggacccactttgcccggacaggggaccccaatagcaaggctctgcctccttggccccaattcaaccaggcggaacaatatctggagatcaacccagtgccacgggccggacagaagttcagggaggcctggatgcagttctggtcagagacgctccccagcaagatacaacagtggcaccagaagcagaagaacaggaaggcccaggaggacctctgaggccaggcctgaaccttcttggctggggcaaaccactcttcaagtggtggcagagtcccagcacggcagcccgcctctccccctgctgagactttaatctccaccagcccttaaagtgtcggccgctctgtgactggagttatgctcttttgaaatgtcacaaggccgcctcccacctctggggcattgtacaagttcttccctctccctgaagtgcctttcctgctttcttcgtggtaggttctagcacattcctctagcttcctggaggactcactcccccaggaagccttccctgccttctctgggctgtgcggccccgagtctgcgtcca

SEQ ID NO: 114247 - DNA, 1958 bp, Homo sapiens
  Payload ID: 2332
  Gene Symbol: CES4A
  Gene Name: carboxylesterase 4A
  ENST ID: ENST00000538199
  CDS Start-End: 1-1365
ggaaaacagatgcatgtggggaagacacccatccaagtctttttaggagtccccttctccagacctcctctaggtatcctcaggtttgcacctccagaacccccggagccctggaaaggaatcagagatgctaccacctacccgcctgggtgcctgcaggagtcctggggccagctggcctcgatgtacgtcagcacgcgggaacggtacaagtggctgcgcttcagcgaggactgtctgtacctgaacgtgtacgcgccggcgcgcgcgcccggggatccccagctgccagtgatggtctggttcccgggaggcgccttcatcgtgggcgctgcttcttcgtacgagggctctgacttggccgcccgcgagaaagtggtgctggtgtttctgcagcacaggctcggcatcttcggcttcctgagcacggacgacagccacgcgcgcgggaactgggggctgctggaccagatggcggctctgcgctgggtgcaggagaacatcgcagccttcgggggagacccaggaaatgtgaccctgttcggccagtcggcgggggccatgagcatctcaggactgatgatgtcacccctagcctcgggtctcttccatcgggccatttcccagagtggcaccgcgttattcagacttttcatcactagtaacccactgaaagtggccaagaaggttgcccacctggctggatgcaaccacaacagcacacagatcctggtaaactgcctgagggcactatcagggaccaaggtgatgcgtgtgtccaacaagatgagattcctccaactgaacttccagagagacccggaagagattatctggtccatgagccctgtggtggatggtgtggtgatcccagatgaccctttggtgctcctgacccaggggaaggtttcatctgtgccctaccttctaggtgtcaacaacctggaattcaattggctcttgccttataatatcaccaaggagcaggtaccacttgtggtggaggagtacctggacaatgtcaatgagcatgactggaagatgctacgaaaccgtatgatggacatagttcaagatgccactttcgtgtatgccacactgcagactgctcactaccaccgaggcctttccatgggtaaggagaaggcacttagcctccagatgatgaaatactgggccaactttgcccgcacaggaaaccccaatgatgggaatctgccctgctggccacgctacaacaaggatgaaaagtacctgcagctggattttaccacaagagtgggcatgaagctcaaggagaagaagatggctttttggatgagtctgtaccagtctcaaagacctgagaagcagaggcaattctaagggtggctatgcaggaaggagccaaagaggggtttgcccccaccatccaggccctggggagactagccatggacatacctggggacaagagttctacccaccccagtttagaactgcaggagctccctgctgcctccaggccaaagctagagcttttgcctgttgtgtgggacctgcactgccctttccagcctgacatcccatgatgcccctctacttcactgttgacatccagttaggccaggccctgtcaacaccacactgtgctcagctctccagcctcaggacaacctctttttttcccttcttcaaatcctcccacccttcaatgtctccttgtgactccttcttatgggaggtcgacccagactgccactgcccctgtcactgcacccagcttggcatttaccatccatcctgctcaaccttgtgcctgtctgttcacattggcctggaggcctagggcaggttgtgacatggagcaaacttttggtagtttgggatcttctctcccacccacacttatctcccccagggccactccaaagtctatacacaggggtggtctcttcaataaagaagtgttgattaga

SEQ ID NO: 114248 - DNA, 1472 bp, Homo sapiens
  Payload ID: 2332
  Gene Symbol: CES4A
  Gene Name: carboxylesterase 4A
  Uniprot ID: Q5XG92
  ENST ID: ENST00000535696
  CDS Start-End: 99-1223
ctcactgcggaccctggattgaaacgatctccccgcggccgccgccgctacctggtgcccgcaggtgcctgcaggagtcctggggccagctggcctcgatgtacgtcagcacgcgggaacggtacaagtggctgcgcttcagcgaggactgtctgtacctgaacgtgtacgcgccggcgcgcgcgcccggggatccccagctgccagtgatggtctggttcccgggaggcgccttcatcgtgggcgctgcttcttcgtacgagggctctgacttggccgcccgcgagaaagtggtgctggtgtttctgcagcacaggctcggcatcttcggcttcctgaggtggcggggccgcacggacgacagccacgcgcgcgggaactgggggctgctggaccagatggcggctctgcgctgggtgcaggagaacatcgcagccttcgggggagacccaggaaatgtgaccctgttcggccagtcggcgggggccatgagcatctcaggactgatgatgtcacccctagcctcgggtctcttccatcgggccatttcccagagtggcaccgcgttattcagacttttcatcactagtaacccactgaaagtggccaagaaggttgcccacctggctggatgcaaccacaacagcacacagatcctggtaaactgcctgagggcactatcagggaccaaggtgatgcgtgtgtccaacaagatgagattcctccaactgaacttccagagagacccggaagagattatctggtccatgagccctgtggtggatggtgtggtgatcccagatgaccctttggtgctcctgacccaggggaaggtttcatctgtgccctaccttctaggtgtcaacaacctggaattcaattggctcttgccttatatcatgaagttcccgctaaaccggcaggcgatgagaaaggaaaccatcactaagatgctctggagtacccgcaccctgttgaatatcaccaaggagcaggtaccacttgtggtggaggagtacctggacaatgtcaatgagcatgactggaagatgctacgaaaccgtatgatggacatagttcaagatgccactttcgtgtatgccacactgcagactgctcactaccaccgagaaaccccaatgatgggaatctgccctgctggccacgctacaacaaggatgaaaagtacctgcagctggattttaccacaagagtgggcatgaagctcaaggagaagaagatggctttttggatgagtctgtaccagtctcaaagacctgagaagcagaggcaattctaagggtggctatgcaggaaggagccaaagaggggtttgcccccaccatccaggccctggggagactagccatggacatacctggggacaagagttctacccaccccagtttagaactgcaggagctccctgctgcctccaggccaaagctagagcttttgcctgttgtgtggga

SEQ ID NO: 114249 - DNA, 1825 bp, Homo sapiens
  Payload ID: 2332
  Gene Symbol: CES4A
  Gene Name: carboxylesterase 4A
  Uniprot ID: Q5XG92
  ENST ID: ENST00000540579
  CDS Start-End: 120-1511
ttttgctttgggttccgtcttctcactgcggaccctggattgaaacgatctccccgcggccgccgccgctacctggtgcccgcaggtgcctgcaggagtcctggggccagctggcctcgatgtacgtcagcacgcgggaacggtacaagtggctgcgcttcagcgaggactgtctgtacctgaacgtgtacgcgccggcgcgcgcgcccggggatccccagctgccagtgatggtctggttcccgggaggcgccttcatcgtgggcgctgcttcttcgtacgagggctctgacttggccgcccgcgagaaagtggtgctggtgtttctgcagcacaggctcggcatcttcggcttcctgagcacggacgacagccacgcgcgcgggaactgggggctgctggaccagatggcggctctgcgctgggtgcaggagaacatcgcagccttcgggggagacccaggaaatgtgaccctgttcggccagtcggcgggggccatgagcatctcaggactgatgatgtcacccctagcctcgggtctcttccatcgggccatttcccagagtggcaccgcgttattcagacttttcatcactagtaacccactgaaagtggccaagaaggttgcccacctggctggatgcaaccacaacagcacacagatcctggtaaactgcctgagggcactatcagggaccaaggtgatgcgtgtgtccaacaagatgagattcctccaactgaacttccagagagacccggaagagattatctggtccatgagccctgtggtggatggtgtggtgatcccagatgaccctttggtgctcctgacccaggggaaggtttcatctgtgccctaccttctaggtgtcaacaacctggaattcaattggctcttgccttatatcatgaagttcccgctaaaccggcaggcgatgagaaaggaaaccatcactaagatgctctggagtacccgcaccctgttgaatatcaccaaggagcaggtaccacttgtggtggaggagtacctggacaatgtcaatgagcatgactggaagatgctacgaaaccgtatgatggacatagttcaagatgccactttcgtgtatgccacactgcagactgctcactaccaccgagatgccggcctccctgtctacctgtatgaatttgagcaccacgctcgtggaataatcgtcaaaccccgcactgatggggcagaccatggggatgagatgtacttcctctttgggggccccttcgccacaggcctttccatgggtaaggagaaggcacttagcctccagatgatgaaatactgggccaactttgcccgcacaggaaaccccaatgatgggaatctgccctgctggccacgctacaacaaggatgaaaagtacctgcagctggattttaccacaagagtgggcatgaagctcaaggagaagaagatggctttttggatgagtctgtaccagtctcaaagacctgagaagcagaggcaattctaagggtggctatgcaggaaggagccaaagaggggtttgcccccaccatccaggccctggggagactagccatggacatacctggggacaagagttctacccaccccagtttagaactgcaggagctccctgctgcctccaggccaaagctagagcttttgcctgttgtgtgggacctgcactgccctttccagcctgacatcccatgatgcccctctacttcactgttgacatccagttaggccaggccctgtcaacaccacactgtgctcagctctccagcctcaggacaacctctttttttcccttcttcaaat

SEQ ID NO: 114250 - DNA, 2284 bp, Homo sapiens
  Payload ID: 2332
  Gene Symbol: CES4A
  Gene Name: carboxylesterase 4A
  Uniprot ID: Q5XG92
  ENST ID: ENST00000540947
  CDS Start-End: 185-1591
agagacaaggctgtgggctggtcagaagctggttacaattcctcccgccccagtacttgctggcagggattaagagcagataaaagtgtgctcacacactgtagacacggctaccatgccatccacagtgttgccatccacagtgttgccatcactcctgcccacagcaggagctggctggagcatgaggtggattctgtgctggagcctcaccctctgcctgatggcgcagacggccttgggtgccttgcacaccaagaggcctcaagtggtcaccaaatatggaaccctgcaaggaaaacagatgcatgtggggaagacacccatccaagtctttttaggagtccccttctccagacctcctctaggtatcctcaggtttgcacctccagaacccccggagccctggaaaggaatcagagatgctaccacctacccgcctgggtgcctgcaggagtcctggggccagctggcctcgatgtacgtcagcacgcgggaacggtacaagtggctgcgcttcagcgaggactgtctgtacctgaacgtgtacgcgccggcgcgcgcgcccggggatccccagctgccagtgatggtctggttcccgggaggcgccttcatcgtgggcgctgcttcttcgtacgagggctctgacttggccgcccgcgagaaagtggtgctggtgtttctgcagcacaggctcggcatcttcggcttcctgagcacggacgacagccacgcgcgcgggaactgggggctgctggaccagatggcggctctgcgctgggtgcaggagaacatcgcagccttcgggggagacccaggaaatgtgaccctgttcggccagtcggcgggggccatgagcatctcaggactgatgatgtcacccctagcctcgggtctcttccatcgggccatttcccagagtggcaccgcgttattcagacttttcatcactagtaacccactgaaagtggccaagaaggttgcccacctggctggatgcaaccacaacagcacacagatcctggtaaactgcctgagggcactatcagggaccaaggtgatgcgtgtgtccaacaagatgagattcctccaactgaacttccagagagacccggaagagattatctggtccatgagccctgtggtggatggtgtggtgatcccagatgaccctttggtgctcctgacccaggggaaggtttcatctgtgccctaccttctaggtgtcaacaacctggaattcaattggctcttgccttatatcatgaagttcccgctaaaccggcaggcgatgagaaaggaaaccatcactaagatgctctggagtacccgcaccctgttgaatatcaccaaggagcaggtaccacttgtggtggaggagtacctggacaatgtcaatgagcatgactggaagatgctacgaaaccgtatgatggacatagttcaagatgccactttcgtgtatgccacactgcagactgctcactaccaccgagaaaccccaatgatgggaatctgccctgctggccacgctacaacaaggatgaaaagtacctgcagctggattttaccacaagagtgggcatgaagctcaaggagaagaagatggctttttggatgagtctgtaccagtctcaaagacctgagaagcagaggcaattctaagggtggctatgcaggaaggagccaaagaggggtttgcccccaccatccaggccctggggagactagccatggacatacctggggacaagagttctacccaccccagtttagaactgcaggagctccctgctgcctccaggccaaagctagagcttttgcctgttgtgtgggacctgcactgccctttccagcctgacatcccatgatgcccctctacttcactgttgacatccagttaggccaggccctgtcaacaccacactgtgctcagctctccagcctcaggacaacctctttttttcccttcttcaaatcctcccacccttcaatgtctccttgtgactccttcttatgggaggtcgacccagactgccactgcccctgtcactgcacccagcttggcatttaccatccatcctgctcaaccttgtgcctgtctgttcacattggcctggaggcctagggcaggttgtgacatggagcaaacttttggtagtttgggatcttctctcccacccacacttatctcccccagggccactccaaagtctatacacaggggtggtctcttcaataaagaagtgttgattagacctgaatttctccacctataaaa

SEQ ID NO: 114251 - DNA, 2178 bp, Homo sapiens
  Payload ID: 2332
  Gene Symbol: CES4A
  Gene Name: carboxylesterase 4A
  ENST ID: ENST00000535543
  CDS Start-End: 121-528
attttgctttgggttccgtcttctcactgcggaccctggattgaaacgatctccccgcggccgccgccgctacctggtgcccgcaggtgcctgcaggagtcctggggccagctggcctcgatgtacgtcagcacgcgggaacggtacaagtggctgcgcttcagcgaggactgtctgtacctgaacgtgtacgcgccggcgcgcgcgcccggggatccccagctgccagtgatggtctggttcccgggaggcgccttcatcgtgggcgctgcttcttcgtacgagggctctgacttggccgcccgcgagaaagtggtgctggtgtttctgcagcacaggctcggcatcttcggcttcctgaggtggcggggccggtaccctttgggaccgcagctgtggccagagcggcggggactggcacggacgacagccacgcgcgcgggaactgggggctgctggaccagatggcggctctgcgctgggtgcaggagaacatcgcagccttcgggggagacccaggaaatgtgaccctgttcggccagtcggcgggggccatgagcatctcaggactgatgatgtcacccctagcctcgggtctcttccatcgggccatttcccagagtggcaccgcgttattcagacttttcatcactagtaacccactgaaagtggccaagaaggttgcccacctggctggatgcaaccacaacagcacacagatcctggtaaactgcctgagggcactatcagggaccaaggtgatgcgtgtgtccaacaagatgagattcctccaactgaacttccagagagacccggaagagattatctggtccatgagccctgtggtggatggtgtggtgatcccagatgaccctttggtgctcctgacccaggggaaggtttcatctgtgccctaccttctaggtgtcaacaacctggaattcaattggctcttgccttatatcatgaagttcccgctaaaccggcaggcgatgagaaaggaaaccatcactaagatgctctggagtacccgcaccctgttgaatatcaccaaggagcaggtaccacttgtggtggaggagtacctggacaatgtcaatgagcatgactggaagatgctacgaaaccgtatgatggacatagttcaagatgccactttcgtgtatgccacactgcagactgctcactaccaccgagatgccggcctccctgtctacctgtatgaatttgagcaccacgctcgtggaataatcgtcaaaccccgcactgatggggcagaccatggggatgagatgtacttcctctttgggggccccttcgccacaggcctttccatgggtaaggagaaggcacttagcctccagatgatgaaatactgggccaactttgcccgcacaggaaaccccaatgatgggaatctgccctgctggccacgctacaacaaggatgaaaagtacctgcagctggattttaccacaagagtgggcatgaagctcaaggagaagaagatggctttttggatgagtctgtaccagtctcaaagacctgagaagcagaggcaattctaagggtggctatgcaggaaggagccaaagaggggtttgcccccaccatccaggccctggggagactagccatggacatacctggggacaagagttctacccaccccagtttagaactgcaggagctccctgctgcctccaggccaaagctagagcttttgcctgttgtgtgggacctgcactgccctttccagcctgacatcccatgatgcccctctacttcactgttgacatccagttaggccaggccctgtcaacaccacactgtgctcagctctccagcctcaggacaacctctttttttcccttcttcaaatcctcccacccttcaatgtctccttgtgactccttcttatgggaggtcgacccagactgccactgcccctgtcactgcacccagcttggcatttaccatccatcctgctcaaccttgtgcctgtctgttcacattggcctggaggcctagggcaggttgtgacatggagcaaacttttggtagtttgggatcttctctcccacccacacttatctcccccagggccactccaaagtctatacacaggggtggtctcttcaataaagaagtgttgattagacctgaatttctccacct

SEQ ID NO: 114252 - DNA, 2062 bp, Homo sapiens
  Payload ID: 2332
  Gene Symbol: CES4A
  Gene Name: carboxylesterase 4A
  ENST ID: ENST00000567587
  CDS Start-End: 1-533
gtgccttgcacaccaagaggcctcaagtggtcaccaaatatggaaccctgcaaggaaaacagatgcatgtggggaagacacccatccaagtctttttaggagtccccttctccagacctcctctaggtatcctcaggtttgcacctccagaacccccggagccctggaaaggaatcagagatgctaccacctacccgcctggatggagtctcgctctgtcgccaggctggagtgcagtggcacgatctcggctcactgcaacctccgcctcccgggttcaagcgagtctcctgcctcagcctctgagtatctggggctacaggtgcctgcaggagtcctggggccagctggcctcgatgtacgtcagcacgcgggaacggtacaagtggctgcgcttcagcgaggactgtctgtacctgaacgtgtacgcgccggcgcgcgcgcccggggatccccagctgccagtgagtgatggtctggttcccgggaggcgccttcatcgtgggcgctgcttcttcgtacgagggctctgacttggccgcccgcgagaaagtggtgctggtgtttctgcagcacaggctcggcatcttcggcttcctgagcacggacgacagccacgcgcgcgggaactgggggctgctggaccagatggcggctctgcgctgggtgcaggagaacatcgcagccttcgggggagacccaggaaatgtgaccctgttcggccagtcggcgggggccatgagcatctcaggactgatgatgtcacccctagcctcgggtctcttccatcgggccatttcccagagtggcaccgcgttattcagacttttcatcactagtaacccactgaaagtggccaagaaggttgcccacctggctggatgcaaccacaacagcacacagatcctggtaaactgcctgagggcactatcagggaccaaggtgatgcgtgtgtccaacaagatgagattcctccaactgaacttccagagagacccggaagagattatctggtccatgagccctgtggtggatggtgtggtgatcccagatgaccctttggtgctcctgacccaggggaaggtttcatctgtgccctaccttctaggtgtcaacaacctggaattcaattggctcttgccttataatatcaccaaggagcaggtaccacttgtggtggaggagtacctggacaatgtcaatgagcatgactggaagatgctacgaaaccgtatgatggacatagttcaagatgccactttcgtgtatgccacactgcagactgctcactaccaccgagaaaccccaatgatgggaatctgccctgctggccacgctacaacaaggatgaaaagtacctgcagctggattttaccacaagagtgggcatgaagctcaaggagaagaagatggctttttggatgagtctgtaccagtctcaaagacctgagaagcagaggcaattctaagggtggctatgcaggaaggagccaaagaggggtttgcccccaccatccaggccctggggagactagccatggacatacctggggacaagagttctacccaccccagtttagaactgcaggagctccctgctgcctccaggccaaagctagagcttttgcctgttgtgtgggacctgcactgccctttccagcctgacatcccatgatgcccctctacttcactgttgacatccagttaggccaggccctgtcaacaccacactgtgctcagctctccagcctcaggacaacctctttttttcccttcttcaaatcctcccacccttcaatgtctccttgtgactccttcttatgggaggtcgacccagactgccactgcccctgtcactgcacccagcttggcatttaccatccatcctgctcaaccttgtgcctgtctgttcacattggcctggaggcctagggcaggttgtgacatggagcaaacttttggtagtttgggatcttctctcccacccacacttatctcccccagggccactccaaagtctatacacaggggtggtctcttcaataaagaagtgttgattaga

SEQ ID NO: 114253 - DNA, 2084 bp, Homo sapiens
  Payload ID: 2333
  Gene Symbol: CES5A
  Gene Name: carboxylesterase 5A
  Uniprot ID: Q6NT32
  ENST ID: ENST00000290567
  CDS Start-End: 123-1850
gctgcctctgcctgcctattcagcatttgcctgttaacaggaagctctttctggctcccaactgaagctctctgaggccagcagccgccgtcaatgttcacagagtgcaggcaggcagccaaatgagtgggaattgggtgcacccaggccagatcctaatttgggctatctgggtccttgcagcccccaccaaagggccttctgctgaagggccacagaggaacaccaggctgggatggattcagggcaagcaagtcactgtgctgggaagccctgtgcctgtgaacgtgttcctcggagtcccctttgctgctcccccgctgggatccctgcgatttacgaacccgcagcctgcatcgccctgggataacttgcgagaagccacctcctaccctaatttgtgcctccagaactcagagtggctgctcttagatcaacatatgctcaaggtgcattacccgaaattcggagtgtcagaagactgcctctacctgaacatctatgcgcctgcccacgccgatacaggctccaagctccccgtcttggtgtggttcccaggaggtgccttcaagactggctcagcctccatctttgatgggtccgccctggctgcctatgaggacgtgctggttgtggtcgtccagtaccggctaggaatatttggtttcttcaccacatgggatcagcatgctccggggaactgggccttcaaggaccaggtggctgctctgtcctgggtccagaagaacatcgagttcttcggtggggaccccagctctgtgaccatctttggcgagtccgcgggagccataagtgtttctagtcttatactgtctcccatggccaaaggcttattccacaaagccatcatggagagtggggtggccatcatcccttacctggaggcccatgattatgagaagagtgaggacctgcaggtggttgcacatttctgtggtaacaatgcgtcagactctgaggccctgctgaggtgcctgaggacaaaaccctccaaggagctgctgaccctcagccagaaaacaaagtctttcactcgagtggttgatggtgctttctttcctaatgagcctctagatctattgtctcagaaagcatttaaagcaattccttccatcatcggagtcaataaccacgagtgtggcttcctgctgcctatgaaggaggctcctgagatcctcagtggctccaacaagtcccttgccctccatctgatacaaaacatcctgcacatcccgcctcagtatttgcaccttgtggctaatgaatacttccatgacaagcactccctgactgaaatccgagacagtcttctggacttgcttggagatgtgttctttgtggtccctgcactgatcacagctcgatatcacagagatgctggtgcacctgtctacttctatgagtttcggcaccggcctcagtgctttgaagacacgaagccagcttttgtcaaagccgaccacgctgatgaagtccgctttgtgttcggtggtgccttcctgaagggggacattgttatgttcgaaggagccacggaggaggagaagttactgagccggaagatgatgaaatactgggctacctttgctcgaaccgggaatcctaatgggaacgacctgtctctgtggccagcttataatctgactgagcagtacctccagctggacttgaacatgagcctcggacagagactcaaagaaccgcgggtggatttttggaccagcaccatccccctgatcctgtctgcctccgacatgctccacagtcctctttcttccttaactttcctctctctcctccagcctttctttttcttttgtgctccttgagaagttatctttctgtgattttggtttcccttctcctcccataatttctcccgcaatcattagcttctttctgagctcagctgctttctatggggatccttgcaaaacaagctgctttcgctgatattttatggacttaggaatgatccttacagaattcttttcaacatcaaaaagtgcaatttgtcttggaaggcaacaagatttcttcaataaatttggaagagggctggc

SEQ ID NO: 114254 - DNA, 2016 bp, Homo sapiens
  Payload ID: 2333
  Gene Symbol: CES5A
  Gene Name: carboxylesterase 5A
  Uniprot ID: Q6NT32
  ENST ID: ENST00000319165
  CDS Start-End: 150-1727
gttctgatgctgatcttcagtaactctgctgcctctgcctgcctattcagcatttgcctgttaacaggaagctctttctggctcccaactgaagctctctgaggccagcagccgccgtcaatgttcacagagtgcaggcaggcagccaaatgagtgggaattgggtgcacccaggccagatcctaatttgggctatctgggtccttgcagcccccaccaaagggccttctgctgaagggccacagaggaacaccaggctgggatggattcagggcaagcaagtcactgtgctgggaagccctgtgcctgtgaacgtgttcctcggagtcccctttgctgctcccccgctgggatccctgcgatttacgaacccgcagcctgcatcgccctgggataacttgcgagaagccacctcctaccctaatttgtgcctccagaactcagagtggctgctcttagatcaacatatgctcaaggtgcattacccgaaattcggagtgtcagaagactgcctctacctgaacatctatgcgcctgcccacgccgatacaggctccaagctccccgtcttggtgtggttcccaggaggtgccttcaagactggctcagcctccatctttgatgggtccgccctggctgcctatgaggacgtgctggttgtggtcgtccagtaccggctaggaatatttggtttcttcaccacatgggatcagcatgctccggggaactgggccttcaaggaccaggtggctgctctgtcctgggtccagaagaacatcgagttcttcggtggggaccccagctctgtgaccatctttggcgagtccgcgggagccataagtgtttctagtcttatactgtctcccatggccaaaggcttattccacaaagccatcatggagagtggggtggccatcatcccttacctggaggcccatgattatgagaagagtgaggacctgcaggtggttgcacatttctgtggtaacaatgcgtcagactctgaggccctgctgaggtgcctgaggacaaaaccctccaaggagctgctgaccctcagccagaaaacaaagtctttcactcgagtggttgatggtgctttctttcctaatgagcctctagatctattgtctcagaaagcatttaaagcaattccttccatcatcggagtcaataaccacgagtgtggcttcctgctgcctatgaaggaggctcctgagatcctcagtggctccaacaagtcccttgccctccatctgatacaaaacatcctgcacatcccgcctcagtatttgcaccttgtggctaatgaatacttccatgacaagcactccctgactgaaatccgagacagtcttctggacttgcttggagatgtgttctttgtggtccctgcactgatcacagctcgatatcacagagaaggagccacggaggaggagaagttactgagccggaagatgatgaaatactgggctacctttgctcgaaccgggaatcctaatgggaacgacctgtctctgtggccagcttataatctgactgagcagtacctccagctggacttgaacatgagcctcggacagagactcaaagaaccgcgggtggatttttggaccagcaccatccccctgatcctgtctgcctccgacatgctccacagtcctctttcttccttaactttcctctctctcctccagcctttctttttcttttgtgctccttgagaagttatctttctgtgattttggtttcccttctcctcccataatttctcccgcaatcattagcttctttctgagctcagctgctttctatggggatccttgcaaaacaagctgctttcgctgatattttatggacttaggaatgatccttacagaattcttttcaacatcaaaaagtgcaatttgtcttggaaggcaacaagatttcttcaataaatttggaagagggctggcctattagttgtcataataatggttttgtaactcatatgaaataaaatcagaatgt

SEQ ID NO: 114255 - DNA, 2092 bp, Homo sapiens
  Payload ID: 2333
  Gene Symbol: CES5A
  Gene Name: carboxylesterase 5A
  Uniprot ID: Q6NT32
  ENST ID: ENST00000518005
  CDS Start-End: 394-1803
aggaaactccaaactgttctccataatggctgtgctaatttacattttcatcaacagtgtacgagggttctccgttttctgcactcttgccagcatccgttttttcctgtctttttgataaaaaccactttaactgggggccttctgctgaagggccacagaggaacaccaggctgggatggattcagggcaagcaagtcactgtgctgggaagccctgtgcctgtgaacgtgttcctcggagtcccctttgctgctcccccgctgggatccctgcgatttacgaacccgcagcctgcatcgccctgggataacttgcgagaagccacctcctaccctaatttgtaagaccaggtgcctccagaactcagagtggctgctcttagatcaacatatgctcaaggtgcattacccgaaattcggagtgtcagaagactgcctctacctgaacatctatgcgcctgcccacgccgatacaggctccaagctccccgtcttggtgtggttcccaggaggtgccttcaagactggctcagcctccatctttgatgggtccgccctggctgcctatgaggacgtgctggttgtggtcgtccagtaccggctaggaatatttggtttcttcaccacatgggatcagcatgctccggggaactgggccttcaaggaccaggtggctgctctgtcctgggtccagaagaacatcgagttcttcggtggggaccccagctctgtgaccatctttggcgagtccgcgggagccataagtgtttctagtcttatactgtctcccatggccaaaggcttattccacaaagccatcatggagagtggggtggccatcatcccttacctggaggcccatgattatgagaagagtgaggacctgcaggtggttgcacatttctgtggtaacaatgcgtcagactctgaggccctgctgaggtgcctgaggacaaaaccctccaaggagctgctgaccctcagccagaaaacaaagtctttcactcgagtggttgatggtgctttctttcctaatgagcctctagatctattgtctcagaaagcatttaaagcaattccttccatcatcggagtcaataaccacgagtgtggcttcctgctgcctatgaaggaggctcctgagatcctcagtggctccaacaagtcccttgccctccatctgatacaaaacatcctgcacatcccgcctcagtatttgcaccttgtggctaatgaatacttccatgacaagcactccctgactgaaatccgagacagtcttctggacttgcttggagatgtgttctttgtggtccctgcactgatcacagctcgatatcacagagatgctggtgcacctgtctacttctatgagtttcggcaccggcctcagtgctttgaagacacgaagccagcttttgtcaaagccgaccacgctgatgaagtccgctttgtgttcggtggtgccttcctgaagggggacattgttatgttcgaaggagccacggaggaggagaagttactgagccggaagatgatgaaatactgggctacctttgctcgaaccgggaatcctaatgggaacgacctgtctctgtggccagcttataatctgactgagcagtacctccagctggacttgaacatgagcctcggacagagactcaaagaaccgcgggtggatttttggaccagcaccatccccctgatcctgtctgcctccgacatgctccacagtcctctttcttccttaactttcctctctctcctccagcctttctttttcttttgtgctccttgagaagttatctttctgtgattttggtttcccttctcctcccataatttctcccgcaatcattagcttctttctgagctcagctgctttctatggggatccttgcaaaacaagctgctttcgctgatattttatggacttaggaatgatccttacagaattcttttcaacatcaaaaagtgcaatttgtcttggaaggcaacaagatttcttcaataaatttggaagagggctggcctattagttgtcataataatggttttgtaactcatatgaaataaaatcagaatgt

SEQ ID NO: 114256 - DNA, 2258 bp, Homo sapiens
  Payload ID: 2333
  Gene Symbol: CES5A
  Gene Name: carboxylesterase 5A
  Uniprot ID: Q6NT32
  ENST ID: ENST00000521992
  CDS Start-End: 147-1961
agctggcaacggtagaggaaagtggtgaactcatttgacttttctttatcagctgtaccatgtacatgatgtgcaagaggactggggctctgtgtcaaggccagctgggatgctgaggttttgtgttaggaccaagggcaagtctgatggctgttctggtttgccctgcttcatgccatggcctaaaggagtttaggataagaaggggaatgtggagattgtgcctggtttactatttttatccagcctcctcaactttgtatgtattgaggattgatgtcttaaactacacttccaaagatgaggggccttctgctgaagggccacagaggaacaccaggctgggatggattcagggcaagcaagtcactgtgctgggaagccctgtgcctgtgaacgtgttcctcggagtcccctttgctgctcccccgctgggatccctgcgatttacgaacccgcagcctgcatcgccctgggataacttgcgagaagccacctcctaccctaatttgtgcctccagaactcagagtggctgctcttagatcaacatatgctcaaggtgcattacccgaaattcggagtgtcagaagactgcctctacctgaacatctatgcgcctgcccacgccgatacaggctccaagctccccgtcttggtgtggttcccaggaggtgccttcaagactggctcagcctccatctttgatgggtccgccctggctgcctatgaggacgtgctggttgtggtcgtccagtaccggctaggaatatttggtttcttcaccacatgggatcagcatgctccggggaactgggccttcaaggaccaggtggctgctctgtcctgggtccagaagaacatcgagttcttcggtggggaccccagctctgtgaccatctttggcgagtccgcgggagccataagtgtttctagtcttatactgtctcccatggccaaaggcttattccacaaagccatcatggagagtggggtggccatcatcccttacctggaggcccatgattatgagaagagtgaggacctgcaggtggttgcacatttctgtggtaacaatgcgtcagactctgaggccctgctgaggtgcctgaggacaaaaccctccaaggagctgctgaccctcagccagaaaacaaagtctttcactcgagtggttgatggtgctttctttcctaatgagcctctagatctattgtctcagaaagcatttaaagcaattccttccatcatcggagtcaataaccacgagtgtggcttcctgctgcctatgaaggaggctcctgagatcctcagtggctccaacaagtcccttgccctccatctgatacaaaacatcctgcacatcccgcctcagtatttgcaccttgtggctaatgaatacttccatgacaagcactccctgactgaaatccgagacagtcttctggacttgcttggagatgtgttctttgtggtccctgcactgatcacagctcgatatcacagagatgctggtgcacctgtctacttctatgagtttcggcaccggcctcagtgctttgaagacacgaagccagcttttgtcaaagccgaccacgctgatgaagtccgctttgtgttcggtggtgccttcctgaagggggacattgttatgttcgaaggagccacggaggaggagaagttactgagccggaagatgatgaaatactgggctacctttgctcgaaccgggaatcctaatgggaacgacctgtctctgtggccagcttataatctgactgagcagtacctccagctggacttgaacatgagcctcggacagagactcaaagaaccgcgggtggatttttggaccagcaccatccccctgatcctgtctgcctccgacatgctccacagtcctctttcttccttaactttcctctctctcctccagcctttctttttcttttgtgctccttgagaagttatctttctgtgattttggtttcccttctcctcccataatttctcccgcaatcattagcttctttctgagctcagctgctttctatggggatccttgcaaaacaagctgctttcgctgatattttatggacttaggaatgatccttacagaattcttttcaacatcaaaaagtgcaatttgtcttggaaggcaacaagatttcttcaataaatttggaagagggctggcctattagttgtcataataatggttttgtaactcatatgaaataaaatcagaatgtaaaatagg

SEQ ID NO: 114257 - DNA, 1948 bp, Homo sapiens
  Payload ID: 2333
  Gene Symbol: CES5A
  Gene Name: carboxylesterase 5A
  ENST ID: ENST00000520435
  CDS Start-End: 79-1716
ctctttctggctcccaactgaagctctctgaggccagcagccgccgtcaatgttcacagagtgcaggcaggcagccaaatgagtgggaattgggtgcacccaggccagatcctaatttgggctatctgggtccttgcagcccccaccaaagggccttctgctgaagggccacagaggaacaccaggctgggatggattcagggcaagcaagtcactgtgctgggaagccctgtgcctgtgaacgtgttcctcggagtcccctttgctgctcccccgctgggatccctgcgatttacgaacccgcagcctgcatcgccctgggataacttgcgagaagccacctcctaccctaatttgtgcctccagaactcagagtggctgctcttagatcaacatatgctcaaggtcttggtgtggttcccaggaggtgccttcaagactggctcagcctccatctttgatgggtccgccctggctgcctatgaggacgtgctggttgtggtcgtccagtaccggctaggaatatttggtttcttcaccacatgggatcagcatgctccggggaactgggccttcaaggaccaggtggctgctctgtcctgggtccagaagaacatcgagttcttcggtggggaccccagctctgtgaccatctttggcgagtccgcgggagccataagtgtttctagtcttatactgtctcccatggccaaaggcttattccacaaagccatcatggagagtggggtggccatcatcccttacctggaggcccatgattatgagaagagtgaggacctgcaggtggttgcacatttctgtggtaacaatgcgtcagactctgaggccctgctgaggtgcctgaggacaaaaccctccaaggagctgctgaccctcagccagaaaacaaagtctttcactcgagtggttgatggtgctttctttcctaatgagcctctagatctattgtctcagaaagcatttaaagcaattccttccatcatcggagtcaataaccacgagtgtggcttcctgctgcctatgaaggaggctcctgagatcctcagtggctccaacaagtcccttgccctccatctgatacaaaacatcctgcacatcccgcctcagtatttgcaccttgtggctaatgaatacttccatgacaagcactccctgactgaaatccgagacagtcttctggacttgcttggagatgtgttctttgtggtccctgcactgatcacagctcgatatcacagagatgctggtgcacctgtctacttctatgagtttcggcaccggcctcagtgctttgaagacacgaagccagcttttgtcaaagccgaccacgctgatgaagtccgctttgtgttcggtggtgccttcctgaagggggacattgttatgttcgaaggagccacggaggaggagaagttactgagccggaagatgatgaaatactgggctacctttgctcgaaccgggaatcctaatgggaacgacctgtctctgtggccagcttataatctgactgagcagtacctccagctggacttgaacatgagcctcggacagagactcaaagaaccgcgggtggatttttggaccagcaccatccccctgatcctgtctgcctccgacatgctccacagtcctctttcttccttaactttcctctctctcctccagcctttctttttcttttgtgctccttgagaagttatctttctgtgattttggtttcccttctcctcccataatttctcccgcaatcattagcttctttctgagctcagctgctttctatggggatccttgcaaaacaagctgctttcgctgatattttatggacttaggaatgatccttacagaattcttttcaacatcaaaaagtgcaatttgtcttggaaggcaacaagatttcttcaataaatttggaagagggctg

SEQ ID NO: 114258 - DNA, 574 bp, Homo sapiens
  Payload ID: 2333
  Gene Symbol: CES5A
  Gene Name: carboxylesterase 5A
  ENST ID: ENST00000536025
  CDS Start-End: 350-574
ctaatttacattttcatcaacagtgtacgagggttctccgttttctgcactcttgccagcatccgttttttcctgtctttttgataaaaaccactttaactgggggccttctgctgaagggccacagaggaacaccaggctgggatggattcagggcaagcaagtcactgtgctgggaagccctgtgcctgtgaacgtgttcctcggagtcccctttgctgctcccccgctgggatccctgcgatttacgaacccgcagcctgcatcgccctgggataacttgcgagaagccacctcctaccctaatttgtgcctccagaactcagagtggctgctcttagatcaacatatgctcaaggtgcattacccgaaattcggagtgtcagaagactgcctctacctgaacatctatgcgcctgcccacgccgatacaggctccaagctccccgtcttggtgtggttcccaggaggtgccttcaagactggctcagcctccatctttgatgggtccgccctggctgcctatgaggacgtgctggttgtggtcgtccagtaccggctaggaatatttggt

SEQ ID NO: 114259 - DNA, 1948 bp, Homo sapiens
  Payload ID: 2333
  Gene Symbol: CES5A
  Gene Name: carboxylesterase 5A
  ENST ID: ENST00000573522
  CDS Start-End: 79-1716
ctctttctggctcccaactgaagctctctgaggccagcagccgccgtcaatgttcacagagtgcaggcaggcagccaaatgagtgggaattgggtgcacccaggccagatcctaatttgggctatctgggtccttgcagcccccaccaaagggccttctgctgaagggccacagaggaacaccaggctgggatggattcagggcaagcaagtcactgtgctgggaagccctgtgcctgtgaacgtgttcctcggagtcccctttgctgctcccccgctgggatccctgcgatttacgaacccgcagcctgcatcgccctgggataacttgcgagaagccacctcctaccctaatttgtgcctccagaactcagagtggctgctcttagatcaacacatgctcaaggtcttggtgtggttcccaggaggtgccttcaagactggctcagcctccatctttgatgggtccgccctggctgcctatgaggacgtgctggttgtggtcgtccagtaccggctaggaatatttggtttcttcaccacatgggatcagcatgctccggggaactgggccttcaaggaccaggtggctgctctgtcctgggtccagaagaacatcgagttcttcggtggggaccccagctctgtgaccatctttggcgagtccgcgggagccataagtgtttctagtcttatactgtctcccatggccaaaggcttattccacaaagccatcatggagagtggggtggccatcatcccttacctggaggcccatgattatgagaagagtgaggacctgcaggtggttgcacatttctgtggtaacaatgcgtcagactctgaggccctgctgaggtgcctgaggacaaaaccctccaaggagctgctgaccctcagccagaaaacaaagtctttcactcgagtggttgatggtgctttctttcctaatgagcctctagatctattgtctcagaaagcatttaaagcaattccttccatcatcggagtcaataaccacgagtgtggcttcctgctgcctatgaaggaggctcctgagatcctcagtggctccaacaagtcccttgccctccatctgatacaaaacatcctgcacatcccgcctcagtatttgcaccttgtggctaatgaatacttccatgacaagcactccctgactgaaatccgagacagtcttctggacttgcttggagatgtgttctttgtggtccctgcactgatcacagctcgatatcacagagatgctggtgcacctgtctacttctatgagtttcggcaccggcctcagtgctttgaagacacgaagccggcttttgtcaaagccgaccacgctgatgaagtccgctttgtgttcggtggtgccttcctgaagggggacattgttatgttcgaaggagccacggaggaggagaagttactgagccggaagatgatgaaatactgggctacctttgctcgaaccgggaatcctaatgggaacgacctgtctctgtggccagcttataatctgactgagcagtacctgcagctggacttgaacatgagcctcggacagagactcaaagaaccgcgggtggagttttggaccagcaccatccccctgatcctgtctgcctccgacatgctccacagtcctctttcttccttaactttcctctctctcctccagcctttctttttcttttgtgctccttgagaagttatctttctgtgattttggtttcccttctcctcctataatttctcccgcaatcattagcttctttctgagctcagctgctttctatggggatccttgcaaaacaagctgctttcgctgatattttatggacttaggaatgatccttacagaattcttttcaacatcaaaaagtgcaatttgtcttggaaggcaacaagatttcttcaataaatttggaagagggctg

SEQ ID NO: 114260 - DNA, 2084 bp, Homo sapiens
  Payload ID: 2333
  Gene Symbol: CES5A
  Gene Name: carboxylesterase 5A
  ENST ID: ENST00000576219
  CDS Start-End: 123-1850
gctgcctctgcctgcctattcagcatttgcctgttaacaggaagctctttctggctcccaactgaagctctctgaggccagcagccgccgtcaatgttcacagagtgcaggcaggcagccaaatgagtgggaattgggtgcacccaggccagatcctaatttgggctatctgggtccttgcagcccccaccaaagggccttctgctgaagggccacagaggaacaccaggctgggatggattcagggcaagcaagtcactgtgctgggaagccctgtgcctgtgaacgtgttcctcggagtcccctttgctgctcccccgctgggatccctgcgatttacgaacccgcagcctgcatcgccctgggataacttgcgagaagccacctcctaccctaatttgtgcctccagaactcagagtggctgctcttagatcaacacatgctcaaggtgcattacccgaaattcggagtgtcagaagactgcctctacctgaacatctatgcgcctgcccacgccgatacaggctccaagctccccgtcttggtgtggttcccaggaggtgccttcaagactggctcagcctccatctttgatgggtccgccctggctgcctatgaggacgtgctggttgtggtcgtccagtaccggctaggaatatttggtttcttcaccacatgggatcagcatgctccggggaactgggccttcaaggaccaggtggctgctctgtcctgggtccagaagaacatcgagttcttcggtggggaccccagctctgtgaccatctttggcgagtccgcgggagccataagtgtttctagtcttatactgtctcccatggccaaaggcttattccacaaagccatcatggagagtggggtggccatcatcccttacctggaggcccatgattatgagaagagtgaggacctgcaggtggttgcacatttctgtggtaacaatgcgtcagactctgaggccctgctgaggtgcctgaggacaaaaccctccaaggagctgctgaccctcagccagaaaacaaagtctttcactcgagtggttgatggtgctttctttcctaatgagcctctagatctattgtctcagaaagcatttaaagcaattccttccatcatcggagtcaataaccacgagtgtggcttcctgctgcctatgaaggaggctcctgagatcctcagtggctccaacaagtcccttgccctccatctgatacaaaacatcctgcacatcccgcctcagtatttgcaccttgtggctaatgaatacttccatgacaagcactccctgactgaaatccgagacagtcttctggacttgcttggagatgtgttctttgtggtccctgcactgatcacagctcgatatcacagagatgctggtgcacctgtctacttctatgagtttcggcaccggcctcagtgctttgaagacacgaagccggcttttgtcaaagccgaccacgctgatgaagtccgctttgtgttcggtggtgccttcctgaagggggacattgttatgttcgaaggagccacggaggaggagaagttactgagccggaagatgatgaaatactgggctacctttgctcgaaccgggaatcctaatgggaacgacctgtctctgtggccagcttataatctgactgagcagtacctgcagctggacttgaacatgagcctcggacagagactcaaagaaccgcgggtggagttttggaccagcaccatccccctgatcctgtctgcctccgacatgctccacagtcctctttcttccttaactttcctctctctcctccagcctttctttttcttttgtgctccttgagaagttatctttctgtgattttggtttcccttctcctcctataatttctcccgcaatcattagcttctttctgagctcagctgctttctatggggatccttgcaaaacaagctgctttcgctgatattttatggacttaggaatgatccttacagaattcttttcaacatcaaaaagtgcaatttgtcttggaaggcaacaagatttcttcaataaatttggaagagggctggc

SEQ ID NO: 114261 - DNA, 574 bp, Homo sapiens
  Payload ID: 2333
  Gene Symbol: CES5A
  Gene Name: carboxylesterase 5A
  ENST ID: ENST00000574456
  CDS Start-End: 350-574
ctaatttacattttcatcaacagtgtacgagggttctccgttttctgcactcttgccagcatccgttttttcctgtctttttgataaaaaccactttaactgggggccttctgctgaagggccacagaggaacaccaggctgggatggattcagggcaagcaagtcactgtgctgggaagccctgtgcctgtgaacgtgttcctcggagtcccctttgctgctcccccgctgggatccctgcgatttacgaacccgcagcctgcatcgccctgggataacttgcgagaagccacctcctaccctaatttgtgcctccagaactcagagtggctgctcttagatcaacacatgctcaaggtgcattacccgaaattcggagtgtcagaagactgcctctacctgaacatctatgcgcctgcccacgccgatacaggctccaagctccccgtcttggtgtggttcccaggaggtgccttcaagactggctcagcctccatctttgatgggtccgccctggctgcctatgaggacgtgctggttgtggtcgtccagtaccggctaggaatatttggt

SEQ ID NO: 114262 - DNA, 2258 bp, Homo sapiens
  Payload ID: 2333
  Gene Symbol: CES5A
  Gene Name: carboxylesterase 5A
  ENST ID: ENST00000573178
  CDS Start-End: 147-1961
agctggcaacggtagaggaaagtggtgaactcatttgacttttctttatcagctgtaccatgtacatgatgtgcaagaggactggggctctgtgtcaaggccagctgggatgctgaggttttgtgttaggaccaagggcaagtctgatggctgttctggtttgccctgcttcatgccatggcctaaaggagtttaggataagaaggggaatgtggagattgtgcctggtttactatttttatccagcctcctcaactttgtatgtattgaggattgatgtcttaaactacacttccaaagatgaggggccttctgctgaagggccacagaggaacaccaggctgggatggattcagggcaagcaagtcactgtgctgggaagccctgtgcctgtgaacgtgttcctcggagtcccctttgctgctcccccgctgggatccctgcgatttacgaacccgcagcctgcatcgccctgggataacttgcgagaagccacctcctaccctaatttgtgcctccagaactcagagtggctgctcttagatcaacacatgctcaaggtgcattacccgaaattcggagtgtcagaagactgcctctacctgaacatctatgcgcctgcccacgccgatacaggctccaagctccccgtcttggtgtggttcccaggaggtgccttcaagactggctcagcctccatctttgatgggtccgccctggctgcctatgaggacgtgctggttgtggtcgtccagtaccggctaggaatatttggtttcttcaccacatgggatcagcatgctccggggaactgggccttcaaggaccaggtggctgctctgtcctgggtccagaagaacatcgagttcttcggtggggaccccagctctgtgaccatctttggcgagtccgcgggagccataagtgtttctagtcttatactgtctcccatggccaaaggcttattccacaaagccatcatggagagtggggtggccatcatcccttacctggaggcccatgattatgagaagagtgaggacctgcaggtggttgcacatttctgtggtaacaatgcgtcagactctgaggccctgctgaggtgcctgaggacaaaaccctccaaggagctgctgaccctcagccagaaaacaaagtctttcactcgagtggttgatggtgctttctttcctaatgagcctctagatctattgtctcagaaagcatttaaagcaattccttccatcatcggagtcaataaccacgagtgtggcttcctgctgcctatgaaggaggctcctgagatcctcagtggctccaacaagtcccttgccctccatctgatacaaaacatcctgcacatcccgcctcagtatttgcaccttgtggctaatgaatacttccatgacaagcactccctgactgaaatccgagacagtcttctggacttgcttggagatgtgttctttgtggtccctgcactgatcacagctcgatatcacagagatgctggtgcacctgtctacttctatgagtttcggcaccggcctcagtgctttgaagacacgaagccggcttttgtcaaagccgaccacgctgatgaagtccgctttgtgttcggtggtgccttcctgaagggggacattgttatgttcgaaggagccacggaggaggagaagttactgagccggaagatgatgaaatactgggctacctttgctcgaaccgggaatcctaatgggaacgacctgtctctgtggccagcttataatctgactgagcagtacctgcagctggacttgaacatgagcctcggacagagactcaaagaaccgcgggtggagttttggaccagcaccatccccctgatcctgtctgcctccgacatgctccacagtcctctttcttccttaactttcctctctctcctccagcctttctttttcttttgtgctccttgagaagttatctttctgtgattttggtttcccttctcctcctataatttctcccgcaatcattagcttctttctgagctcagctgctttctatggggatccttgcaaaacaagctgctttcgctgatattttatggacttaggaatgatccttacagaattcttttcaacatcaaaaagtgcaatttgtcttggaaggcaacaagatttcttcaataaatttggaagagggctggcctattagttgtcataataatggttttgtaactcatatgaaataaaatcagaatgtaaaatagg

SEQ ID NO: 114263 - DNA, 1669 bp, Homo sapiens
  Payload ID: 2333
  Gene Symbol: CES5A
  Gene Name: carboxylesterase 5A
  ENST ID: ENST00000576322
  CDS Start-End: 370-1437
ctgagtggcactgcacagggatggggaaaaaaggttggaccgcactgcagggactagaagatgcccctggcttccctctccccaaaaatgagagcccccaatggtggtagagagtttattctgttcaaagcatgttcttaccttttacttcattagatcttctcaacaatccaggaggtcaccaggggccattaactccattttatgggtgaggcaaaaagtccctggaggagaggggtcttgttcagagtcgtactgtcagctattgatggaaccaggactgggacccaagtcttcacaatacaatttcttagcccataagtaatacagagaggttgtcagatcccttgaagtctccttggacaggaaatggaagatgatttatcctggaggtcttggtcacttctctgcatggagatactgtctcccatggccaaaggcttattccacaaagccatcatggagagtggggtggccatcatcccttacctggaggcccatgattatgagaagagtgaggacctgcaggtggttgcacatttctgtggtaacaatgcgtcagactctgaggccctgctgaggtgcctgaggacaaaaccctccaaggagctgctgaccctcagccagaaaacaaagtctttcactcgagtggttgatggtgctttctttcctaatgagcctctagatctattgtctcagaaagcatttaaagcaattccttccatcatcggagtcaataaccacgagtgtggcttcctgctgcctatggaggctcctgagatcctcagtggctccaacaagtcccttgccctccatctgatacaaaacatcctgcacatcccgcctcagtatttgcaccttgtggctaatgaatacttccatgacaagcactccctgactgaaatccgagacagtcttctggacttgcttggagatgtgttctttgtggtccctgcactgatcacagctcgatatcacagagatgctggtgcacctgtctacttctatgagtttcggcaccggcctcagtgctttgaagacacgaagccggcttttgtcaaagccgaccacgctgatgaagtccgctttgtgttcggtggtgccttcctgaagggggacattgttatgttcgaaggagccacggaggaggagaagttactgagccggaagatgatgaaatactgggctacctttgctcgaaccgggaatcctaatgggaacgacctgtctctgtggccagcttataatctgactgagcagtacctgcagctggacttgaacatgagcctcggacagagactcaaagaaccgcgggtggagttttggaccagcaccatccccctgatcctgtctgcctccgacatgctccacagtcctctttcttccttaactttcctctctctcctccagcctttctttttcttttgtgctccttgagaagttatctttctgtgattttggtttcccttctcctcctataatttctcccgcaatcattagcttctttctgagctcagctgctttctatggggatccttgcaaaacaagctgctttcgctgatattttatggacttaggaatgatccttacagaattcttttcaacatcaaaaagtgcaatttgtcttggaaggcaacaagatttcttcaataaatttggaagagggctg

SEQ ID NO: 114264 - DNA, 2016 bp, Homo sapiens
  Payload ID: 2333
  Gene Symbol: CES5A
  Gene Name: carboxylesterase 5A
  ENST ID: ENST00000576682
  CDS Start-End: 150-1727
gttctgatgctgatcttcagtaactctgctgcctctgcctgcctattcagcatttgcctgttaacaggaagctctttctggctcccaactgaagctctctgaggccagcagccgccgtcaatgttcacagagtgcaggcaggcagccaaatgagtgggaattgggtgcacccaggccagatcctaatttgggctatctgggtccttgcagcccccaccaaagggccttctgctgaagggccacagaggaacaccaggctgggatggattcagggcaagcaagtcactgtgctgggaagccctgtgcctgtgaacgtgttcctcggagtcccctttgctgctcccccgctgggatccctgcgatttacgaacccgcagcctgcatcgccctgggataacttgcgagaagccacctcctaccctaatttgtgcctccagaactcagagtggctgctcttagatcaacacatgctcaaggtgcattacccgaaattcggagtgtcagaagactgcctctacctgaacatctatgcgcctgcccacgccgatacaggctccaagctccccgtcttggtgtggttcccaggaggtgccttcaagactggctcagcctccatctttgatgggtccgccctggctgcctatgaggacgtgctggttgtggtcgtccagtaccggctaggaatatttggtttcttcaccacatgggatcagcatgctccggggaactgggccttcaaggaccaggtggctgctctgtcctgggtccagaagaacatcgagttcttcggtggggaccccagctctgtgaccatctttggcgagtccgcgggagccataagtgtttctagtcttatactgtctcccatggccaaaggcttattccacaaagccatcatggagagtggggtggccatcatcccttacctggaggcccatgattatgagaagagtgaggacctgcaggtggttgcacatttctgtggtaacaatgcgtcagactctgaggccctgctgaggtgcctgaggacaaaaccctccaaggagctgctgaccctcagccagaaaacaaagtctttcactcgagtggttgatggtgctttctttcctaatgagcctctagatctattgtctcagaaagcatttaaagcaattccttccatcatcggagtcaataaccacgagtgtggcttcctgctgcctatgaaggaggctcctgagatcctcagtggctccaacaagtcccttgccctccatctgatacaaaacatcctgcacatcccgcctcagtatttgcaccttgtggctaatgaatacttccatgacaagcactccctgactgaaatccgagacagtcttctggacttgcttggagatgtgttctttgtggtccctgcactgatcacagctcgatatcacagagaaggagccacggaggaggagaagttactgagccggaagatgatgaaatactgggctacctttgctcgaaccgggaatcctaatgggaacgacctgtctctgtggccagcttataatctgactgagcagtacctgcagctggacttgaacatgagcctcggacagagactcaaagaaccgcgggtggagttttggaccagcaccatccccctgatcctgtctgcctccgacatgctccacagtcctctttcttccttaactttcctctctctcctccagcctttctttttcttttgtgctccttgagaagttatctttctgtgattttggtttcccttctcctcctataatttctcccgcaatcattagcttctttctgagctcagctgctttctatggggatccttgcaaaacaagctgctttcgctgatattttatggacttaggaatgatccttacagaattcttttcaacatcaaaaagtgcaatttgtcttggaaggcaacaagatttcttcaataaatttggaagagggctggcctattagttgtcataataatggttttgtaactcatatgaaataaaatcagaatgt

SEQ ID NO: 114265 - DNA, 2092 bp, Homo sapiens
  Payload ID: 2333
  Gene Symbol: CES5A
  Gene Name: carboxylesterase 5A
  ENST ID: ENST00000572754
  CDS Start-End: 394-1803
aggaaactccaaactgttctccataatggctgtgctaatttacattttcatcaacagtgtacgagggttctccgttttctgcactcttgccagcatccgttttttcctgtctttttgataaaaaccactttaactgggggccttctgctgaagggccacagaggaacaccaggctgggatggattcagggcaagcaagtcactgtgctgggaagccctgtgcctgtgaacgtgttcctcggagtcccctttgctgctcccccgctgggatccctgcgatttacgaacccgcagcctgcatcgccctgggataacttgcgagaagccacctcctaccctaatttgtaagaccaggtgcctccagaactcagagtggctgctcttagatcaacacatgctcaaggtgcattacccgaaattcggagtgtcagaagactgcctctacctgaacatctatgcgcctgcccacgccgatacaggctccaagctccccgtcttggtgtggttcccaggaggtgccttcaagactggctcagcctccatctttgatgggtccgccctggctgcctatgaggacgtgctggttgtggtcgtccagtaccggctaggaatatttggtttcttcaccacatgggatcagcatgctccggggaactgggccttcaaggaccaggtggctgctctgtcctgggtccagaagaacatcgagttcttcggtggggaccccagctctgtgaccatctttggcgagtccgcgggagccataagtgtttctagtcttatactgtctcccatggccaaaggcttattccacaaagccatcatggagagtggggtggccatcatcccttacctggaggcccatgattatgagaagagtgaggacctgcaggtggttgcacatttctgtggtaacaatgcgtcagactctgaggccctgctgaggtgcctgaggacaaaaccctccaaggagctgctgaccctcagccagaaaacaaagtctttcactcgagtggttgatggtgctttctttcctaatgagcctctagatctattgtctcagaaagcatttaaagcaattccttccatcatcggagtcaataaccacgagtgtggcttcctgctgcctatgaaggaggctcctgagatcctcagtggctccaacaagtcccttgccctccatctgatacaaaacatcctgcacatcccgcctcagtatttgcaccttgtggctaatgaatacttccatgacaagcactccctgactgaaatccgagacagtcttctggacttgcttggagatgtgttctttgtggtccctgcactgatcacagctcgatatcacagagatgctggtgcacctgtctacttctatgagtttcggcaccggcctcagtgctttgaagacacgaagccggcttttgtcaaagccgaccacgctgatgaagtccgctttgtgttcggtggtgccttcctgaagggggacattgttatgttcgaaggagccacggaggaggagaagttactgagccggaagatgatgaaatactgggctacctttgctcgaaccgggaatcctaatgggaacgacctgtctctgtggccagcttataatctgactgagcagtacctgcagctggacttgaacatgagcctcggacagagactcaaagaaccgcgggtggagttttggaccagcaccatccccctgatcctgtctgcctccgacatgctccacagtcctctttcttccttaactttcctctctctcctccagcctttctttttcttttgtgctccttgagaagttatctttctgtgattttggtttcccttctcctcctataatttctcccgcaatcattagcttctttctgagctcagctgctttctatggggatccttgcaaaacaagctgctttcgctgatattttatggacttaggaatgatccttacagaattcttttcaacatcaaaaagtgcaatttgtcttggaaggcaacaagatttcttcaataaatttggaagagggctggcctattagttgtcataataatggttttgtaactcatatgaaataaaatcagaatgt

SEQ ID NO: 114266 - DNA, 2188 bp, Homo sapiens
  Payload ID: 2333
  Gene Symbol: CES5A
  Gene Name: carboxylesterase 5A
  ENST ID: ENST00000521228
  CDS Start-End: 350-586
ctaatttacattttcatcaacagtgtacgagggttctccgttttctgcactcttgccagcatccgttttttcctgtctttttgataaaaaccactttaactgggggccttctgctgaagggccacagaggaacaccaggctgggatggattcagggcaagcaagtcactgtgctgggaagccctgtgcctgtgaacgtgttcctcggagtcccctttgctgctcccccgctgggatccctgcgatttacgaacccgcagcctgcatcgccctgggataacttgcgagaagccacctcctaccctaatttgtgcctccagaactcagagtggctgctcttagatcaacatatgctcaaggtgcattacccgaaattcggagtgtcagaagactgcctctacctgaacatctatgcgcctgcccacgccgatacaggctccaagctccccgtcttggtgtggttcccaggaggtgccttcaagactggctcagcctccatctttgatgggtccgccctggctgcctatgaggacgtgctggttgtggtcgtccagtaccggctaggaatatttggtttcttcacgtgagtctctccaaatgatggacatcccagatccccaaagggcagcagtgcagtagccatagacagtgcccagcaacctaagaaggagcgagccttccgggacaatgaacaaaactggccctaattacttagcacatgggatcagcatgctccggggaactgggccttcaaggaccaggtggctgctctgtcctgggtccagaagaacatcgagttcttcggtggggaccccagctctgtgaccatctttggcgagtccgcgggagccataagtgtttctagtcttatactgtctcccatggccaaaggcttattccacaaagccatcatggagagtggggtggccatcatcccttacctggaggcccatgattatgagaagagtgaggacctgcaggtggttgcacatttctgtggtaacaatgcgtcagactctgaggccctgctgaggtgcctgaggacaaaaccctccaaggagctgctgaccctcagccagaaaacaaagtctttcactcgagtggttgatggtgctttctttcctaatgagcctctagatctattgtctcagaaagcatttaaagcaattccttccatcatcggagtcaataaccacgagtgtggcttcctgctgcctatgaaggaggctcctgagatcctcagtggctccaacaagtcccttgccctccatctgatacaaaacatcctgcacatcccgcctcagtatttgcaccttgtggctaatgaatacttccatgacaagcactccctgactgaaatccgagacagtcttctggacttgcttggagatgtgttctttgtggtccctgcactgatcacagctcgatatcacagagatgctggtgcacctgtctacttctatgagtttcggcaccggcctcagtgctttgaagacacgaagccagcttttgtcaaagccgaccacgctgatgaagtccgctttgtgttcggtggtgccttcctgaagggggacattgttatgttcgaaggagccacggaggaggagaagttactgagccggaagatgatgaaatactgggctacctttgctcgaaccgggaatcctaatgggaacgacctgtctctgtggccagcttataatctgactgagcagtacctccagctggacttgaacatgagcctcggacagagactcaaagaaccgcgggtggatttttggaccagcaccatccccctgatcctgtctgcctccgacatgctccacagtcctctttcttccttaactttcctctctctcctccagcctttctttttcttttgtgctccttgagaagttatctttctgtgattttggtttcccttctcctcccataatttctcccgcaatcattagcttctttctgagctcagctgctttctatggggatccttgcaaaacaagctgctttcgctgatattttatggacttaggaatgatccttacagaattcttttcaacatcaaaaagtgcaatttgtcttggaaggcaacaagatttcttcaataaatttggaagagggctggcctattagttgtcataataatggttttgtaactcatatgaaataaaatcagaatgtaaaatagg

SEQ ID NO: 114267 - DNA, 1669 bp, Homo sapiens
  Payload ID: 2333
  Gene Symbol: CES5A
  Gene Name: carboxylesterase 5A
  ENST ID: ENST00000541580
  CDS Start-End: 370-1437
ctgagtggcactgcacagggatggggaaaaaaggttggaccgcactgcagggactagaagatgcccctggcttccctctccccaaaaatgagagcccccaatggtggtagagagtttattctgttcaaagcatgttcttaccttttacttcattagatcttctcaacaatccaggaggtcaccaggggccattaactccattttatgggtgaggcaaaaagtccctggaggagaggggtcttgttcagagtcgtactgtcagctattgatggaaccaggactgggacccaagtcttcacaatacaatttcttagcccataagtaatacagagaggttgtcagatcccttgaagtctccttggacaggaaatggaagatgatttatcctggaggtcttggtcacttctctgcatggagatactgtctcccatggccaaaggcttattccacaaagccatcatggagagtggggtggccatcatcccttacctggaggcccatgattatgagaagagtgaggacctgcaggtggttgcacatttctgtggtaacaatgcgtcagactctgaggccctgctgaggtgcctgaggacaaaaccctccaaggagctgctgaccctcagccagaaaacaaagtctttcactcgagtggttgatggtgctttctttcctaatgagcctctagatctattgtctcagaaagcatttaaagcaattccttccatcatcggagtcaataaccacgagtgtggcttcctgctgcctatggaggctcctgagatcctcagtggctccaacaagtcccttgccctccatctgatacaaaacatcctgcacatcccgcctcagtatttgcaccttgtggctaatgaatacttccatgacaagcactccctgactgaaatccgagacagtcttctggacttgcttggagatgtgttctttgtggtccctgcactgatcacagctcgatatcacagagatgctggtgcacctgtctacttctatgagtttcggcaccggcctcagtgctttgaagacacgaagccagcttttgtcaaagccgaccacgctgatgaagtccgctttgtgttcggtggtgccttcctgaagggggacattgttatgttcgaaggagccacggaggaggagaagttactgagccggaagatgatgaaatactgggctacctttgctcgaaccgggaatcctaatgggaacgacctgtctctgtggccagcttataatctgactgagcagtacctccagctggacttgaacatgagcctcggacagagactcaaagaaccgcgggtggatttttggaccagcaccatccccctgatcctgtctgcctccgacatgctccacagtcctctttcttccttaactttcctctctctcctccagcctttctttttcttttgtgctccttgagaagttatctttctgtgattttggtttcccttctcctcccataatttctcccgcaatcattagcttctttctgagctcagctgctttctatggggatccttgcaaaacaagctgctttcgctgatattttatggacttaggaatgatccttacagaattcttttcaacatcaaaaagtgcaatttgtcttggaaggcaacaagatttcttcaataaatttggaagagggctg

SEQ ID NO: 114268 - DNA, 2188 bp, Homo sapiens
  Payload ID: 2333
  Gene Symbol: CES5A
  Gene Name: carboxylesterase 5A
  ENST ID: ENST00000570713
  CDS Start-End: 350-586
ctaatttacattttcatcaacagtgtacgagggttctccgttttctgcactcttgccagcatccgttttttcctgtctttttgataaaaaccactttaactgggggccttctgctgaagggccacagaggaacaccaggctgggatggattcagggcaagcaagtcactgtgctgggaagccctgtgcctgtgaacgtgttcctcggagtcccctttgctgctcccccgctgggatccctgcgatttacgaacccgcagcctgcatcgccctgggataacttgcgagaagccacctcctaccctaatttgtgcctccagaactcagagtggctgctcttagatcaacacatgctcaaggtgcattacccgaaattcggagtgtcagaagactgcctctacctgaacatctatgcgcctgcccacgccgatacaggctccaagctccccgtcttggtgtggttcccaggaggtgccttcaagactggctcagcctccatctttgatgggtccgccctggctgcctatgaggacgtgctggttgtggtcgtccagtaccggctaggaatatttggtttcttcacgtgagtctctccaaatgatggacatcccagatccccaaagggcagcagtgcagtagccatagacagtgcccagcaacctaagaaggagcgagccttccgggacaatgaacaaaactggccctaattacttagcacatgggatcagcatgctccggggaactgggccttcaaggaccaggtggctgctctgtcctgggtccagaagaacatcgagttcttcggtggggaccccagctctgtgaccatctttggcgagtccgcgggagccataagtgtttctagtcttatactgtctcccatggccaaaggcttattccacaaagccatcatggagagtggggtggccatcatcccttacctggaggcccatgattatgagaagagtgaggacctgcaggtggttgcacatttctgtggtaacaatgcgtcagactctgaggccctgctgaggtgcctgaggacaaaaccctccaaggagctgctgaccctcagccagaaaacaaagtctttcactcgagtggttgatggtgctttctttcctaatgagcctctagatctattgtctcagaaagcatttaaagcaattccttccatcatcggagtcaataaccacgagtgtggcttcctgctgcctatgaaggaggctcctgagatcctcagtggctccaacaagtcccttgccctccatctgatacaaaacatcctgcacatcccgcctcagtatttgcaccttgtggctaatgaatacttccatgacaagcactccctgactgaaatccgagacagtcttctggacttgcttggagatgtgttctttgtggtccctgcactgatcacagctcgatatcacagagatgctggtgcacctgtctacttctatgagtttcggcaccggcctcagtgctttgaagacacgaagccggcttttgtcaaagccgaccacgctgatgaagtccgctttgtgttcggtggtgccttcctgaagggggacattgttatgttcgaaggagccacggaggaggagaagttactgagccggaagatgatgaaatactgggctacctttgctcgaaccgggaatcctaatgggaacgacctgtctctgtggccagcttataatctgactgagcagtacctgcagctggacttgaacatgagcctcggacagagactcaaagaaccgcgggtggagttttggaccagcaccatccccctgatcctgtctgcctccgacatgctccacagtcctctttcttccttaactttcctctctctcctccagcctttctttttcttttgtgctccttgagaagttatctttctgtgattttggtttcccttctcctcctataatttctcccgcaatcattagcttctttctgagctcagctgctttctatggggatccttgcaaaacaagctgctttcgctgatattttatggacttaggaatgatccttacagaattcttttcaacatcaaaaagtgcaatttgtcttggaaggcaacaagatttcttcaataaatttggaagagggctggcctattagttgtcataataatggttttgtaactcatatgaaataaaatcagaatgtaaaatagg

SEQ ID NO: 114269 - DNA, 2335 bp, Homo sapiens
  Payload ID: 2334
  Gene Symbol: CMBL
  Gene Name: carboxymethylenebutenolidase homolog (Pseudomonas)
  Uniprot ID: Q96DG6
  ENST ID: ENST00000296658
  CDS Start-End: 422-1159
accccctctccctgcacctttctttatcttggagcctctcccatctctccctccctcttcctccctaccccaccctccgaccaccccacttcttcccctcccctcacacttccctccctcccttctctcgtctcctccccactgcgcctccctccctcctggccttccttcccttccccgactttgcagatttctcttcccccaggcctccctcctccacctctccgccccctccgggcttggctctcccaggaggctacgactggagccactggtcccgcaggatccccgcgtcctcggtcgccgcgtccacgtccctctcgcgtccccgcccggcgccacgccgcctcctctgggttcggcctccgcgcggtgcagcgcagtctcaggccgcgggacaagcccgacttaaatctctgcaatggctaacgaagcttatccttgtccgtgtgacattggccacagacttgagtatggagggctaggccgtgaagttcaagtcgagcacatcaaggcttatgtcaccaaatcccccgttgatgcaggcaaagctgtgattgtcattcaagatatatttggctggcagttgcccaataccagatatatagctgacatgatctcaggaaatggatacacaaccattgttccagacttctttgtagggcaagagccttgggacccctctggcgactggtctatcttccctgagtggctgaaaacaagaaatgcccagaagatcgatagagagatcagtgctatcttgaagtatctgaaacaacagtgtcatgcccagaaaattggcatcgtgggattctgctggggtggaactgctgtccatcatttgatgatgaaatactcagaattcagggcaggggtgtccgtctatggcattgtcaaggattctgaagacatttacaatttaaagaaccccactttgttcatttttgctgaaaatgatgttgtgattccactcaaggacgtatctttgctgactcagaagttgaaagaacactgcaaagttgaatatcaaattaaaacattttctgggcagactcatgggttcgtgcatcggaagagagaagattgctcacctgcagacaagccctacattgacgaggccagaaggaatttaattgagtggctgaacaagtacatgtagcaagaatcaagggcaagccttcctagaatagctttcatcccaaaatttgcttggaaatagttagatcatttgatttaattttcacttttataaaataagtgtaggaatcctaaaattgattatttcatttgaaacacaaattcagtaggacgtaatgcatgaaataatttaatttttgacatgtacatcgaatcataatttaaaaacaaggtctgaccaggtgtagtgcctcatgcctgtaattccagcactttgggaggccaaagtgggtggatcacctgaggtcaggagtttgagaccagcctggccaacatggtgagaccccatctctacaaaaaatacaaaaattagcctggtgtggtggtgcacgcctgtagtcccagctacttgggaggctgaggcacaagaatcaatagaacccaggaggtggagactgcagtgagccaagattgtgccactactgtactctagcctgggcagcagagtgagaccctgtctcaaaaataaataagtaaataaataaataaataaaataaaaaccaggtcagtacctggagaatttgaatgatagagaatgatagagtaataccctaattattagttaaaacctacaggccgggtgcggtggctcacgcctgtaatcccagcactttgggaggccgaggtgggtggatcacttgaggtcaggagttcaagaccagcctggccaacatggtgaaaccccatctctactaaaaatataaaaatcagccgggcatggtggcatgtgcctgtaatcccagctactcaggagtctgaggaggagaatcacttgaacctggaggcagaggttgcagtgagtcgaggttgcgctactgcactccagcctggacaacagagggagactctgtctcaaaaaaaaaaaaaaacctacagctgttcaaggaccagctgacaggtcaagtgtggccttttctggtctttgaacacatcatagaaagtgacaaatgctgcaaagccatgaagaacatgaactataaacgggtagactaactgcccagcttagacacttatctatgccacaaaacagctgaatttgtcacatttatatattgcaatatgggaagtattgagatcaaaacaggattccattgacctaattatattaagctaataaactaattttttgaatttttg

SEQ ID NO: 114270 - DNA, 1487 bp, Homo sapiens
  Payload ID: 2335
  Gene Symbol: CPA1
  Gene Name: carboxypeptidase A1 (pancreatic)
  Uniprot ID: P15085
  ENST ID: ENST00000011292
  CDS Start-End: 151-1410
agaactcccaccccagcctccccgtgggacaggacccaggtgctgggggagaacagacctcgggagcagccaggagtcctcggtcctgggagggtttaaaagccagggggccgtctcgacctcagtctgaccttccctcccggcagcagcatgcgggggttgctggtgttgagtgtcctgttgggggctgtctttggcaaggaggactttgtggggcatcaggtgctccgaatctctgtagccgatgaggcccaggtacagaaggtgaaggagctggaggacctggagcacctgcagctggacttctggcgggggcctgcccaccctggctcccccatcgacgtccgagtgcccttccccagcatccaggcggtcaagatctttctggagtcccacggcatcagctatgagaccatgatcgaggacgtgcagtcgctgctggacgaggagcaggagcagatgttcgccttccggtcccgggcgcgctccaccgacacttttaactacgccacctaccacaccctggaggagatctatgacttcctggacctgctggtggcggagaacccgcaccttgtcagcaagatccagattggcaacacctatgaagggcgtcccatttacgtgctgaagttcagcacggggggcagtaagcgtccagccatctggatcgacacgggcatccattcccgggagtgggtcacccaggccagtggggtctggtttgcaaagaagatcactcaagactacgggcaggatgcagctttcaccgccattctcgacaccttggacatcttcctggagatcgtcaccaaccctgatggctttgccttcacgcacagcacgaatcgcatgtggcgcaagactcggtcccacacagcaggctccctctgtattggcgtggaccccaacaggaactgggacgctggctttgggttgtccggagccagcagtaacccctgctcggagacttaccacggcaagtttgccaattccgaagtggaggtcaagtccattgtagactttgtgaaggaccatgggaacatcaaggccttcatctccatccacagctactcccagctcctcatgtatccctatggctacaaaacagaaccagtccctgaccaggatgagctggatcagctttccaaggctgctgtgacagccctggcctctctctacgggaccaagttcaactatggcagcatcatcaaggcaatttatcaagccagtggaagcactattgactggacctacagccagggcatcaagtactccttcaccttcgagctccgggacactgggcgctatggcttcctgctgccagcctcccagatcatccccacagccaaggagacgtggctggcgcttctgaccatcatggagcacaccctgaatcacccctactgagctgaccctttgacacccttcttgtcctcctctctggccccatccaggcaaccaaataaagtttgagtgtaccagga

SEQ ID NO: 114271 - DNA, 1062 bp, Homo sapiens
  Payload ID: 2335
  Gene Symbol: CPA1
  Gene Name: carboxypeptidase A1 (pancreatic)
  ENST ID: ENST00000476062
  CDS Start-End: 255-1062
ctgggattgagatagtaacagcgtctagaagtttctaaagatggggagagaagaggcatcaggtgctccgaatctctgtagccgatgaggcccaggtacagaaggtgaaggagctggaggacctggagcacctgcagctggacttctggcgggggcctgcccaccctggctcccccatcgacgtccgagtgcccttccccagcatccaggcggtcaagatctttctggagtcccacggcatcagctatgagaccatgatcgaggacgtgcagtcgctgctggacgaggagcaggagcagatgttcgccttccggtcccgggcgcgctccaccgacacttttaactacgccacctaccacaccctggaggagatctatgacttcctggacctgctggtggcggagaacccgcaccttgtcagcaagatccagattggcaacacctatgaagggcgtcccatttacgtgctgaagttcagcacggggggcagtaagcgtccagccatctggatcgacacgggcatccattcccgggagtgggtcacccaggccagtggggtctggtttgcaaagaagatcactcaagactacgggcaggatgcagctttcaccgccattctcgacaccttggacatcttcctggagatcgtcaccaaccctgatggctttgccttcacgcacagcacgaatcgcatgtggcgcaagactcggtcccacacagcaggctccctctgtattggcgtggaccccaacaggaactgggacgctggctttgggttgtccggagccagcagtaacccctgctcggagacttaccacggcaagtttgccaattccgaagtggaggtcaagtccattgtagactttgtgaaggaccatgggaacatcaaggccttcatctccatccacagctactcccagctcctcatgtatccctatggctacaaaacagaaccagtccctgaccaggatgagctggatcagctttccaaggctgctgtgacagccctggcctctctctacgggaccaagttcaactatggcagcatcatcaaggcaattt

SEQ ID NO: 114272 - DNA, 1303 bp, Homo sapiens
  Payload ID: 2335
  Gene Symbol: CPA1
  Gene Name: carboxypeptidase A1 (pancreatic)
  ENST ID: ENST00000484324
  CDS Start-End: 205-1200
cccaggcatcaggtgctccgaatctctgtagccgatgaggcccaggtacagaaggtgaaggagctggaggacctggagcacctgcagctggacttctggcgggggcctgcccaccctggctcccccatcgacgtccgagtgcccttccccagcatccaggcggtcaagatctttctggagtcccacggcatcagctatgagaccatgatcgaggacgtgcagtcgctgctggacgaggagcaggagcagatgttcgccttccggtcccgggcgcgctccaccgacacttttaactacgccacctaccacaccctggaggagatctatgacttcctggacctgctggtggcggagaacccgcaccttgtcagcaagatccagattggcaacacctatgaagggcgtcccatttacgtgctgaagttcagcacggggggcagtaagcgtccagccatctggatcgacacgggcatccattcccgggagtgggtcacccaggccagtggggtctggtttgcaaagaagatcactcaagactacgggcaggatgcagctttcaccgccattctcgacaccttggacatcttcctggagatcgtcaccaaccctgatggctttgccttcacgcacagcacgaatcgcatgtggcgcaagactcggtcccacacagcaggctccctctgtattggcgtggaccccaacaggaactgggacgctggctttgggttgtccggagccagcagtaacccctgctcggagacttaccacggcaagtttgccaattccgaagtggaggtcaagtccattgtagactttgtgaaggaccatgggaacatcaaggccttcatctccatccacagctactcccagctcctcatgtatccctatggctacaaaacagaaccagtccctgaccaggatgagctggatcagctttccaaggctgctgtgacagccctggcctctctctacgggaccaagttcaactatggcagcatcatcaaggcaatttatcaagccagtggaagcactattgactggacctacagccagggcatcaagtactccttcaccttcgagctccgggacactgggcgctatggcttcctgctgccagcctcccagatcatccccacagccaaggagacgtggctggcgcttctgaccatcatggagcacaccctgaatcacccctactgagctgaccctttgacacccttcttgtcctcctctctggccccatccaggcaaccaaataaagtttgagtgtaccaggaacagaatcctggggcttgcatgtgga

SEQ ID NO: 114273 - DNA, 581 bp, Homo sapiens
  Payload ID: 2335
  Gene Symbol: CPA1
  Gene Name: carboxypeptidase A1 (pancreatic)
  ENST ID: ENST00000481342
  CDS Start-End: 271-581
ttatcatggagggtgagagggtgtcagagctcagaactcccaccccagcctccccgtgggacaggacccaggcatcaggtgctccgaatctctgtagccgatgaggcccaggtacagaaggtgaaggagctggaggacctggagcacctgcagctggacttctggcgggggcctgcccaccctggctcccccatcgacgtccgagtgcccttccccagcatccaggcggtcaagatctttctggagtcccacggcatcagctatgagaccatgatcgaggacgtgcagtcgctgctggacgaggagcaggagcagatgttcgccttccggtcccgggcgcgctccaccgacacttttaactacgccacctaccacaccctggaggagatctatgacttcctggacctgctggtggcggagaacccgcaccttgtcagcaagatccagattggcaacacctatgaagggcgtcccatttacgtgctgaagttcagcacggggggcagtaagcgtccagccatctggatcgacacgggcatccattcccgggagtgggtcacccaggccagtggggtctggtt

SEQ ID NO: 114274 - DNA, 573 bp, Homo sapiens
  Payload ID: 2335
  Gene Symbol: CPA1
  Gene Name: carboxypeptidase A1 (pancreatic)
  ENST ID: ENST00000604896
  CDS Start-End: 1-573
agtctgaccttccctcccggcagcagcatgcgggggttgctggtgttgagtgtcctgttgggggctgtctttggcaaggaggactttgtggggcatcaggtgctccgaatctctgtagccgatgaggcccaggtacagaagatcactcaagactacgggcaggatgcagctttcaccgccattctcgacaccttggacatcttcctggagatcgtcaccaaccctgatggctttgccttcacgcacagcacgaatcgcatgtggcgcaagactcggtcccacacagcaggctccctctgtattggcgtggaccccaacaggaactgggacgctggctttgggttgtccggagccagcagtaacccctgctcggagacttaccacggcaagtttgccaattccgaagtggaggtcaagtccattgtagactttgtgaaggaccatgggaacatcaaggccttcatctccatccacagctactcccagctcctcatgtatccctatggctacaaaacagaaccagtccctgaccaggatgagctggatcagctttccaaggctgctgtgacagcc

SEQ ID NO: 114275 - DNA, 1366 bp, Homo sapiens
  Payload ID: 2336
  Gene Symbol: CPA2
  Gene Name: carboxypeptidase A2 (pancreatic)
  Uniprot ID: P48052
  ENST ID: ENST00000222481
  CDS Start-End: 56-1315
atccctacaaataaagttcaggaaggactctgaattctggactccaggaaaacccatggccatgaggttgatcctgttttttggtgccctttttgggcatatctactgtctagaaacatttgtgggagaccaagttcttgagattgtaccaagcaatgaagaacaaattaaaaatctgctacaattggaggctcaagaacatctccagcttgatttttggaaatcacccaccaccccaggggagacagcccacgtccgagttcccttcgtcaacgtccaggcagtcaaagtgttcttggagtcccagggaattgcctattccatcatgattgaagacgtgcaggtcctgttggacaaagagaatgaagaaatgctttttaataggagaagagaacggagtggtaacttcaattttggggcctaccataccctggaagagatttcccaagaaatggataacctcgtggctgagcaccctggtctagtgagcaaagtgaatattggctcttcttttgagaaccggcctatgaacgtgctcaagttcagcaccggaggagacaagccagctatctggctggatgctgggatccatgctcgagagtgggttacacaagctacggcactttggacagcaaataagattgtttctgattatggaaaggacccatccatcacttccattctggatgccctggatatcttcctcctgccagtcacaaaccctgatggatacgtgttctctcaaaccaaaaatcgtatgtggcggaagacccggtccaaggtatctggaagcctctgtgttggtgtggatcctaaccggaactgggatgcaggttttggaggacctggagccagcagcaacccttgctctgattcataccacggacccagtgccaactctgaagttgaagtgaaatccatagtggacttcatcaagagtcatggaaaagtcaaggccttcattaccctccacagctattcccagctgctgatgttcccctatgggtacaaatgtaccaagttagatgactttgatgagctgagtgaagtggcccaaaaggctgcccaatctctgagaagcctgcatggcaccaagtacaaagtgggaccaatctgctctgtcatctaccaagccagtggaggaagcattgactggtcctatgattatggcatcaagtactcatttgcctttgaactgagagacacagggcgctacggcttcctcttgccagcccgtcagatcctgcccacagccgaggagacctggcttggcttgaaggcaatcatggagcatgtgcgagaccacccctattagggccctggggaagaaacaagagccattaaaatctctttggtttgaagcaaa

SEQ ID NO: 114276 - DNA, 803 bp, Homo sapiens
  Payload ID: 2336
  Gene Symbol: CPA2
  Gene Name: carboxypeptidase A2 (pancreatic)
  ENST ID: ENST00000416698
  CDS Start-End: 8-556
catggccatgaggttgatcctgttttttggtgccctttttgggcatatctactgtctagaaacatttgtgggagaccaagttcttgagattgtaccaagcaatgaagaacaaattaaaaatctgctacaattggaggctcaagaacatctccagcttgatttttggaaatcacccaccaccccaggggagacagcccacgtccgagttcccttcgtcaacgtccaggcagtcaaagtgttcttggagtcccagggaattgcctattccatcatgattgaagacgtgcaggtcctgttggacaaagagaatgaagaaatgctttttaataggagaagagaacggagtggtaacttcaattttggggcctaccataccctggaagagatttcccaagaaatggataacctcgtggctgagcaccctggtctagtgagcaaagtgaatattggctcttcttttgagaaccggcctatgaacgtgctcaagaagagttctggtcgtatgcagaaggatgatggacaactaaaccctaaaccgcaaagacaaacgccctgaacgaagatcttttgaaaaaggatatagatgaaaaaagttcagcaccggaggagacaagccagctatctggctggatgctgggatccatgctcgagagtgggttacacaagctacggcactttggacagcaaataagattgtttctgattatggaaaggacccatccatcacttccattctggatgccctggatatcttcctcctgccagtcacaaaccctgatggatacgtgttctctcaaaccaaa

SEQ ID NO: 114277 - DNA, 1795 bp, Homo sapiens
  Payload ID: 2337
  Gene Symbol: CPA3
  Gene Name: carboxypeptidase A3 (mast cell)
  Uniprot ID: P15088
  ENST ID: ENST00000296046
  CDS Start-End: 53-1306
agggctgaggcataaaactgccagagggtctcaaggcaggcaaagaagaaccatgaggctcatcctgcctgtgggtttgattgctaccactcttgcaattgctcctgtccgctttgacagggagaaggtgttccgcgtgaagccccaggatgaaaaacaagcagacatcataaaggacttggccaaaaccaatgagcttgacttctggtatccaggtgccacccaccacgtagctgctaatatgatggtggatttccgagttagtgagaaggaatcccaagccatccagtctgccttggatcaaaataaaatgcactatgaaatcttgattcatgatctacaagaagagattgagaaacagtttgatgttaaagaagatatcccaggcaggcacagctacgcaaaatacaataattgggaaaagattgtggcttggactgaaaagatgatggataagtatcctgaaatggtctctcgtattaaaattggatctactgttgaagataatccactatatgttctgaagattggggaaaagaatgaaagaagaaaggctatttttacggattgtggcattcacgcacgagaatgggtctccccagcattctgccagtggtttgtctatcaggcaaccaaaacttatgggagaaacaaaattatgaccaaactcttggaccgaatgaatttttacattcttcctgtgttcaatgttgatggatatatttggtcatggacaaagaaccgcatgtggagaaaaaatcgttccaagaaccaaaactccaaatgcatcggcactgacctcaacaggaattttaatgcttcatggaactccattcctaacaccaatgacccatgtgcagataactatcggggctctgcaccagagtccgagaaagagacgaaagctgtcactaatttcattagaagccacctgaatgaaatcaaggtttacatcaccttccattcctactcccagatgctattgtttccctatggatatacatcaaaactgccacctaaccatgaggacttggccaaagttgcaaagattggcactgatgttctatcaactcgatatgaaacccgctacatctatggcccaatagaatcaacaatttacccgatatcaggttcttctttagactgggcttatgacctgggcatcaaacacacatttgcctttgagctccgagataaaggcaaatttggttttctccttccagaatcccggataaagccaacgtgcagagagaccatgctagctgtcaaatttattgccaagtatatcctcaagcatacttcctaaagaactgccctctgtttggaataagccaattaatccttttttgtgcctttcatcagaaagtcaatcttcagttatccccaaatgcagcttctatttcacctgaatccttctcttgctcatttaagtcccatgttactgctgtttgcttttacttactttcagtagcaccataacgaagtagctttaagtgaaaccttttaactacctttctttgctccaagtgaagtttggacccagcagaaagcattattttgaaaggtgatatacagtggggcacagaaaacaaatgaaaaccttcagtttctcacagattttcaccatgtggcttcatcaatttatgtgctaatacaataaaataaaatgcacttaatgctttaaaattcatctttttatgataaactatattctctgtatttctctatagcattaataatcaatattaatgccattcattcagtctgttaataagaaataatatcttcaattttc

SEQ ID NO: 114278 - DNA, 2797 bp, Homo sapiens
  Payload ID: 2338
  Gene Symbol: CPA4
  Gene Name: carboxypeptidase A4
  Uniprot ID: Q9UI42
  ENST ID: ENST00000222482
  CDS Start-End: 29-1294
gccactgtatgactgactccccggggacatgaggtggatactgttcattggggcccttattgggtccagcatctgtggccaagaaaaattttttggggaccaagttttgaggattaatgtcagaaatggagacgagatcagcaaattgagtcaactagtgaattcaaacaacttgaagctcaatttctggaaatctccctcctccttcaatcggcctgtggatgtcctggtcccatctgtcagtctgcaggcatttaaatccttcctgagatcccagggcttagagtacgcagtgacaattgaggacctgcaggcccttttagacaatgaagatgatgaaatgcaacacaatgaagggcaagaacggagcagtaataacttcaactacggggcttaccattccctggaagctatttaccacgagatggacaacattgccgcagactttcctgacctggcgaggagggtgaagattggacattcgtttgaaaaccggccgatgtatgtactgaagttcagcactgggaaaggcgtgaggcggccggccgtttggctgaatgcaggcatccattcccgagagtggatctcccaggccactgcaatctggacggcaaggaagattgtatctgattaccagagggatccagctatcacctccatcttggagaaaatggatattttcttgttgcctgtggccaatcctgatggatatgtgtatactcaaactcaaaaccgattatggaggaagacgcggtcccgaaatcctggaagctcctgcattggtgctgacccaaatagaaactggaacgctagttttgcaggaaagggagccagcgacaacccttgctccgaagtgtaccatggaccccacgccaattcggaagtggaggtgaaatcagtggtagatttcatccaaaaacatgggaatttcaagggcttcatcgacctgcacagctactcgcagctgctgatgtatccatatgggtactcagtcaaaaaggccccagatgccgaggaactcgacaaggtggcgaggcttgcggccaaagctctggcttctgtgtcgggcactgagtaccaagtgggtcccacctgcaccactgtctatccagctagcgggagcagcatcgactgggcatatgacaacggcatcaaatttgcattcacatttgagttgagagataccgggacctatggcttcctcctgccagctaaccagatcatccccactgcagaggagacgtggctggggctgaagaccatcatggagcatgtgcgggacaacctctactaggcgatggctctgctctgtctacatttatttgtacccacacgtgcacgcactgaggccattgttaaaggagctctttcctacctgtgtgagtcagagccctctgggtttgtggagcacacaggcctgcccctctccagccagctccctggagtcgtgtgtcctggcagtgtccctgcaagaactggttctgccagcctgctcaattttggtcctgctgtttttgatgagccttttgtctgtttctccttccaccctgctggctgggcggctgcactcagcatcaccccttcctgggtggcatgtctctctctacctcatttttagaaccaaagaacatctgagatgattctctaccctcatccacatctagccaagccagtgaccttgctctggtggcactgtgggagacaccacttgtctttaggtgggtctcaaagatgatgtagaatttcctttaatttctcgcagtcttcctggaaaatattttcctttgagcagcaaatcttgtagggatatcagtgaaggtctctccctccctcctctcctgtttttttttttttgagacagagttttgctcttgttgcccaggctggagtgtgatggctcgatcttggctcaccacaacctctgcctcctgggttcaagcaattctcctgcctcagcctcttgagtagcttggtttataggcgcatgccaccatgcctggctaattttgtgtttttagtagagacagggtttctccatgttggtcaggctggtctcaaactcccaacctcaggtgatctgccctccttggcctcccagagtgctgggattacaggtgtgagccactgtgccgggcccgtcccctccttttttaggcctgaatacaaagtagaagatcactttccttcactgtgctgagaatttctagatactacagttcttactcctctcttccctttgttattcagtgtgaccaggatggcgggaggggatctgtgtcactgtaggtactgtgcccaggaaggctgggtgaagtgaccatctaaattgcaggatggtgaaattatccccatctgtcctaatgggcttacctcctctttgccttttgaactcacttcaaagatctaggcctcatcttacaggtcctaaatcactcatctggcctggataatctcactgccctggcacattcccatttgtgctgtggtgtatcctgtgtttccttgtcctggtttgtgtgtgtgtgtgtgtgtgtgtgtgtgtgtgtgtgtgtgtttgtgtgtgtgtgtctgtctattttgtatcctggaccacaagttcctaagtagagcaagaattcatcaaccagctgcctcttgtttcatttcacctcagcacgtaccatctgtccttttgttgttgttttgtttttgtttttttgcttttaccaaacatgtctgtaaatcttaacctcctgcctaggatttgtacagcatctggtgtgtgcttataagccaataaatattcaatgtgagtttc

SEQ ID NO: 114279 - DNA, 2718 bp, Homo sapiens
  Payload ID: 2338
  Gene Symbol: CPA4
  Gene Name: carboxypeptidase A4
  Uniprot ID: Q9UI42
  ENST ID: ENST00000445470
  CDS Start-End: 48-1214
ataaatacagcttgactcagccactgtatgactgactccccggggacatgaggtggatactgttcattggggcccttattgggtccagcatctgtggccaagaaaaattttttggggaccaagttttgaggattaatgtcagaaatggagacgagatcagcaaattgagtcaactagtgaattcaaacaacttgaagctcaatttctggaaatctccctcctccttcaatcggcctgtggatgtcctggtcccatctgtcagtctgcaggcatttaaatccttcctgagatcccagggcttagagtacgcagtgacaattgaggacctgcagatttaccacgagatggacaacattgccgcagactttcctgacctggcgaggagggtgaagattggacattcgtttgaaaaccggccgatgtatgtactgaagttcagcactgggaaaggcgtgaggcggccggccgtttggctgaatgcaggcatccattcccgagagtggatctcccaggccactgcaatctggacggcaaggaagattgtatctgattaccagagggatccagctatcacctccatcttggagaaaatggatattttcttgttgcctgtggccaatcctgatggatatgtgtatactcaaactcaaaaccgattatggaggaagacgcggtcccgaaatcctggaagctcctgcattggtgctgacccaaatagaaactggaacgctagttttgcaggaaagggagccagcgacaacccttgctccgaagtgtaccatggaccccacgccaattcggaagtggaggtgaaatcagtggtagatttcatccaaaaacatgggaatttcaagggcttcatcgacctgcacagctactcgcagctgctgatgtatccatatgggtactcagtcaaaaaggccccagatgccgaggaactcgacaaggtggcgaggcttgcggccaaagctctggcttctgtgtcgggcactgagtaccaagtgggtcccacctgcaccactgtctatccagctagcgggagcagcatcgactgggcatatgacaacggcatcaaatttgcattcacatttgagttgagagataccgggacctatggcttcctcctgccagctaaccagatcatccccactgcagaggagacgtggctggggctgaagaccatcatggagcatgtgcgggacaacctctactaggcgatggctctgctctgtctacatttatttgtacccacacgtgcacgcactgaggccattgttaaaggagctctttcctacctgtgtgagtcagagccctctgggtttgtggagcacacaggcctgcccctctccagccagctccctggagtcgtgtgtcctggcagtgtccctgcaagaactggttctgccagcctgctcaattttggtcctgctgtttttgatgagccttttgtctgtttctccttccaccctgctggctgggcggctgcactcagcatcaccccttcctgggtggcatgtctctctctacctcatttttagaaccaaagaacatctgagatgattctctaccctcatccacatctagccaagccagtgaccttgctctggtggcactgtgggagacaccacttgtctttaggtgggtctcaaagatgatgtagaatttcctttaatttctcgcagtcttcctggaaaatattttcctttgagcagcaaatcttgtagggatatcagtgaaggtctctccctccctcctctcctgtttttttttttttgagacagagttttgctcttgttgcccaggctggagtgtgatggctcgatcttggctcaccacaacctctgcctcctgggttcaagcaattctcctgcctcagcctcttgagtagcttggtttataggcgcatgccaccatgcctggctaattttgtgtttttagtagagacagggtttctccatgttggtcaggctggtctcaaactcccaacctcaggtgatctgccctccttggcctcccagagtgctgggattacaggtgtgagccactgtgccgggcccgtcccctccttttttaggcctgaatacaaagtagaagatcactttccttcactgtgctgagaatttctagatactacagttcttactcctctcttccctttgttattcagtgtgaccaggatggcgggaggggatctgtgtcactgtaggtactgtgcccaggaaggctgggtgaagtgaccatctaaattgcaggatggtgaaattatccccatctgtcctaatgggcttacctcctctttgccttttgaactcacttcaaagatctaggcctcatcttacaggtcctaaatcactcatctggcctggataatctcactgccctggcacattcccatttgtgctgtggtgtatcctgtgtttccttgtcctggtttgtgtgtgtgtgtgtgtgtgtgtgtgtgtgtgtgtgtgtgtttgtgtgtgtgtgtctgtctattttgtatcctggaccacaagttcctaagtagagcaagaattcatcaaccagctgcctcttgtttcatttcacctcagcacgtaccatctgtccttttgttgttgttttgtttttgtttttttgcttttaccaaacatgtctgtaaatcttaacctcctgcctaggatttgtacagcatctggtgtgtgcttataagccaataaatattcaatgtgagtttca

SEQ ID NO: 114280 - DNA, 535 bp, Homo sapiens
  Payload ID: 2338
  Gene Symbol: CPA4
  Gene Name: carboxypeptidase A4
  ENST ID: ENST00000492072
  CDS Start-End: 21-535
atgactgactccccggggacatgaggtggatactgttcattggggcccttattgggtccagcatctgtggccaagaaaaattttttggggaccaagttttgaggattaatgtcagaaatggagacgagatcagcaaattgagtcaactagtgaattcaaacaacttgaagctcaatttctggaaatctccctcctccttcaatcggcctgtggatgtcctggtcccatctgtcagtctgcaggcatttaaatccttcctgagatcccagggcttagagtacgcagtgacaattgaggacctgcaggcccttttagacaatgaagatgatgaaatgcaacacaatgaagggcaagaacggagcagtaataacttcaactacggggcttaccattccctggaagctatttaccacgagatggacaacattgccgcagactttcctgacctggcgaggagggtgaagattggacattcgtttgaaaaccggccgatgtatgtactgaagattgtatctgattaccagagggatccagc

SEQ ID NO: 114281 - DNA, 568 bp, Homo sapiens
  Payload ID: 2338
  Gene Symbol: CPA4
  Gene Name: carboxypeptidase A4
  ENST ID: ENST00000486598
  CDS Start-End: 482-568
atttcagaaatatgggagccaaatggaactgaaaatgaatggctgataatagctcacatggaggaagaagacctgggctcttgttccagctttgcccctgtgtcatcctggacaagtccactctcttctctgagaccccatttcatctgtgaaatcaggactagatgatcattgcagtctctccccagctccctcatctcctgccagttctttttctgcctagttcttacttataagggaccaagttttgaggattaatgtcagaaatggagacgagatcagcaaattgagtcaactagtgaattcaaacaacttgaagctcaatttctggaaatctccctcctccttcaatcggcctgtggatgtcctggtcccatctgtcagtctgcaggcatttaaatccttcctgagatcccagggcttagagtacgcagtgacaattgaggacctgcaggcccttttagacaatgaagatgatgaaatgcaacacaatgaagggcaagaacggagcagtaataacttcaactacggggcttaccattccctggaagctatttaccacgagatg

SEQ ID NO: 114282 - DNA, 551 bp, Homo sapiens
  Payload ID: 2338
  Gene Symbol: CPA4
  Gene Name: carboxypeptidase A4
  ENST ID: ENST00000473956
  CDS Start-End: 19-551
gactgactccccggggacatgaggtggatactgttcattggggcccttattgggtccagcatctgtggccaagaaaaattttttggggaccaagttttgaggattaatgtcagaaatggagacgagatcagcaaattgagtcaactagtgaattcaaacaacttgaagctcaatttctggaaatctccctcctccttcaatcggcctgtggatgtcctggtcccatctgtcagtctgcaggcatttaaatccttcctgagatcccagggcttagagtacgcagtgacaattgaggacctgcagatttaccacgagatggacaacattgccgcagactttcctgacctggcgaggagggtgaagattggacattcgtttgaaaaccggccgatgtatgtactgaagttcagcactgggaaaggcgtgaggcggccggccgtttggctgaatgcaggcatccattcccgagagtggatctcccaggccactgcaatctggacggcaaggaagattgtatctgattaccagagggatccagctatcacctccat

SEQ ID NO: 114283 - DNA, 1512 bp, Homo sapiens
  Payload ID: 2338
  Gene Symbol: CPA4
  Gene Name: carboxypeptidase A4
  ENST ID: ENST00000493259
  CDS Start-End: 114-1067
gactgactccccggggacatgaggtggatactgttcattggggcccttattgggtccagcatctgtggccaagaaaaattttttgggcccttttagacaatgaagatgatgaaatgcaacacaatgaagggcaagaacggagcagtaataacttcaactacggggcttaccattccctggaagctatttaccacgagatggacaacattgccgcagactttcctgacctggcgaggagggtgaagattggacattcgtttgaaaaccggccgatgtatgtactgaagttcagcactgggaaaggcgtgaggcggccggccgtttggctgaatgcaggcatccattcccgagagtggatctcccaggccactgcaatctggacggcaaggaagattgtatctgattaccagagggatccagctatcacctccatcttggagaaaatggatattttcttgttgcctgtggccaatcctgatggatatgtgtatactcaaactcaaaaccgattatggaggaagacgcggtcccgaaatcctggaagctcctgcattggtgctgacccaaatagaaactggaacgctagttttgcaggaaagggagccagcgacaacccttgctccgaagtgtaccatggaccccacgccaattcggaagtggaggtgaaatcagtggtagatttcatccaaaaacatgggaatttcaagggcttcatcgacctgcacagctactcgcagctgctgatgtatccatatgggtactcagtcaaaaaggccccagatgccgaggaactcgacaaggtggcgaggcttgcggccaaagctctggcttctgtgtcgggcactgagtaccaagtgggtcccacctgcaccactgtctatccagctagcgggagcagcatcgactgggcatatgacaacggcatcaaatttgcattcacatttgagttgagagataccgggacctatggcttcctcctgccagctaaccagatcatccccactgcagaggagacgtggctggggctgaagaccatcatggagcatgtgcgggacaacctctactaggcgatggctctgctctgtctacatttatttgtacccacacgtgcacgcactgaggccattgttaaaggagctctttcctacctgtgtgagtcagagccctctgggtttgtggagcacacaggcctgcccctctccagccagctccctggagtcgtgtgtcctggcagtgtccctgcaagaactggttctgccagcctgctcaattttggtcctgctgtttttgatgagccttttgtctgtttctccttccaccctgctggctgggcggctgcactcagcatcaccccttcctgggtggcatgtctctctctacctcatttttagaaccaaagaacatctgagatgattctctaccctcatccacatctagccaagccagtgaccttgctctggtggcactgtgggagacaccacttgtctttaggtgggtctcaaagatgatgta

SEQ ID NO: 114284 - DNA, 1444 bp, Homo sapiens
  Payload ID: 2339
  Gene Symbol: CPA5
  Gene Name: carboxypeptidase A5
  Uniprot ID: Q8WXQ8
  ENST ID: ENST00000393213
  CDS Start-End: 1-1311
atgcagggcacccctggaggcgggacgcgccctgggccatcccccgtggacaggcggacactcctggtcttcagctttatcctggcagcagctttgggccaaatgaatttcacaggggaccaggttcttcgagtcctggccaaagatgagaagcagctttcacttctcggggatctggagggcctgaaaccccagaaggtggacttctggcgtggcccagccaggcccagcctccctgtggatatgagagttcctttctctgaactgaaagacatcaaagcttatctggagtctcatggacttgcttacagcatcatgataaaggacatccaggtgctgctggatgaggaaagacaggccatggcgaaatcccgccggctggagcgcagcaccaacagcttcagttactcatcataccacaccctggaggagatatatagctggattgacaactttgtaatggagcattccgatattgtctcaaaaattcagattggcaacagctttgaaaaccagtccattcttgtcctgaagttcagcactggaggttctcggcacccagccatctggattgacactggaattcactcccgggagtggatcacccatgccaccggcatctggactgccaataagattgtcagtgattatggcaaagaccgtgtcctgacagacatactgaatgccatggacatcttcatagagctcgtcacaaaccctgatgggtttgcttttacccacagcatgaaccgcttatggcggaagaacaagtccatcagacctggaatcttctgcatcggcgtggatctcaacaggaactggaagtcgggttttggaggaaatggttctaacagcaacccctgctcagaaacttatcacgggccctcccctcagtcggagccggaggtggctgccatagtgaacttcatcacagcccatggcaacttcaaggctctgatctccatccacagctactctcagatgcttatgtacccttacggccgattgctggagcccgtttcaaatcagagggagttgtacgatcttgccaaggatgcggtggaggccttgtataaggtccatgggatcgagtacatttttggcagcatcagcaccaccctctatgtggccagtgggatcaccgtcgactgggcctatgacagtggcatcaagtacgccttcagctttgagctccgggacactgggcagtatggcttcctgctgccggccacacagatcatccccacggcccaggagacgtggatggcgcttcggaccatcatggagcacaccctgaatcacccctactagcagcacgactgagggcaggaggctccatccttctccccaaggtctgtggctcctcccgaaacccaagttatgcatccccatccccatgccctcatcccgacctcttagaaaataaatacaagtttgaacaggc

SEQ ID NO: 114285 - DNA, 1803 bp, Homo sapiens
  Payload ID: 2339
  Gene Symbol: CPA5
  Gene Name: carboxypeptidase A5
  Uniprot ID: Q8WXQ8
  ENST ID: ENST00000431780
  CDS Start-End: 446-1657
ctctcactctctctcttttcccacccttaagccaagtacagggatagttgtctcatcattggtggcttaaaatgatgtttttgaacaagaagacgccccatgggtacttttggtgactagcactatctctgtttttttccttttaaattcctgagctattgtttagcagtacacccttttatctccattgctactgaagctgaatgttacttgggtggaaagcataactgctttcttttctatgtccttaaaccctttgataatgttactgtttgagagtccctgaagccaggatactagaagagtctggcttgtctgaacagctgaactacgaaataatggagtagggcaggctgggctttccagcctctaggtgctgtgctgtcctgaggcctgggccatggtgcccaaggaaagcccctgaagctcaccaggaggaagaagcatgcagggcacccctggaggcgggacgcgccctgggccatcccccgtggacaggcggacactcctggtcttcagctttatcctggcagcagctttgggccaaatgaatttcacaggggaccaggttcttcgagtcctggccaaagatgagaagcagctttcacttctcggggatctggagggcctgaaaccccagaaggtggacttctggcgtggcccagccaggcccagcctccctgtggatatgagagttcctttctctgaactgaaagacatcaaagcttatctggagtctcatggacttgcttacagcatcatgataaaggacatccaggtgctgctggatgaggaaagacaggccatggcgaaatcccgccggctggagcgcagcaccaacagcttcagttactcatcataccacaccctggaggagatatatagctggattgacaactttgtaatggagcattccgatattgtctcaaaaattcagattggcaacagctttgaaaaccagtccattcttgtcctgaagttcagcactggaggttctcggcacccagccatctggattgacactggaattcactcccgggagtggatcacccatgccaccggcatctggactgccaataagattgtcagtgattatggcaaagaccgtgtcctgacagacatactgaatgccatggacatcttcatagagctcgtcacaaaccctgatgggtttgcttttacccacagcatgaaccgcttatggcggaagaacaagtccatcagacctggaatcttctgcatcggcgtggatctcaacaggaactggaagtcgggttttggaggaaatggttctaacagcaacccctgctcagaaacttatcacgggccctcccctcagtcggagccggaggtggctgccatagtgaacttcatcacagcccatggcaacttcaaggctctgatctccatccacagctactctcagatgcttatgtacccttacggccgattgctggagcccgtttcaaatcagagggagttgatgtggccagtgggatcaccgtcgactgggcctatgacagtggcatcaagtacgccttcagctttgagctccgggacactgggcagtatggcttcctgctgccggccacacagatcatccccacggcccaggagacgtggatggcgcttcggaccatcatggagcacaccctgaatcacccctactagcagcacgactgagggcaggaggctccatccttctccccaaggtctgtggctcctcccgaaacccaagttatgcatccccatccccatgccctcatcccgacctcttagaaaataaatacaagtttgaacagg

SEQ ID NO: 114286 - DNA, 1940 bp, Homo sapiens
  Payload ID: 2339
  Gene Symbol: CPA5
  Gene Name: carboxypeptidase A5
  Uniprot ID: Q8WXQ8
  ENST ID: ENST00000474905
  CDS Start-End: 497-1807
tctctctcttttcccacccttaagccaagtacagggatagttgtctcatcattggtggcttaaaatgatgtttttgaacaagaagacgccccatgggtacttttggtgactagcactatctctgtttttttccttttaaattcctgagctattgtttagcagtacacccttttatctccattgctactgaagctgaatgttacttgggtggaaagcataactgctttcttttctatgtccttaaaccctttgataatgttactgtttgagagtccctgaagccaggatactagaagagtctggcttgtctgaacagctgaactacgaaataatggagtagggcaggctttaccaagccaattcactcaagttgtctcatctataccccttcaaaccctgtgaggctgggctttccagcctctaggtgctgtgctgtcctgaggcctgggccatggtgcccaaggaaagcccctgaagctcaccaggaggaagaagcatgcagggcacccctggaggcgggacgcgccctgggccatcccccgtggacaggcggacactcctggtcttcagctttatcctggcagcagctttgggccaaatgaatttcacaggggaccaggttcttcgagtcctggccaaagatgagaagcagctttcacttctcggggatctggagggcctgaaaccccagaaggtggacttctggcgtggcccagccaggcccagcctccctgtggatatgagagttcctttctctgaactgaaagacatcaaagcttatctggagtctcatggacttgcttacagcatcatgataaaggacatccaggtgctgctggatgaggaaagacaggccatggcgaaatcccgccggctggagcgcagcaccaacagcttcagttactcatcataccacaccctggaggagatatatagctggattgacaactttgtaatggagcattccgatattgtctcaaaaattcagattggcaacagctttgaaaaccagtccattcttgtcctgaagttcagcactggaggttctcggcacccagccatctggattgacactggaattcactcccgggagtggatcacccatgccaccggcatctggactgccaataagattgtcagtgattatggcaaagaccgtgtcctgacagacatactgaatgccatggacatcttcatagagctcgtcacaaaccctgatgggtttgcttttacccacagcatgaaccgcttatggcggaagaacaagtccatcagacctggaatcttctgcatcggcgtggatctcaacaggaactggaagtcgggttttggaggaaatggttctaacagcaacccctgctcagaaacttatcacgggccctcccctcagtcggagccggaggtggctgccatagtgaacttcatcacagcccatggcaacttcaaggctctgatctccatccacagctactctcagatgcttatgtacccttacggccgattgctggagcccgtttcaaatcagagggagttgtacgatcttgccaaggatgcggtggaggccttgtataaggtccatgggatcgagtacatttttggcagcatcagcaccaccctctatgtggccagtgggatcaccgtcgactgggcctatgacagtggcatcaagtacgccttcagctttgagctccgggacactgggcagtatggcttcctgctgccggccacacagatcatccccacggcccaggagacgtggatggcgcttcggaccatcatggagcacaccctgaatcacccctactagcagcacgactgagggcaggaggctccatccttctccccaaggtctgtggctcctcccgaaacccaagttatgcatccccatccccatgccctcatcccgacctcttagaaaataaatacaagtttgaacaggc

SEQ ID NO: 114287 - DNA, 390 bp, Homo sapiens
  Payload ID: 2339
  Gene Symbol: CPA5
  Gene Name: carboxypeptidase A5
  ENST ID: ENST00000479492
  CDS Start-End: 1-257
agtccatcagacctggaatcttctgcatcggcgtggatctcaacaggaactggaagtcgggttttggagatgtggccagtgggatcaccgtcgactgggcctatgacagtggcatcaagtacgccttcagctttgagctccgggacactgggcagtatggcttcctgctgccggccacacagatcatccccacggcccaggagacgtggatggcgcttcggaccatcatggagcacaccctgaatcacccctactagcagcacgactgagggcaggaggctccatccttctccccaaggtctgtggctcctcccgaaacccaagttatgcatccccatccccatgccctcatcccgacctcttagaaaataaatacaagtttgaacaggc

SEQ ID NO: 114288 - DNA, 1794 bp, Homo sapiens
  Payload ID: 2339
  Gene Symbol: CPA5
  Gene Name: carboxypeptidase A5
  Uniprot ID: Q8WXQ8
  ENST ID: ENST00000461828
  CDS Start-End: 484-1794
aactgcttctctctctctcttttactcttattctttctctctcactctctctcttttcccacccttaagccaagtacagggatagttgtctcatcattggtggcttaaaatgatgtttttgaacaagaagacgccccatgggtacttttggtgactagcactatctctgtttttttccttttaaattcctgagctattgtttagcagtacacccttttatctccattgctactgaagctgaatgttacttgggtggaaagcataactgctttcttttctatgtccttaaaccctttgataatgttactgtttgagagtccctgaagccaggatactagaagagtctggcttgtctgaacagctgaactacgaaataatggagtagggcaggctgggctttccagcctctaggtgctgtgctgtcctgaggcctgggccatggtgcccaaggaaagcccctgaagctcaccaggaggaagaagcatgcagggcacccctggaggcgggacgcgccctgggccatcccccgtggacaggcggacactcctggtcttcagctttatcctggcagcagctttgggccaaatgaatttcacaggggaccaggttcttcgagtcctggccaaagatgagaagcagctttcacttctcggggatctggagggcctgaaaccccagaaggtggacttctggcgtggcccagccaggcccagcctccctgtggatatgagagttcctttctctgaactgaaagacatcaaagcttatctggagtctcatggacttgcttacagcatcatgataaaggacatccaggtgctgctggatgaggaaagacaggccatggcgaaatcccgccggctggagcgcagcaccaacagcttcagttactcatcataccacaccctggaggagatatatagctggattgacaactttgtaatggagcattccgatattgtctcaaaaattcagattggcaacagctttgaaaaccagtccattcttgtcctgaagttcagcactggaggttctcggcacccagccatctggattgacactggaattcactcccgggagtggatcacccatgccaccggcatctggactgccaataagattgtcagtgattatggcaaagaccgtgtcctgacagacatactgaatgccatggacatcttcatagagctcgtcacaaaccctgatgggtttgcttttacccacagcatgaaccgcttatggcggaagaacaagtccatcagacctggaatcttctgcatcggcgtggatctcaacaggaactggaagtcgggttttggaggaaatggttctaacagcaacccctgctcagaaacttatcacgggccctcccctcagtcggagccggaggtggctgccatagtgaacttcatcacagcccatggcaacttcaaggctctgatctccatccacagctactctcagatgcttatgtacccttacggccgattgctggagcccgtttcaaatcagagggagttgtacgatcttgccaaggatgcggtggaggccttgtataaggtccatgggatcgagtacatttttggcagcatcagcaccaccctctatgtggccagtgggatcaccgtcgactgggcctatgacagtggcatcaagtacgccttcagctttgagctccgggacactgggcagtatggcttcctgctgccggccacacagatcatccccacggcccaggagacgtggatggcgcttcggaccatcatggagcacaccctgaatcacccctactag

SEQ ID NO: 114289 - DNA, 552 bp, Homo sapiens
  Payload ID: 2339
  Gene Symbol: CPA5
  Gene Name: carboxypeptidase A5
  ENST ID: ENST00000497503
  CDS Start-End: 528-552
aactgcttctctctctctcttttactcttattctttctctctcactctctctcttttcccacccttaagccaagtacagggatagttgtctcatcattggtggcttaaaatgatgtttttgaacaagaagacgccccatgggtacttttggtgactagcactatctctgtttttttccttttaaattcctgagctattgtttagcagtacacccttttatctccattgctactgaagctgaatgttacttgggtggaaagcataactgctttcttttctatgtccttaaaccctttgataatgttactgtttgagagtccctgaagccaggatactagaagagtctggcttgtctgaacagctgaactacgaaataatggagtagggcaggctttaccaagccaattcactcaagttgtctcatctataccccttcaaaccctgtgagcctctaggtgctgtgctgtcctgaggcctgggccatggtgcccaaggaaagcccctgaagctcaccaggaggaagaagcatgcagggcacccctggaggcggga

SEQ ID NO: 114290 - DNA, 2099 bp, Homo sapiens
  Payload ID: 2339
  Gene Symbol: CPA5
  Gene Name: carboxypeptidase A5
  Uniprot ID: Q8WXQ8
  ENST ID: ENST00000466363
  CDS Start-End: 656-1966
ctctctctcttttactcttattctttctctctcactctctctcttttcccacccttaagccaagtacagggatagttgtctcatcattggtggcttaaaatgatgtttttgaacaagaagacgccccatgggtacttttggtgactagcactatctctgtttttttccttttaaattcctgagctattgtttagcagtacacccttttatctccattgctactgaagctgaatgttacttgggtggaaagcataactgctttcttttctatgtccttaaaccctttgataatgttactgtttgagagtccctgaagccaggatactagaagagtctggcttgtctgaacagctgaactacgaaataatggagtagggcaggtgggtgggggagcagggcgttctgtcgataaacgagctcccttctttgcacacatagccagttaatcggccattctgagatagtttggatggggagggggagcttctgagaatcgccagtgacagctttaccaagccaattcactcaagttgtctcatctataccccttcaaaccctgtgaggtagggaggggagcctctaggtgctgtgctgtcctgaggcctgggccatggtgcccaaggaaagcccctgaagctcaccaggaggaagaagcatgcagggcacccctggaggcgggacgcgccctgggccatcccccgtggacaggcggacactcctggtcttcagctttatcctggcagcagctttgggccaaatgaatttcacaggggaccaggttcttcgagtcctggccaaagatgagaagcagctttcacttctcggggatctggagggcctgaaaccccagaaggtggacttctggcgtggcccagccaggcccagcctccctgtggatatgagagttcctttctctgaactgaaagacatcaaagcttatctggagtctcatggacttgcttacagcatcatgataaaggacatccaggtgctgctggatgaggaaagacaggccatggcgaaatcccgccggctggagcgcagcaccaacagcttcagttactcatcataccacaccctggaggagatatatagctggattgacaactttgtaatggagcattccgatattgtctcaaaaattcagattggcaacagctttgaaaaccagtccattcttgtcctgaagttcagcactggaggttctcggcacccagccatctggattgacactggaattcactcccgggagtggatcacccatgccaccggcatctggactgccaataagattgtcagtgattatggcaaagaccgtgtcctgacagacatactgaatgccatggacatcttcatagagctcgtcacaaaccctgatgggtttgcttttacccacagcatgaaccgcttatggcggaagaacaagtccatcagacctggaatcttctgcatcggcgtggatctcaacaggaactggaagtcgggttttggaggaaatggttctaacagcaacccctgctcagaaacttatcacgggccctcccctcagtcggagccggaggtggctgccatagtgaacttcatcacagcccatggcaacttcaaggctctgatctccatccacagctactctcagatgcttatgtacccttacggccgattgctggagcccgtttcaaatcagagggagttgtacgatcttgccaaggatgcggtggaggccttgtataaggtccatgggatcgagtacatttttggcagcatcagcaccaccctctatgtggccagtgggatcaccgtcgactgggcctatgacagtggcatcaagtacgccttcagctttgagctccgggacactgggcagtatggcttcctgctgccggccacacagatcatccccacggcccaggagacgtggatggcgcttcggaccatcatggagcacaccctgaatcacccctactagcagcacgactgagggcaggaggctccatccttctccccaaggtctgtggctcctcccgaaacccaagttatgcatccccatccccatgccctcatcccgacctcttagaaaataaatacaagtttgaacaggc

SEQ ID NO: 114291 - DNA, 562 bp, Homo sapiens
  Payload ID: 2339
  Gene Symbol: CPA5
  Gene Name: carboxypeptidase A5
  ENST ID: ENST00000494311
  CDS Start-End: 467-562
tgcttctctctctctcttttactcttattctttctctctcactctctctcttttcccacccttaagccaagtacagggatagttgtctcatcattggtggcttaaaatgatgtttttgaacaagaagacgccccatgggtacttttggtgactagcactatctctgtttttttccttttaaattcctgagctattgtttagcagtacacccttttatctccattgctactgaagctgaatgttacttgggtggaaagcataactgctttcttttctatgtccttaaaccctttgataatgttactgtttgagagtccctgaagccaggatactagaagagtctggcttgtctgaacagctgaactacgaaataatggagtagggcagcctctaggtgctgtgctgtcctgaggcctgggccatggtgcccaaggaaagcccctgaagctcaccaggaggaagaagcatgcagggcacccctggaggcgggacgcgccctgggccatcccccgtggacaggcggacactcctggtcttcagctttatcctggcagcagctttg

SEQ ID NO: 114292 - DNA, 592 bp, Homo sapiens
  Payload ID: 2339
  Gene Symbol: CPA5
  Gene Name: carboxypeptidase A5
  ENST ID: ENST00000463587
  CDS Start-End: 223-592
aactgcttctctctctctcttttactcttattctttctctctcactctctctcttttcccacccttaagccaagtacagggatagttgtctcatcattggtggcttaaaatgatgtttttgaacaagaagacgccccatgggtacttttggtgctgtgctgtcctgaggcctgggccatggtgcccaaggaaagcccctgaagctcaccaggaggaagaagcatgcagggcacccctggaggcgggacgcgccctgggccatcccccgtggacaggcggacactcctggtcttcagctttatcctggcagcagctttgggccaaatgaatttcacaggggaccaggttcttcgagtcctggccaaagatgagaagcagctttcacttctcggggatctggagggcctgaaaccccagaaggtggacttctggcgtggcccagccaggcccagcctccctgtggatatgagagttcctttctctgaactgaaagacatcaaagcttatctggagtctcatggacttgcttacagcatcatgataaaggacatccaggtgctgctggatgaggaaagacaggccatggcgaaat

SEQ ID NO: 114293 - DNA, 2573 bp, Homo sapiens
  Payload ID: 2339
  Gene Symbol: CPA5
  Gene Name: carboxypeptidase A5
  Uniprot ID: Q8WXQ8
  ENST ID: ENST00000485477
  CDS Start-End: 1130-2440
tctttctctctcactctctctcttttcccacccttaagccaagtacagggatagttgtctcatcattggtggcttaaaatgatgtttttgaacaagaagacgccccatgggtacttttggtgactagcactatctctgtttttttccttttaaattcctgagctattgtttagcagtacacccttttatctccattgctactgaagctgaatgttacttgggtggaaagcataactgctttcttttctatgtccttaaaccctttgataatgttactgtttgagagtccctgaagccaggatactagaagagtctggcttgtctgaacagctgaactacgaaataatggagtagggcaggtgggtgggggagcagggcgttctgtcgataaacgagctcccttctttgcacacatagccagttaatcggccattctgagatagtttggatggggagggggagcttctgagaatcgccagtgacagttaagtggcctattgttgacgtcctctgctgaacgacttggttggattcagcttctgccttacccccaccccctgtggattttctgttagattcatcatttgccattcaggcatcatctttcactttctccttccaacatgactgctttgtgtgctggcccctgctttactcctgctattcccaaactataaagggaactgtgtggggcttcagcaggactgagaaattgactctgctgtctgttgagaactctaataatgactgcggtgaccttcatgtctagcagaaaacccactgtctgtgctagcacaatgatgaccacctgaagacagagaaaagggaatcttgattgaattccttctcatacaatatatagttatttcctttgttctcctctccattctcttctcttccccttctccccatcgccactggaggactgatctcaaatgcagctgtgactaaaagttaatgccttttgaataataatacattgcattttgcaggctttaccaagccaattcactcaagttgtctcatctataccccttcaaaccctgtgagcctctaggtgctgtgctgtcctgaggcctgggccatggtgcccaaggaaagcccctgaagctcaccaggaggaagaagcatgcagggcacccctggaggcgggacgcgccctgggccatcccccgtggacaggcggacactcctggtcttcagctttatcctggcagcagctttgggccaaatgaatttcacaggggaccaggttcttcgagtcctggccaaagatgagaagcagctttcacttctcggggatctggagggcctgaaaccccagaaggtggacttctggcgtggcccagccaggcccagcctccctgtggatatgagagttcctttctctgaactgaaagacatcaaagcttatctggagtctcatggacttgcttacagcatcatgataaaggacatccaggtgctgctggatgaggaaagacaggccatggcgaaatcccgccggctggagcgcagcaccaacagcttcagttactcatcataccacaccctggaggagatatatagctggattgacaactttgtaatggagcattccgatattgtctcaaaaattcagattggcaacagctttgaaaaccagtccattcttgtcctgaagttcagcactggaggttctcggcacccagccatctggattgacactggaattcactcccgggagtggatcacccatgccaccggcatctggactgccaataagattgtcagtgattatggcaaagaccgtgtcctgacagacatactgaatgccatggacatcttcatagagctcgtcacaaaccctgatgggtttgcttttacccacagcatgaaccgcttatggcggaagaacaagtccatcagacctggaatcttctgcatcggcgtggatctcaacaggaactggaagtcgggttttggaggaaatggttctaacagcaacccctgctcagaaacttatcacgggccctcccctcagtcggagccggaggtggctgccatagtgaacttcatcacagcccatggcaacttcaaggctctgatctccatccacagctactctcagatgcttatgtacccttacggccgattgctggagcccgtttcaaatcagagggagttgtacgatcttgccaaggatgcggtggaggccttgtataaggtccatgggatcgagtacatttttggcagcatcagcaccaccctctatgtggccagtgggatcaccgtcgactgggcctatgacagtggcatcaagtacgccttcagctttgagctccgggacactgggcagtatggcttcctgctgccggccacacagatcatccccacggcccaggagacgtggatggcgcttcggaccatcatggagcacaccctgaatcacccctactagcagcacgactgagggcaggaggctccatccttctccccaaggtctgtggctcctcccgaaacccaagttatgcatccccatccccatgccctcatcccgacctcttagaaaataaatacaagtttgaacaggc

SEQ ID NO: 114294 - DNA, 1861 bp, Homo sapiens
  Payload ID: 2340
  Gene Symbol: CPA6
  Gene Name: carboxypeptidase A6
  Uniprot ID: Q8N4T0
  ENST ID: ENST00000297770
  CDS Start-End: 217-1530
cccaagaccaagtcgtaatagcaacttcccttcctcagctgcctgaactttttttttcccttgtagctggagagaagtgtcacattttgctcactctcaaccttcctcgcccacccccttcccggagaacctgtgcggtgtgtagagggtgctgtgagccacctccagcctcgggtggctgcttaagtaactttcaactcctctcttcttaacactatgaagtgtctcgggaagcgcaggggccaggcagctgctttcctgcctctttgctggctctttttgaagattctgcaaccggggcacagccacctttataacaaccgctatgctggtgataaagtgataagatttattcccaaaacagaagaggaagcatatgcactgaagaaaatatcctatcaacttaaggtggacctgtggcagcccagcagtatctcctatgtatcagagggaacagttactgatgtccatatcccccaaaatggttcccgagccctgttagccttcttacaggaagccaacatccagtacaaggtcctcatagaagatcttcagaaaacactggagaagggaagcagcttgcacacccagagaaaccgaagatccctctctggatataattatgaagtttatcactccttagaagaaattcaaaattggatgcatcatctgaataaaactcactcaggcctcattcacatgttctctattggaagatcatatgagggaagatctctttttattttaaagctgggcagacgatcacgactcaaaagagctgtttggatagactgtggtattcatgcaagagaatggattggtcctgccttttgtcagtggtttgtaaaagaagctcttctaacatataagagtgacccagccatgagaaaaatgttgaatcatctatatttctatatcatgcctgtgtttaacgtcgatggataccattttagttggaccaatgatcgattttggagaaaaacaaggtcaaggaactcaaggtttcgctgccgtggagtggatgccaatagaaactggaaagtgaagtggtgtgatgaaggagcttctatgcacccttgtgatgacacatactgtggcccttttccagaatctgagccggaagtgaaggctgtagctaacttccttcgaaaacacagaaagcacattagggcttatctctcctttcatgcatatgctcagatgttactgtatccctattcttacaaatatgcaacaattcccaattttagatgtgtggaatctgcagcttataaagctgtgaatgcacttcagtcagtatacggggtacgatacagatatggaccagcctccacaacgttgtatgtgagctctggtagctcaatggattgggcctacaaaaatggaataccttatgcatttgctttcgaactacgtgacactggatattttggatttttactcccagagatgctcatcaaacccacctgtacagaaactatgctggctgtgaaaaatatcacaatgcacctgctaaagaaatgtccctgagacagcccaaggctcaggtcaactgccataggattctgagcaaggcctacttggccctggatagaaattgttttcaaagagaagggcagctgcttagagtgaacatgtctatggactttaaaaagaccccacgcaatttgactttgtggcaatagaaaacagtaaaaaacagggcatagcctagtttgttataagaaaaagcatccattttctatccttttagagtcttatttgattatggtgggagggaatgttttcaaatttcccatttctcaagaaatgttcatattaattgaggatttcccttcaataaatctcatgtcctcaatta

SEQ ID NO: 114295 - DNA, 1494 bp, Homo sapiens
  Payload ID: 2340
  Gene Symbol: CPA6
  Gene Name: carboxypeptidase A6
  ENST ID: ENST00000479862
  CDS Start-End: 215-493
caagaccaagtcgtaatagcaacttcccttcctcagctgcctgaactttttttttcccttgtagctggagagaagtgtcacattttgctcactctcaaccttcctcgcccacccccttcccggagaacctgtgcggtgtgtagagggtgctgtgagccacctccagcctcgggtggctgcttaagtaactttcaactcctctcttcttaacactatgaagtgtctcgggaagcgcaggggccaggcagctgctttcctgcctctttgctggctctttttgaagattctgcaaccggggcacagccacctttataacaaccgctatgctggtgataaagtgataagatttattcccaaaacagaagaggaagcatatgcactgaagaaaatatcctatcaacttaagggtcctcatagaagatcttcagaaaacactggagaagggaagcagcttgcacacccagagaaaccgaagatccctctctggatataattatgaagtttatcactccttagaagaaattcaaaattggatgcatcatctgaataaaactcactcaggcctcattcacatgttctctattggaagatcatatgagggaagatctctttttattttaaagctgggcagacgatcacgactcaaaagagctgtttggatagactgtggtattcatgcaagagaatggattggtcctgccttttgtcagtggtttgtaaaagaagctcttctaacatataagagtgacccagccatgagaaaaatgttgaatcatctatatttctatatcatgcctgtgtttaacgtcgatggataccattttagttggaccaatgatcgattttggagaaaaacaaggtcaaggaactcaaggtttcgctgccgtggagtggatgccaatagaaactggaaagtgaagtggtgtgatgtgagctctggtagctcaatggattgggcctacaaaaatggaataccttatgcatttgctttcgaactacgtgacactggatattttggatttttactcccagagatgctcatcaaacccacctgtacagaaactatgctggctgtgaaaaatatcacaatgcacctgctaaagaaatgtccctgagacagcccaaggctcaggtcaactgccataggattctgagcaaggcctacttggccctggatagaaattgttttcaaagagaagggcagctgcttagagtgaacatgtctatggactttaaaaagaccccacgcaatttgactttgtggcaatagaaaacagtaaaaaacagggcatagcctagtttgttataagaaaaagcatccattttctatccttttagagtcttatttgattatggtgggagggaatgttttcaaatttcccatttctcaagaaatgttcatattaattgaggatttcccttcaataaatctcatgtcctcaattaggatctaggctagtaatgatgtttaattacttggttctcattggaaat

SEQ ID NO: 114296 - DNA, 1538 bp, Homo sapiens
  Payload ID: 2340
  Gene Symbol: CPA6
  Gene Name: carboxypeptidase A6
  Uniprot ID: Q8N4T0
  ENST ID: ENST00000518549
  CDS Start-End: 215-1162
caagaccaagtcgtaatagcaacttcccttcctcagctgcctgaactttttttttcccttgtagctggagagaagtgtcacattttgctcactctcaaccttcctcgcccacccccttcccggagaacctgtgcggtgtgtagagggtgctgtgagccacctccagcctcgggtggctgcttaagtaactttcaactcctctcttcttaacactatgaagtgtctcgggaagcgcaggggccaggcagctgctttcctgcctctttgctggctctttttgaagattctgcaaccggggcacagccacctttataacaaccgctatgctggtgataaagtgataagatttattcccaaaacagaagaggaagcatatgcactgaagaaaatatcctatcaacttaaggtggacctgtggcagcccagcagtatctcctatgtatcagagggaacagttactgatgtccatatcccccaaaatggttcccgagccctgttagccttcttacaggaagccaacatccagtacaaggtcctcatagaagatcttcagaaaacactggagaagggaagcagcttgcacacccagagaaaccgaagatccctctctggatataattatgaagtttatcactccttagaagaaattcaaaattggatgcatcatctgaataaaactcactcaggcctcattcacatgttctctattggaagatcatatgagggaagatctctttttattttaaagctgggcagacgatcacgactcaaaagagctgtttggatagactgtggtattcatgcaagagaatggattggtcctgccttttgtcagtggtttgtaaaagaagctcttctaacatataagagtgacccagccatgagaaaaatgttgaatcatctatatttctatatcatgcctgtgtttaacgtcgatggataccattttagttggaccaatgatcgattttggagaaaaacaaggtcaaggaactcaaggtttcgctgccgtggagtggatgccaatagaaactggaaagtgaagtggtgtggtaagtttgggaccaactgggatccagatccaaaggtttctgcaggttttactctgcaaaatatgagtccagaggactctcatgggagactcatgtttttctgtatgtgaaaacctggtagagaaaggtacagatacgtacatgatagctgtaattggcaaaagaaaatgaaaggattcttttttaatatataaaaatcaaggattttaaatatgtcaattcggtcctgaaaactgaaaatttaaatacatatgtaaaagcagcaaactgaggaatatttgtcattccccaaattaaaacatgaaccgtggtgtagtataattctggttaaatctttttatccttttcatacaagcaccactgatgctgcattcggctgtctgtcgtggtcagagctgtcatgaccttgtctatattctaccactctgctggtcatacgtggattgaccatgcacattgggaatgtatttctgctgcattccatgt

SEQ ID NO: 114297 - DNA, 1458 bp, Homo sapiens
  Payload ID: 2341
  Gene Symbol: CPB1
  Gene Name: carboxypeptidase B1 (tissue)
  Uniprot ID: P15086
  ENST ID: ENST00000282957
  CDS Start-End: 24-1277
cccactagacctggtcagacacaatgttggcactcttggttctggtgactgtggccctggcatctgctcatcatggtggtgagcactttgaaggcgagaaggtgttccgtgttaacgttgaagatgaaaatcacattaacataatccgcgagttggccagcacgacccagattgacttctggaagccagattctgtcacacaaatcaaacctcacagtacagttgacttccgtgttaaagcagaagatactgtcactgtggagaatgttctaaagcagaatgaactacaatacaaggtactgataagcaacctgagaaatgtggtggaggctcagtttgatagccgggttcgtgcaacaggacacagttatgagaagtacaacaagtgggaaacgatagaggcttggactcaacaagtcgccactgagaatccagccctcatctctcgcagtgttatcggaaccacatttgagggacgcgctatttacctcctgaaggttggcaaagctggacaaaataagcctgccattttcatggactgtggtttccatgccagagagtggatttctcctgcattctgccagtggtttgtaagagaggctgttcgtacctatggacgtgagatccaagtgacagagcttctcgacaagttagacttttatgtcctgcctgtgctcaatattgatggctacatctacacctggaccaagagccgattttggagaaagactcgctccacccatactggatctagctgcattggcacagaccccaacagaaattttgatgctggttggtgtgaaattggagcctctcgaaacccctgtgatgaaacttactgtggacctgccgcagagtctgaaaaggagaccaaggccctggctgatttcatccgcaacaaactctcttccatcaaggcatatctgacaatccactcgtactcccaaatgatgatctacccttactcatatgcttacaaactcggtgagaacaatgctgagttgaatgccctggctaaagctactgtgaaagaacttgcctcactgcacggcaccaagtacacatatggcccgggagctacaacaatctatcctgctgctgggggctctgacgactgggcttatgaccaaggaatcagatattccttcacctttgaacttcgagatacaggcagatatggctttctccttccagaatcccagatccgggctacctgcgaggagaccttcctggcaatcaagtatgttgccagctacgtcctggaacacctgtactagttgagaaagctgatggccttgtttcaaaattctcatttttcatttcttttctttcttgaattcttattttggtttgcctggatgttttgcagatcccaatctttcttttaagcttctgggtctattaaactaggtagatcttttcgtattgatcataataaaagtgaatcattactattgg

SEQ ID NO: 114298 - DNA, 584 bp, Homo sapiens
  Payload ID: 2341
  Gene Symbol: CPB1
  Gene Name: carboxypeptidase B1 (tissue)
  ENST ID: ENST00000462345
  CDS Start-End: 287-584
gatatcacaatgatatggtttggctgtgtcccctctgagaagagggctaccatcttccagttaaattggactttaactagaagtccaattaaacctctttttgttcctagtttcaggtgttgagagagataccctctcagactttacacagctaccaaggcaacaatgccaggaaaactattaatcaagatatgatagttcctgtttgcaatcaggagaagaaagcaaagaacactcaggattataaaagcagatgagacctacccactagacctggtcagacacaatgttggcactcttggttctggtgactgtggccctggcatctgctcatcatggtggtgagcactttgaaggcgagaaggtgttccgtgttaacgttgaagatgaaaatcacattaacataatccgcgagttggccagcacgacccagattgacttctggaagccagattctgtcacacaaatcaaacctcacagtacagttgacttccgtgttaaagcagaagatactgtcactgtggagaatgttctaaagcagaatgaactacaatacaaggtactgataagcaacctgagaaatg

SEQ ID NO: 114299 - DNA, 1773 bp, Homo sapiens
  Payload ID: 2341
  Gene Symbol: CPB1
  Gene Name: carboxypeptidase B1 (tissue)
  Uniprot ID: P15086
  ENST ID: ENST00000491148
  CDS Start-End: 335-1588
aaagtctccagaatgaggaaatgttggaagcaaataatatattcagctgagcattcttcctggcagtgggagcaggagcctgatttggaccttaaaagcttagtggcaacaacaaataagcattggcctggaaaatccacatcccaacaggctaaacaaggcaggtgttgagagagataccctctcagactttacacagctaccaaggcaacaatgccaggaaaactattaatcaagatatgatagttcctgtttgcaatcaggagaagaaagcaaagaacactcaggattataaaagcagatgagacctacccactagacctggtcagacacaatgttggcactcttggttctggtgactgtggccctggcatctgctcatcatggtggtgagcactttgaaggcgagaaggtgttccgtgttaacgttgaagatgaaaatcacattaacataatccgcgagttggccagcacgacccagattgacttctggaagccagattctgtcacacaaatcaaacctcacagtacagttgacttccgtgttaaagcagaagatactgtcactgtggagaatgttctaaagcagaatgaactacaatacaaggtactgataagcaacctgagaaatgtggtggaggctcagtttgatagccgggttcgtgcaacaggacacagttatgagaagtacaacaagtgggaaacgatagaggcttggactcaacaagtcgccactgagaatccagccctcatctctcgcagtgttatcggaaccacatttgagggacgcgctatttacctcctgaaggttggcaaagctggacaaaataagcctgccattttcatggactgtggtttccatgccagagagtggatttctcctgcattctgccagtggtttgtaagagaggctgttcgtacctatggacgtgagatccaagtgacagagcttctcgacaagttagacttttatgtcctgcctgtgctcaatattgatggctacatctacacctggaccaagagccgattttggagaaagactcgctccacccatactggatctagctgcattggcacagaccccaacagaaattttgatgctggttggtgtgaaattggagcctctcgaaacccctgtgatgaaacttactgtggacctgccgcagagtctgaaaaggagaccaaggccctggctgatttcatccgcaacaaactctcttccatcaaggcatatctgacaatccactcgtactcccaaatgatgatctacccttactcatatgcttacaaactcggtgagaacaatgctgagttgaatgccctggctaaagctactgtgaaagaacttgcctcactgcacggcaccaagtacacatatggcccgggagctacaacaatctatcctgctgctgggggctctgacgactgggcttatgaccaaggaatcagatattccttcacctttgaacttcgagatacaggcagatatggctttctccttccagaatcccagatccgggctacctgcgaggagaccttcctggcaatcaagtatgttgccagctacgtcctggaacacctgtactagttgagaaagctgatggccttgtttcaaaattctcatttttcatttcttttctttcttgaattcttattttggtttgcctggatgttttgcagatcccaatctttcttttaagcttctgggtctattaaactaggtagatcttttcgtattgatcataataaaagtgaatcattactattggaaaa

SEQ ID NO: 114300 - DNA, 585 bp, Homo sapiens
  Payload ID: 2341
  Gene Symbol: CPB1
  Gene Name: carboxypeptidase B1 (tissue)
  ENST ID: ENST00000494888
  CDS Start-End: 408-585
gcactccagcctgggcgacagagcgagactcctactcaaaaaaaaaaagacttcaaagcaaatacagaaagttacatagttgcaggaaacaacaacaacaacaacaactttgctcttttaatacaaaggactcagttgtcttaagtaatcaaagacctaataatagaaaacataaagcacagaaaattattttgataagacacaaaatctttgttttctagtcagagccctctaaaggtgttgagagagataccctctcagactttacacagctaccaaggcaacaatgccaggaaaactattaatcaagatatgatagttcctgtttgcaatcaggagaagaaagcaaagaacactcaggattataaaagcagatgagacctacccactagacctggtcagacacaatgttggcactcttggttctggtgactgtggccctggcatctgctcatcatggtggtgagcactttgaaggcgagaaggtgttccgtgttaacgttgaagatgaaaatcacattaacataatccgcgagttggccagcacgacccagattgacttctggaagccagattctgtcacac

SEQ ID NO: 114301 - DNA, 614 bp, Homo sapiens
  Payload ID: 2341
  Gene Symbol: CPB1
  Gene Name: carboxypeptidase B1 (tissue)
  ENST ID: ENST00000468341
  CDS Start-End: 5-614
cacaatgttggcactcttggttctggtgactgtggccctggcatctgctcatcatggtggtgagcactttgaaggcgagaaggtgttccgtgttaacgttgaagatgaaaatcacattaacataatccgcgagttggccagcacgacccagattgacttctggaagccagattctgtcacacaaatcaaacctcacagtacagttgacttccgtgttaaagcagaagatactgtcactgtggagaatgttctaaagcagaatgaactacaatacaaggtactgataagcaacctgagaaatgtggtggaggctcagtttgatagccgggttcgtgcaacaggacacagttatgagaagtacaacaagtgggaaacggttggcaaagctggacaaaataagcctgccattttcatggactgtggtttccatgccagagagtggatttctcctgcattctgccagtggtttgtaagagaggctgttcgtacctatggacgtgagatccaagtgacagagcttctcgacaagttagacttttatgtcctgcctgtgctcaatattgatggctacatctacacctggaccaagagccgattttggagaaagactcgct

SEQ ID NO: 114302 - DNA, 1717 bp, Homo sapiens
  Payload ID: 2342
  Gene Symbol: CPB2
  Gene Name: carboxypeptidase B2 (plasma)
  Uniprot ID: Q96IY4
  ENST ID: ENST00000181383
  CDS Start-End: 18-1289
agaaaattgctgttgggatgaagctttgcagccttgcagtccttgtacccattgttctcttctgtgagcagcatgtcttcgcgtttcagagtggccaagttctagctgctcttcctagaacctctaggcaagttcaagttctacagaatcttactacaacatatgagattgttctctggcagccggtaacagctgaccttattgtgaagaaaaaacaagtccatttttttgtaaatgcatctgatgtcgacaatgtgaaagcccatttaaatgtgagcggaattccatgcagtgtcttgctggcagatgtggaagatcttattcaacagcagatttccaacgacacagtcagcccccgagcctccgcatcgtactatgaacagtatcactcactaaatgaaatctattcttggatagaatttataactgagaggcatcctgatatgcttacaaaaatccacattggatcctcatttgagaagtacccactctatgttttaaaggtttctggaaaagaacaagcagccaaaaatgccatatggattgactgtggaatccatgccagagaatggatctctcctgctttctgcttgtggttcataggccatataactcaattctatgggataatagggcaatataccaatctcctgaggcttgtggatttctatgttatgccagtggttaatgtggatggttatgactactcatggaaaaagaatcgaatgtggagaaagaaccgttctttctatgcgaacaatcattgcatcggaacagacctgaataggaactttgcttccaaacactggtgtgaggaaggtgcatccagttcctcatgctcggaaacctactgtggactttatcctgagtcagaaccagaagtgaaggcagtggctagtttcttgagaagaaatatcaaccagattaaagcatacatcagcatgcattcatactcccagcatatagtgtttccatattcctatacacgaagtaaaagcaaagaccatgaggaactgtctctagtagccagtgaagcagttcgtgctattgagaaaattagtaaaaataccaggtatacacatggccatggctcagaaaccttatacctagctcctggaggtggggacgattggatctatgatttgggcatcaaatattcgtttacaattgaacttcgagatacgggcacatacggattcttgctgccggagcgttacatcaaacccacctgtagagaagcttttgccgctgtctctaaaatagcttggcatgtcattaggaatgtttaatgcccctgattttatcattctgcttccgtattttaatttactgattccagcaagaccaaatcattgtatcaaattatttttaagttttatccgtagttttgataaaagattttcctattccttggttctgtcagagaacctaataagtgctactttgccattaaggcagactagggttcatgtctttttaccctttaaaaaaaattgtaaaagtctagttacctactttttctttgattttcgacgtttgactagccatctcaagcaagtttcgacgtttgactagccatctcaagcaagtttaatcaatgatcatctcacgctgatcattggatcctactcaacaaaaggaagggtggtcagaagtacattaaagatttctgctccaaattttcaataaatttctgcttgtgcctttagaaatacaa

SEQ ID NO: 114303 - DNA, 1655 bp, Homo sapiens
  Payload ID: 2342
  Gene Symbol: CPB2
  Gene Name: carboxypeptidase B2 (plasma)
  ENST ID: ENST00000439329
  CDS Start-End: 68-1228
gttatgcaatcaatgatctgggtttttctcttcagagaaatttgttgtacagaaaattgctgttgggatgaagctttgcagccttgcagtccttgtacccattgttctcttctgtgagcagcatgtcttcgcgtttcagagtggccaagttctagctgctcttcctagaacctctaggcaagttcaagttctacagaatcttactacaacatatgagattgttctctggcagccggtaacagctgaccttattgtgaagaaaaaacaagtccatttttttgtaaatgcatctgatgtcgacaatgtgaaagcccatttaaatgtgagcggaattccatgcagtgtcttgctggcagatgtggaagatcttattcaacagcagatttccaacgacacagtcagcccccgagcctccgcatcgtactatgaacagtatcactcactaaatgaaatctattcttggatagaatttataactgagaggcatcctgatatgcttacaaaaatccacattggatcctcatttgagaagtacccactctatgttttaaaggtttctggaaaagaacaagcagccaaaaatgccatatggattgactgtggaatccatgccagagaatggatctctcctgctttctgcttgtggttcataggccataatcgaatgtggagaaagaaccgttctttctatgcgaacaatcattgcatcggaacagacctgaataggaactttgcttccaaacactggtgtgaggaaggtgcatccagttcctcatgctcggaaacctactgtggactttatcctgagtcagaaccagaagtgaaggcagtggctagtttcttgagaagaaatatcaaccagattaaagcatacatcagcatgcattcatactcccagcatatagtgtttccatattcctatacacgaagtaaaagcaaagaccatgaggaactgtctctagtagccagtgaagcagttcgtgctattgagaaaattagtaaaaataccaggtatacacatggccatggctcagaaaccttatacctagctcctggaggtggggacgattggatctatgatttgggcatcaaatattcgtttacaattgaacttcgagatacgggcacatacggattcttgctgccggagcgttacatcaaacccacctgtagagaagcttttgccgctgtctctaaaatagcttggcatgtcattaggaatgtttaatgcccctgattttatcattctgcttccgtattttaatttactgattccagcaagaccaaatcattgtatcaaattatttttaagttttatccgtagttttgataaaagattttcctattccttggttctgtcagagaacctaataagtgctactttgccattaaggcagactagggttcatgtctttttaccctttaaaaaaaattgtaaaagtctagttacctactttttctttgattttcgacgtttgactagccatctcaagcaagtttcgacgtttgactagccatctcaagcaagtttaatcaatgatcatctcacgctgatcattggatcctactcaacaaaaggaagggtggtcagaagtacattaaagatttctgctccaaattttcaataaatttctgcttgtgcctttagaaataca

SEQ ID NO: 114304 - DNA, 9394 bp, Homo sapiens
  Payload ID: 2343
  Gene Symbol: CPD
  Gene Name: carboxypeptidase D
  Uniprot ID: O75976
  ENST ID: ENST00000225719
  CDS Start-End: 77-4219
ggggatccggcgggcccccgccgcccggagcgctgagccgcgggagcggagccggggttagcggcgctgctggaagatggcgagcggccgggacgagcggccgccttggcggctagggcggctcctgttgctcatgtgcctgctgctgctggggagctcggcccgggcggctcacatcaagaaggcggaggcgactaccacaactacgagcgcgggcgccgaggcggccgagggccagttcgaccgctactaccacgaagaggagttggagtcggcgctgagggaggcggcggccgcgggcctccccggcctggcccgcctctttagcatcggccgctcggtggaaggccggccgctgtgggtgcttcgcctcaccgccggcctggggtcgctaatccctgagggcgacgcggggcctgacgctgccgggcccgacgctgcggggccgctgctgcccggccggccccaggtgaagctggtgggcaacatgcatggcgacgagaccgtgtcgcgccaggtgttgatctacttggcccgcgagctggcggccggctaccgccgcggggacccgcgcctggtccgcctgctcaacaccaccgacgtgtacctgctgcccagcctcaaccccgatggcttcgagcgtgcccgcgagggcgactgtggcttcggcgacggcggcccgtccggggccagcggccgcgacaatagtcgcggccgcgacctcaaccgaagctttcccgaccagtttagcaccggcgaaccccccgccctggacgaggtgcccgaggtgcgcgccctcatcgagtggatccgcaggaacaagtttgtgctttctggaaatctgcatggtggctcagtggtagcaagctatccttttgatgattctccagaacataaggccactggaatctatagcaaaacctcagatgatgaagtatttaaatacttggcaaaagcttatgcttcaaaccaccccataatgaaaactggtgagcctcattgtccaggagatgaagacgagactttcaaagatggaatcacaaacggcgcacattggtatgatgtggaaggtggtatgcaagattacaattatgtgtgggccaactgttttgagatcacattagaactgtcttgttgcaagtacccacctgcttcacagcttcgacaggaatgggagaacaatcgtgagtctttgatcacattgattgaaaaggttcacattggagtgaaaggatttgttaaagattccataacaggatctgggttagagaatgcaaccatctcagtggctggtattaatcataatatcacaacaggcagatttggtgatttctaccgattacttgttcctggaacttacaaccttacagtagttttaactgggtatatgccattgactgttactaatgtagtggtgaaagaaggaccagccacagaggtggatttttctcttaggccaactgtaacttcagtaatccctgacacgacagaggctgtatcaactgctagcacagttgctatacctaatattctttctggaacatcatcctcctaccagccaattcagccaaaggactttcaccaccaccatttccctgatatggaaatcttcttgagaaggtttgccaatgaatatcctaacattacccggctttattccttgggaaaatcagtagagtcaagagaactttatgtgatggagatatctgataatccgggtgtccatgaaccaggtgaaccagaatttaagtacattggaaatatgcatggaaatgaagtggttggaagagaactgctgttgaacctcatagaatacctttgtaagaactttggaacagaccctgaagtcacagatttggttcataacactagaattcaccttatgccatccatgaatcctgatgggtatgaaaagtcccaggaaggagattcaataagtgtaattggcagaaacaacagcaacaactttgacctgaaccgaaatttcccagaccagtttgttcagatcacagatcctacgcaaccagaaactattgctgtaatgagctggatgaagtcctatccatttgtactttcagcaaacctgcatggaggttctttggtggttaactacccttttgatgatgatgaacaaggacttgccacatatagtaaatcaccagatgatgctgtgttccaacaaatagcactttcttattccaaggaaaattcccagatgtttcaaggtagaccttgcaagaatatgtatcctaatgaatattttcctcatggaataacaaatggagctagttggtataatgtgccaggaggaatgcaggactggaactatttacaaacaaattgctttgaagtgactattgaactaggttgtgtgaaatatccacttgagaaagagctgccaaacttttgggaacagaatcgaagatcactaatccagtttatgaaacaggttcatcagggcgtcagaggatttgttctagatgccacagatggcaggggtatattaaatgccaccattagtgttgctgagattaatcacccagtgactacttacaaaactggagattactggcgtctcttggttccaggaacttataaaatcacagcatctgctcgagggtataatccagttaccaagaatgtgactgtcaagagtgaaggcgctattcaggtcaacttcacacttgttcgatcctcaacagattcaaacaatgaatcaaagaaaggaaaaggggctagcagcagcaccaatgatgccagtgatccaactactaaagagtttgaaactttaattaaagacctttcagcggagaatggtttggaaagcctcatgttacgctcctcctcaaatctggctctggctctttatcgataccattcctacaaagacttatcagagtttctgagaggacttgtaatgaactatccacatattacaaatcttaccaatttgggacagagcactgaatatcgtcacatttggtcccttgaaatctccaataagcccaatgtatctgagcctgaagaaccaaagattcgttttgttgctggtatccatggaaatgcgccagttggaactgaactgcttttggctctggcagaatttctctgcctgaactacaaaaagaacccagctgttacccaattggttgacaggactaggattgtgattgtcccttctctaaatccagatgggcgagagagagctcaagagaaagactgtacttcaaaaataggacaaacaaatgctcgtggcaaagatttggatacagacttcacaaataatgcctcccaacctgagaccaaagccatcattgaaaatttgattcaaaaacaggactttagtctttctgttgccttagatggtggttccatgctggtcacatatccttatgacaagccagtacagacagtggaaaataaagagactctgaagcatttggcatctctttatgcaaataatcatccatccatgcacatgggtcagcccagttgcccaaataaatcagatgagaatattccaggaggagtaatgcgtggagcagaatggcatagtcacctgggcagcatgaaggattatagtgtcacctatggccattgtccggaaatcacagtatacacaagctgctgttactttcctagtgctgcacgactcccttccttgtgggcagacaataagagatctcttcttagtatgttagtggaggttcacaagggagttcatggatttgttaaagataagactggaaagccaatctctaaagcagtcattgtacttaatgaaggaataaaggtacaaacaaaagagggaggttatttccatgtactcttagcgccaggtgtccataacattattgccatcgctgatgggtaccagcaacaacattcacaggtctttgtgcatcatgatgcagctagttctgtggtgatagtctttgacacagataaccggatatttggtttgccaagggagcttgtggtaactgtatcaggtgctactatgtcggcattgatcctaacagcttgcattatttggtgcatctgctcaatcaagtctaatagacacaaggatggctttcatcggctcaggcagcatcatgatgagtatgaagatgaaattcgcatgatgtctaccggctccaagaagtccctcctaagccatgagttccaggatgaaacagacactgaagaggaaacattatattctagcaaacattgaaaaacacattttgcatatctcccagcataagtaccaagcaaaattacagttcctcttgggagaacactgcattaagaagagagactctcttgcttcttcaaagagctttgggaaattaaattgctaaatttgtattctctgtgaatttcactggcagttttgaacttcccttccttaaagtactctaaacctttaaaaaaaaatctgatttatgcagcagagatgggacagccactttttctttttaatttaagatgagctatttggagcttatgtaataatggcataaagccaactagaggatgttgtattttgcacatcagatgtttactagtggctttagtatttttctttgttttaaatggccaaaagaatccagaaacattaaggcagggacagcagtcagaatcgacataaagctttaaaaactcaaggttttttcaacctactgaggagtacttttctctagttgttaaatagctggagtttttcttattcaggtttaatggaggttgaattgatttttaaacacatataacagtaggaaatgaataaatgggcttctgcatttggctttctacctgttccaaggctagatcggaactggtagactacgctgtaagcaggatttcactacctctcttaaggtttagcaaacttctaaatagcccattttaagggagaacttactaactttattgtgaaaggtctaaatgcccacttgaatgaagctgagagagagatctagcaaaagctaaaactcatgttgtctatctttgaacttggtaaaaacccacaggtgctgctgcttatatctgtgaagcactagcttattctaggaatgcctgattctttaatattgcctaaatcggaacctttttctatgttgcacacatggttttcagatgacccagccatctacaagatctgaattctactgaaaatatctagaaatgtggaagagacctacttgcacattcttaacctgtatttgaacacaaaatatctatacttcatgctccagcccaagcctataccctgtaatagcatactattattgaaatcgcttgaccggtcttgttcacataggcctctgggagtgatttggttctttgccctaatgtttcatttgacggtctctttttgatcaaccaatttttctaaaagttcagtcgaaagcttttaagtatagcttcctcccttgaaaaaaaatgtaaactatgactgctgagtgataaaacactgtggtgtgaaagtgtcatcttcactgccaatcaggcaaagaccggaaagatttgcattttattatgtctgtcttatcatgcaatggaaatgatgctttttgtaagtatgcatcttaccaatgatgtaacggtttaatacctttgaatgttttaataaccaagttgctgctgaacttatactaaatcaggggaccaaaaaacttgctcttatcttctcaaattgtattctatatccattaatgtatcagttatcccaaagccttcaggtggaggggtttaccaccttcctaggtcgttcaaccaggttttgtgaggaatgcattcaaagtggctttataaaagaagattttctttagcaagaataatgaggtcatgtcatttgttaataagtatctgtgataaatccgtggttcaaggttaagccattctggtattctggtattagcaactgtaaattctgccacctcatacatggaacagagcttgtgggatgctaatagttagtgaagtatacatgatttaatttctaataatctttatgttttctttaaggatggtggtgtattgctctttttcagctttatttttaagagtacagtcaggaaaccaacaaggggcctaagagtggctgcccctgcttgggacattacagcaagtgaaacaaagttaatgtgacaagctttgctttgttatcattggtcttcactagaggataccttttacatgtacttctctcttggatcaaatatgtctttaactgtacatctcagtggctggaggccatgccttttaagcatgtgtaaaatttttaaagaaatgaacatacacatagttattttagtaatatttcctgaaagaaaaaccaaattctgctataagtcttgatcttcaatgaacttttaaataatgcatttagctggaaaacaagactttcccagcttgtattacctagaagcgtgaatgtataggatacctgactactaagactatattctcagccctgccctgtcttttatttgcgggtctaatctaatattagaatatattaaccgcttaaggcattgaagccatatgggatggggaatgcatttcttcagtgtttctccgagagactttccatttccttggagttatggcggcaagtaagtatcatagtattaagaaatttgcctaaatctgagttgtgcctttctttactcacaaggcatgggctttgtcctggtgatcagtttgtaagccttcttccttcccagctccttaataaaagcaaagtgattgagtaggtaatgttcaaagtgtctgcctgtgtacatgtacttgtattgattatgtagttcagtaagatgtgcccaagtcatttcagaaagaaagacccttcagttttgatgcattttgctgaacacttgggtagtgagtgggatcctatccagttgaggaatgcttgcaatgctcattgaagggatttgctttgggactttgtcatcttccagaaaggaaacatattgtatatttggcccagtgtgattgattgctttatctttggtaacttttacttgaatgggatttgctgaattaatgactattgaatttaaaactaattatgagttgacaaataaataaaaggtagtgtttatgtctgagcttattgtgtttgagctaacaccaggttactcagtaaccatgacctgctcctccatttccatttattctcaacattaaatagttttatcttgttgttgccagaaatgcacttgtgccaggtattgtccctgctgtatgaaaagcttcttggcaatgaattctgtaatagtgccctacattatggttttctggtggaattgttttaacagtgacaacccaggatttccaatatatttttgttttattgttattaccaaaaattccactatgattgatgttcagtgattttctatagcaacttttttggtaactctttgggtttctgatttgttttagctaaaattttggggatatgatttgggtctttgattaatgtcagctgaacttggatttctagttcatgaagaaatctctcccaatacccatttatcctatttttagcaataattcgttaatgattccacttgattttcagaatattgtcctggttgattttgatttgacagcatacattatgaaatttgaaagtaggttaccattttgaggcagttggatataaattatgtaaatatgtatgattatgatttttataaatggcataacatgagtgtactaactaccttctatgctggccatgctacagattttctggaggtatgacaatagtatttttttatgctcagattaaaaatcagcttttcacctctccagtttttccaagtgatactcccagttctagagcaatctacagctgtttatgtgaggtgcccaacacccattcatctcaagtgcttcagtctttggtttatttcatgcactgtgccttcaaaatgaaatttttaaaagggactttaaatgaagttgaatagtagtttttaaaagtcaatttgtaatttatgtgaaatctaactgtaatgaggtcctttctgttttttatatgtaaacagatctactaatcctgtataaaagttattttacgatgtttgtctttctttgtgttttgtctcataatcttttttcagatgcaatatgccggaaaaagttataggtccagtttgaaaattatttagtttttctgcctatgctagtggaaaaatagtaccaggatcagaatacagggtatcacctatggaatgtttctgtatttatgaattgactcaaaagaaagctttgtttctgaaatcgcattatgtagtagccacagttttctgtttgtagctcagctagattgttatatatgttcaatcatttcacaataacaacacaaaactggtcattgaaaggtttttatgtacgcattttaaacttgttcgttaaaaatttggtcctttttccaggtgaggcccagttagaataatgtgtcccggcacttttaggcacagcaaggatgaattcaatatccccttttcacttagcaacaatgtgttacttctaccctaataggaattgggaaagcaaagttgtatgagaaacagactctgctgataaagtactcatagtccagaccagagaaatataaatggaaataggttatatttcaatagtgattggttcatctaaaagtctctgctgtaaaggaaataaagcatagaggtttgagcatggactttggagttggaccaatctgtgactgattcttcgttctgctacttgcttccaatgtgaccttgtacaagtttcttgacattctctgagcctcagtttctctactggttgaataatccttgataggattgcagtggaaaattaaatgaaataatgttagcaaaggtcccaacataatatttgacttggaattgaatgcccatggtaaccagcatcattttccttcatgtgatgtcttcttatgcctttgaaagaaagttactttatcaaatgtataaataaagatctgtttataggtgatctttttaatttagaagaaattctgagacacaaataaaaaaagaaattttttattatgtggttcaatagattgtctaaagcatggcagtaaagttttaattatgccaagatgcttcatatttgtttttaaatgaaattaagttgtatttatgcttctttagtgaaaacaacgttacttaactgctacaggaagtgtgaatagtgataacagttctttttctctcagtgtttgaaatattttcctgaattttcttagttttctcatacctgaatcaagaacccttttggtttgtttcataaacagtaatctagttattatgttcagcttttcagatttataatagctgattgttctcagcaaattaaacatgatggtcaacgctaa

SEQ ID NO: 114305 - DNA, 4007 bp, Homo sapiens
  Payload ID: 2343
  Gene Symbol: CPD
  Gene Name: carboxypeptidase D
  Uniprot ID: O75976
  ENST ID: ENST00000543464
  CDS Start-End: 403-3804
agtgtggctgggacttagaattaggcaatctgattcccgatagtcctcttagccacggagggacactggagcccaaaaatggcagatgatattcccaggatcttccccttgcctatttgacagaagctgatttttctccaatttttacctctgactcagcttaagaagatatggacttagctggagaacttgcacagatctgtgagccgcttcattttagactctgaagggtttgtgatgtcatttgtgcaccttattagcctgggcagaatggctaatggtcacacttctaatacacactttaagtgttattaagcattgcatgaggtttaaaaaattacaaagtagaagaaggaggacctcaagaaattagtataaaacaagagaatgttataaatatttatgaggtttgtgctttctggaaatctgcatggtggctcagtggtagcaagctatccttttgatgattctccagaacataaggccactggaatctatagcaaaacctcagatgatgaagtatttaaatacttggcaaaagcttatgcttcaaaccaccccataatgaaaactggtgagcctcattgtccaggagatgaagacgagactttcaaagatggaatcacaaacggcgcacattggtatgatgtggaaggtggtatgcaagattacaattatgtgtgggccaactgttttgagatcacattagaactgtcttgttgcaagtacccacctgcttcacagcttcgacaggaatgggagaacaatcgtgagtctttgatcacattgattgaaaaggttcacattggagtgaaaggatttgttaaagattccataacaggatctgggttagagaatgcaaccatctcagtggctggtattaatcataatatcacaacaggcagatttggtgatttctaccgattacttgttcctggaacttacaaccttacagtagttttaactgggtatatgccattgactgttactaatgtagtggtgaaagaaggaccagccacagaggtggatttttctcttaggccaactgtaacttcagtaatccctgacacgacagaggctgtatcaactgctagcacagttgctatacctaatattctttctggaacatcatcctcctaccagccaattcagccaaaggactttcaccaccaccatttccctgatatggaaatcttcttgagaaggtttgccaatgaatatcctaacattacccggctttattccttgggaaaatcagtagagtcaagagaactttatgtgatggagatatctgataatccgggtgtccatgaaccaggtgaaccagaatttaagtacattggaaatatgcatggaaatgaagtggttggaagagaactgctgttgaacctcatagaatacctttgtaagaactttggaacagaccctgaagtcacagatttggttcataacactagaattcaccttatgccatccatgaatcctgatgggtatgaaaagtcccaggaaggagattcaataagtgtaattggcagaaacaacagcaacaactttgacctgaaccgaaatttcccagaccagtttgttcagatcacagatcctacgcaaccagaaactattgctgtaatgagctggatgaagtcctatccatttgtactttcagcaaacctgcatggaggttctttggtggttaactacccttttgatgatgatgaacaaggacttgccacatatagtaaatcaccagatgatgctgtgttccaacaaatagcactttcttattccaaggaaaattcccagatgtttcaaggtagaccttgcaagaatatgtatcctaatgaatattttcctcatggaataacaaatggagctagttggtataatgtgccaggaggaatgcaggactggaactatttacaaacaaattgctttgaagtgactattgaactaggttgtgtgaaatatccacttgagaaagagctgccaaacttttgggaacagaatcgaagatcactaatccagtttatgaaacaggttcatcagggcgtcagaggatttgttctagatgccacagatggcaggggtatattaaatgccaccattagtgttgctgagattaatcacccagtgactacttacaaaactggagattactggcgtctcttggttccaggaacttataaaatcacagcatctgctcgagggtataatccagttaccaagaatgtgactgtcaagagtgaaggcgctattcaggtcaacttcacacttgttcgatcctcaacagattcaaacaatgaatcaaagaaaggaaaaggggctagcagcagcaccaatgatgccagtgatccaactactaaagagtttgaaactttaattaaagacctttcagcggagaatggtttggaaagcctcatgttacgctcctcctcaaatctggctctggctctttatcgataccattcctacaaagacttatcagagtttctgagaggacttgtaatgaactatccacatattacaaatcttaccaatttgggacagagcactgaatatcgtcacatttggtcccttgaaatctccaataagcccaatgtatctgagcctgaagaaccaaagattcgttttgttgctggtatccatggaaatgcgccagttggaactgaactgcttttggctctggcagaatttctctgcctgaactacaaaaagaacccagctgttacccaattggttgacaggactaggattgtgattgtcccttctctaaatccagatgggcgagagagagctcaagagaaagactgtacttcaaaaataggacaaacaaatgctcgtggcaaagatttggatacagacttcacaaataatgcctcccaacctgagaccaaagccatcattgaaaatttgattcaaaaacaggactttagtctttctgttgccttagatggtggttccatgctggtcacatatccttatgacaagccagtacagacagtggaaaataaagagactctgaagcatttggcatctctttatgcaaataatcatccatccatgcacatgggtcagcccagttgcccaaataaatcagatgagaatattccaggaggagtaatgcgtggagcagaatggcatagtcacctgggcagcatgaaggattatagtgtcacctatggccattgtccggaaatcacagtatacacaagctgctgttactttcctagtgctgcacgactcccttccttgtgggcagacaataagagatctcttcttagtatgttagtggaggttcacaagggagttcatggatttgttaaagataagactggaaagccaatctctaaagcagtcattgtacttaatgaaggaataaaggtacaaacaaaagagggaggttatttccatgtactcttagcgccaggtgtccataacattattgccatcgctgatgggtaccagcaacaacattcacaggtctttgtgcatcatgatgcagctagttctgtggtgatagtctttgacacagataaccggatatttggtttgccaagggagcttgtggtaactgtatcaggtgctactatgtcggcattgatcctaacagcttgcattatttggtgcatctgctcaatcaagtctaatagacacaaggatggctttcatcggctcaggcagcatcatgatgagtatgaagatgaaattcgcatgatgtctaccggctccaagaagtccctcctaagccatgagttccaggatgaaacagacactgaagaggaaacattatattctagcaaacattgaaaaacacattttgcatatctcccagcataagtaccaagcaaaattacagttcctcttgggagaacactgcattaagaagagagactctcttgcttcttcaaagagctttgggaaattaaattgctaaatttgtattctctgtgaatttcactggcagttttgaacttcccttccttaaagtactctaaacctttaaaaaaaaa

SEQ ID NO: 114306 - DNA, 680 bp, Homo sapiens
  Payload ID: 2343
  Gene Symbol: CPD
  Gene Name: carboxypeptidase D
  ENST ID: ENST00000584221
  CDS Start-End: 1-555
gttcatcagggcgtcagaggatttgttctagatgccacagatggcaggggtatattaaatgccaccattagtgttgctgagattaatcacccagtgactacttacaaaactggagattactggcgtctcttggttccaggaacttataaaatcacagcatctgctcgagggtataatccagttaccaagaatgtgactgtcaagagtgaaggcgctattcaggtcaacttcacacttgttcgatcctcaacagattcaaacaatgaatcaaagaaaggaaaaggggctagcagcagcaccaatgatgccagtgatccaactactaaagagtttgaaactttaattaaagacctttcagcggagaatggtttggaaagcctcatgttacgctcctcctcaaatctggctctggctctttatcgataccattcctacaaagacttatcagagtttctgagaggacttgtaatgaactatccacatattacaaatcttaccaatttgggaccaaaaaacttgctcttatcttctcaaattgtattctatatccattaatgtatcagttatcccaaagccttcaggtggaggggtttaccaccttcctaggtcgttcaaccaggttttgtgaggaatgcattcaaagtggctttataaaagaagattttctttagcaagaataa

SEQ ID NO: 114307 - DNA, 672 bp, Homo sapiens
  Payload ID: 2343
  Gene Symbol: CPD
  Gene Name: carboxypeptidase D
  ENST ID: ENST00000579502
  CDS Start-End: 1-249
aatgctcgtggcaaagatttggatacagacttcacaaataatgcctcccaacctgagaccaaagccatcattgaaaatttgattcaaaaacaggactttagtctttctgttgccttagatggtggttccatgctggtcacatatccttatgacaagccagtacagacagtggaaaataaagagactctgaagcatttggcatctctttatgcaaataatcatccatccatgcacatggttctgtggtgatagtctttgacacagataaccggatatttggtttgccaagggagcttgtggtaactgtatcaggtgctactatgtcggcattgatcctaacagcttgcattatttggtgcatctgctcaatcaagtctaatagacacaaggatggctttcatcggctcaggcagcatcatgatgagtatgaagatgaaattcgcatgatgtctaccggctccaagaagtccctcctaagccatgagttccaggatgaaacagacactgaagaggaaacattatattctagcaaacattgaaaaacacattttgcatatctcccagcataagtaccaagcaaaattacagttcctcttgggagaacactgcattaagaagagagactctcttgcttcttcaaagagctttgggaaattaaattgctaaatttgt

SEQ ID NO: 114308 - DNA, 394 bp, Homo sapiens
  Payload ID: 2343
  Gene Symbol: CPD
  Gene Name: carboxypeptidase D
  ENST ID: ENST00000584050
  CDS Start-End: 1-121
agttggaactgaactgcttttggctctggcagaatttctctgcctgaactacaaaaagaacccagctgttacccaaatgggcgagagagagctcaagagaaagactgtacttcaaaaataggacaaacaaatgctcgtggcaaagatttggatacagacttcacaaataatgcctcccaacctgagaccaaagccatcattgaaaatttgattcaaaaacaggactttagtctttctgttgccttagatggtggttccatgctggtcacatatccttatgacaagccagtacagacagtggaaaataaagagactctgaagcatttggcatctctttatgcaaataatcatccatccatgcacatgggtcagcccagttgcccaaataaatcag

SEQ ID NO: 114309 - DNA, 2421 bp, Homo sapiens
  Payload ID: 2344
  Gene Symbol: CPE
  Gene Name: carboxypeptidase E
  Uniprot ID: P16870
  ENST ID: ENST00000402744
  CDS Start-End: 281-1711
gcccgtctctccgccggccccctcctcgcagtggtttctcctgcagctcccctgggctccgcggccagtagtgcagcccgtggagccgcggctttgcccgtctcctctgggtggccccagtgcgcgggctgacactcattcagccggggaaggtgaggcgagtagaggctggtgcggaacttgccgcccccagcagcgccggcgggctaagcccagggccgggcagacaaaagaggccgcccgcgtaggaaggcacggccggcggcggcggagcgcagcgatggccgggcgagggggcagcgcgctgctggctctgtgcggggcactggctgcctgcgggtggctcctgggcgccgaagcccaggagcccggggcgcccgcggcgggcatgaggcggcgccggcggctgcagcaagaggacggcatctccttcgagtaccaccgctaccccgagctgcgcgaggcgctcgtgtccgtgtggctgcagtgcaccgccatcagcaggatttacacggtggggcgcagcttcgagggccgggagctcctggtcatcgagctgtccgacaaccctggcgtccatgagcctggtgagcctgaatttaaatacattgggaatatgcatgggaatgaggctgttggacgagaactgctcattttcttggcccagtacctatgcaacgaataccagaaggggaacgagacaattgtcaacctgatccacagtacccgcattcacatcatgccttccctgaacccagatggctttgagaaggcagcgtctcagcctggtgaactcaaggactggtttgtgggtcgaagcaatgcccagggaatagatctgaaccggaactttccagacctggataggatagtgtacgtgaatgagaaagaaggtggtccaaataatcatctgttgaaaaatatgaagaaaattgtggatcaaaacacaaagcttgctcctgagaccaaggctgtcattcattggattatggatattccttttgtgctttctgccaatctccatggaggagaccttgtggccaattatccatatgatgagacgcggagtggtagtgctcacgaatacagctcctccccagatgacgccattttccaaagcttggcccgggcatactcttctttcaacccggccatgtctgaccccaatcggccaccatgtcgcaagaatgatgatgacagcagctttgtagatggaaccaccaacggtggtgcttggtacagcgtacctggagggatgcaagacttcaattaccttagcagcaactgttttgagatcaccgtggagcttagctgtgagaagttcccacctgaagagactctgaagacctactgggaggataacaaaaactccctcattagctaccttgagcagatacaccgaggagttaaaggatttgtccgagaccttcaaggtaacccaattgcgaatgccaccatctccgtggaaggaatagaccacgatgttacatccgcaaaggatggtgattactggagattgcttatacctggaaactataaacttacagcctcagctccaggctatctggcaataacaaagaaagtggcagttccttacagccctgctgctggggttgattttgaactggagtcattttctgaaaggaaagaagaggagaaggaagaattgatggaatggtggaaaatgatgtcagaaactttaaatttttaaaaaggcttctagttagctgctttaaatctatctatataatgtagtatgatgtaatgtggtcttttttttagattttgtgcagttaatacttaacattgatttattttttaatcatttaaatattaatcaactttccttaaaataaatagcctcttaggtaaaaatataagaacttgatatatttcattctcttatatagtattcattttcctacctatattacacaaaaaagtatagaaaagatttaagtaattttgccatcctaggcttaaatgcaatattcctggtattatttacaatgcagaattttttgagtaattctagctttcaaaaattagtgaagttcttttactgtaattggtgacaatgtcacataatgaatgctattgaaaaggttaacagatacagctcggagttgtgagcactctactgcaagacttaaatagttcagtataaattgtcgtttttttcttgtgctgactaactataagcatgatcttgttaatgcatttttgatgggaagaaaaggtacatgtttacaaagaggttttatgaaaagaataaaaattgacttcttgcttgtacatataggagcaatactattatattatgtagtccgttaacactacttaaaagtttagggttttctcttggttgtagagtggcccagaattgcattctgaatgaataaaggttaaaaaaaaatcccc

SEQ ID NO: 114310 - DNA, 633 bp, Homo sapiens
  Payload ID: 2344
  Gene Symbol: CPE
  Gene Name: carboxypeptidase E
  ENST ID: ENST00000431967
  CDS Start-End: 192-633
ataaatagatataattaatgaaaatgttaatagtgccggtctccagaatatctctagatcactgaccttctgattggtggaaaaacctttggagaatgatctttacaggattccatggcagtgagttaatctatttttctctacatgggggcagcagacgaggtgagcctgaatttaaatacattgggaatatgcatgggaatgaggctgttggacgagaactgctcattttcttggcccagtacctatgcaacgaataccagaaggggaacgagacaattgtcaacctgatccacagtacccgcattcacatcatgccttccctgaacccagatggctttgagaaggcagcgtctcagcctggtgaactcaaggactggtttgtgggtcgaagcaatgcccagggaatagatctgaaccggaactttccagacctggataggatagtgtacgtgaatgagaaagaaggtggtccaaataatcatctgttgaaaaatatgaagaaaattgtggatcaaaacacaaagcttgctcctgagaccaaggctgtcattcattggattatggatattccttttgtgctttctgccaatctccatggaggagaccttgtggccaattatccatatgatg

SEQ ID NO: 114311 - DNA, 563 bp, Homo sapiens
  Payload ID: 2344
  Gene Symbol: CPE
  Gene Name: carboxypeptidase E
  ENST ID: ENST00000511992
  CDS Start-End: 93-563
gagacacaagagtgggaagagtgcagattggagcagctatccaaaaatacagaaggccagaaggtgagcctgaatttaaatacattgggaatatgcatgggaatgaggctgttggacgagaactgctcattttcttggcccagtacctatgcaacgaataccagaaggggaacgagacaattgtcaacctgatccacagtacccgcattcacatcatgccttccctgaacccagatggctttgagaaggcagcgtctcagcctggtgaactcaaggactggtttgtgggtcgaagcaatgcccagggaatagatctgaaccggaactttccagacctggataggatagtgtacgtgaatgagaaagaaggtggtccaaataatcatctgttgaaaaatatgaagaaaattgtggatcaaaacacaaagcttgctcctgagaccaaggctgtcattcattggattatggatattccttttgtgctttctgccaatctccatggaggagaccttgtggccaattatccatatgatgagacgcggagtggtagtgctcacgaatac

SEQ ID NO: 114312 - DNA, 564 bp, Homo sapiens
  Payload ID: 2344
  Gene Symbol: CPE
  Gene Name: carboxypeptidase E
  ENST ID: ENST00000513982
  CDS Start-End: 148-564
atatgataaatagtacctggagcgcctacttcacaagaaagcctgagagagtccagttgtactcaaggagagggagaagtagccaggagacagatccggtaggactgtgaaagccatggtgagcctgaatttaaatacattgggaatatgcatgggaatgaggctgttggacgagaactgctcattttcttggcccagtacctatgcaacgaataccagaaggggaacgagacaattgtcaacctgatccacagtacccgcattcacatcatgccttccctgaacccagatggctttgagaaggcagcgtctcagcctggtgaactcaaggactggtttgtgggtcgaagcaatgcccagggaatagatctgaaccggaactttccagacctggataggatagtgtacgtgaatgagaaagaaggtggtccaaataatcatctgttgaaaaatatgaagaaaattgtggatcaaaacacaaagcttgctcctgagaccaaggctgtcattcattggattatggatattccttttgtgctttctgccaatctccatggaggagac

SEQ ID NO: 114313 - DNA, 437 bp, Homo sapiens
  Payload ID: 2344
  Gene Symbol: CPE
  Gene Name: carboxypeptidase E
  ENST ID: ENST00000480404
  CDS Start-End: 1-326
tcctgggcgccgaagcccaggagcccggggcgcccgcggcgggcatgaggcggcgccggcggctgcagcaagaggacggcatctccttcgagtaccaccgctaccccgagctgcgcgaggcgctcgtgtccgtgtggctgcagtgcaccgccatcagcaggatttacacggtggggcgcagcttcgagggccgggagctcctggtcatcgagctgtccgacaaccctggcgtccatgagcctgattgcaagctgtatgaagtggggaccctgattccagcacccagctcatgtttggcacacagcgggcttgaatatacattatgaaataatctacattatggaaaaatactgaatatgcagtgtggaaaaaatgaatccatcaatagctgcataacacagtgtattaaaataaaatgttttattcttcatacattc

SEQ ID NO: 114314 - DNA, 6636 bp, Homo sapiens
  Payload ID: 2345
  Gene Symbol: CPM
  Gene Name: carboxypeptidase M
  Uniprot ID: P14384
  ENST ID: ENST00000338356
  CDS Start-End: 48-1379
ccctcatgtgttctcaggttcttcttatttttattcatctctagaacatggacttcccgtgcctctggctagggctgttgctgcctttggtagctgcgctggatttcaactaccaccgccaggaagggatggaagcgtttttgaagactgttgcccaaaactacagttctgtcactcacttacacagtattgggaaatctgtgaaaggtagaaacctgtgggttcttgttgtggggcggtttccaaaggaacacagaattgggattccagagttcaaatacgtggcaaatatgcatggagatgagactgttgggcgggagctgctgctccatctgattgactatctcgtaaccagtgatggcaaagaccctgaaatcacaaatctgatcaatagtacccggatacacatcatgccttccatgaacccagatggatttgaagccgtcaaaaagcctgactgttattacagcatcggaagggaaaattataaccagtatgacttgaatcgaaatttccccgatgcttttgaatataataatgtctcaaggcagcctgaaactgtggcagtcatgaagtggctgaaaacagagacgtttgtcctctctgcaaacctccatggtggtgccctcgtggccagttacccatttgataatggtgttcaagcaactggggcattatactcccgaagcttaacgcctgatgatgatgtttttcaatatcttgcacatacctatgcttcaagaaatcccaacatgaagaaaggagacgagtgtaaaaacaaaatgaactttcctaatggtgttacaaatggatactcttggtatccactccaaggtggaatgcaagattacaactacatctgggcccagtgttttgaaattacgttggagctgtcatgctgtaaatatcctcgtgaggagaagcttccatccttttggaataataacaaagcctcattaattgaatatataaagcaggtgcacctaggtgtaaagggtcaagtttttgatcagaatggaaatccattacccaatgtaattgtggaagtccaagacagaaaacatatctgcccctatagaaccaacaaatatggagagtattatctccttctcttgcctgggtcttatataataaatgttacagtccctggacatgatccacacatcacaaaggtgattattccggagaaatcccagaacttcagtgctcttaaaaaggatattctacttccattccaagggcaattggattctatcccagtatcaaatccttcatgcccaatgattcctctatacagaaatttgccagaccactcagctgcaacaaagcctagtttgttcttatttttagtgagtcttttgcacatattcttcaaataaagtaaaatgtgaaactcaacccacatcaccacctggaatcagggattgctcactccaggttactgcaaccctaactcactctagtgggaccttgactggagaaactccacgatcttcctgaagaagagaaatggatgtttccaaattccacaataagcaatatgtggtgataatgaaaagaatgattcagtcttgacggtgaatggaagacacttacctaacaagtactgctcatttacactcaaattaatcttgaagtagtcttaaaatgtgtaagaagttaaaacttgagaagcaaaaaaatgcctgcaaaaagaagatcattttgtatacagagaaccggatgaatataagcaatgaagatgaacatttattgatcttctacatacaagacttcaccataaggccaggagcagtggctcacaccttgtaatcccagcactttgggaggccaaggtgggcggatcaccctgaggttaggagttcaaaaccagcctgaccaacatggtgaaaccctgtctctactaaatattagcggggtgtggtggcgggcacctgtaatcgcagcctttcaggaggctgagacaggagaatcgcttgaaccctagaggcggagtttgcagtgagccgagatagtgccattgtactccagcttgggcaacagagtaagactctgtctcaaaaaaaaaaaaacaaaaacaaacaaacaaaaaaaacacctcaccatgagtgctacatgtgaatagatattaagtgccatatataattagttctcagaagaagggagaaatgatcataggactgggaattgttttgcaaacgttctaggagatgtgagagaaaatatgtaaccacatcttagtggcccaagaaaatacaggcctgaagggataagattgtgtctctatagagcttcaaagcatacaggtcaattaagaaagcccctctctctccagagccgtttccctagcttttggcacctggatgccacagtcctccattaggctgatgactccaaagatgtaactctagcctcttgcctgagcttcagactcgcgtcccactgcccacaggacacatccacctggatgtgactcacaggtacctccaacccatcatgtggagatactcatcctgttccccctagagctgctcttcctgctgcattctctctctcaattactgggaccaccaagctaggaacctgggagtcatccttgatactttctcttcctccttaatcctgtgtattcagcaagtaactaaaggttggtgttggccaggcatggtggctcatgcctgtaatcccagcattttgggaggccaaggcgggcggatcacttgaggtcaggagctcaagaccagcctggccaacatggtgaaaccccatctctactaaaaaaaaaaaaaaaattagtcgggcgtggtggtgcatgcctgtaatcccagctactggggaggctgaggcaggagaatcgcttgaacctgggaggcagaggttgcagtgagccgggattgcgccattgtactccagcctgggtgaagaagtgagactctgtcttaaaaaaaaaaattggtgctgataaatattgatgaattctgctctctgctctctatggttgtcaacactgcagagttgaggcctcatatctcacctgcactgctgcaacagcttactggtcccttgctcccagccttctcctcttcagtccatcgtccacacagcactggggaaggggagccacttgaaacaaaagtcaacaactggttgtagttcataaacacagagctgtttgtgtcccctgtatctggaatgccattatgacccactacattttttctttcctacccctcttaaaactcagttcaggtagcagctccactaggaagccttggctgaccataatcccattcaattccatttcacctcttcgcaggcagtctggggttagggaccctttctctttgctccccaaaataaactggttatctctactattggatttacaacattgtattataatcttctccatgtgtgccttctctagtagaatgtgagctctttgaggccaaggtctatttaatttgtttgaaaaattcattgttatatcctcaaagcctagcacatagtaggtactgaatgaatgaatgaacaaggggtgccaggagactgctactcccagtccttcccagaaactgcctagggctttgagtcattttatgaagctaggtcttaatgcgtaggcaacctcccagctcactatgaacgctgacagaagagtgttttcatgtctataatcaagaattccagatacattccttttactgaaccttgaattgatcctaagattggtagtaaaggtattatgttacctcctaacagcactacaaagtacctttttttatcagaaaaaaattttaccattaggactcaatttgaagtactaatgcttctcaagttctccactatgagagttaccctgtattagaccgttacctataagaattaaggggtaaagcactaaacagaaaagaaaaaaaaaatagcaactctggtgagcagatttctttcctttcttccttccttctcctcttcctaccttcctccctcctttccctctcctccccttctctccctttccctccccttcccttccttttcttctttcctccgctcccctccccttccctccccttcccatccttctttctcttttttttacttaatccccagtgtgacagtaatataggctgatttctagaagtgtggtgtattactcatggaaagtgagttgccttggttattactttcaattgaaagttctatgggatctagaaatgagacatactggcatggagagtgagaacgacaaaggaatgaagagctacaggagcatttaggccatttctatgccaagcttattctacatgcacaaaatcatacatgttaataaatataaacaaattggaggcttatttaaaccaattatgaaatctggtaatttgtgcagcagcaatagatgataaccaaaaaaaactcataataatctgaatatcttgatcatttgtatttaaagaagcagtaattatatacttgaaagtacataatatagtattgcaaaaatgactttggtatattacaaattaaaagtatataagatgaaacttgatttgctatcaagccccaagcaatttttcaactgggcattgaattctaacttttctaagatagcaatttttgaagagacacgaacaaaaatctgaattagttcatgagccttaatgtaaatctcttgctgaaatagtttttaaaatcagaatttagttatctatcagactcaaaatcatttaaagactaacaaaacacaatcatgatattctaactgtggtcaaaccaggtacccaagccacctccctgcccaacgcctttccggcttttcccctccctcttgggctggtggttatgctcctccagctctagttcagctataattccttttatagagaaaccaacctgatacacactttcatgatgggagaaaaatgtgggagtgaaatggtatttagaaagcagcagtcaggcacggtggctcatgcctgtaatcccagcactttgggaggctgaggcaggcggatcacttgaggtcaggagctcgagaccagcctggccaacacggtgaaaccccatctctactaaaaaaaaatacaaaaattagccgggcgtggtggcaggcacctgtaatcccagctacttgggaggctgaggcaggagaaatcgcctgaacccagaaggcagaggttgcagtgagccaagatcacatcactgcactgcactccagccggggtgacagagcgaacctctgtctcaaaaaaaaaaaaagaaaaaagaaagaaagaaaaaaggcagaagccctggattcaaatccgccacacattcagtttctttatctgtaaaatggagaccaccccccgccacgctgaacggtgattctgtgactggtaagagatgctacatttttggtgcttgttcaggtggaggaaagatgatagttaacactcaggtaataagtattttgaaggcagtataatataccttcttaaagagtatacctactcaaatgttggtaaatgttgacatgattgaatctaaatggcaaagagtattttagaaaaacattaagtccctgcagataaatgacagtgttgatttggatgcttaattacattcagacatgaactgttggatgtatctgaaatgttaaaagctttttctcaacatttccaaaagtctttccaagaaatcaatgttatgttttgttccagaagcaaatttgcatttgtgatctgtttctaaaaatggtacaagttagctctgtttagaaagtaaaaatatctgatgttagattggaagtatctcttcctggggaatccagaaagataagcatagcatattgtcttactgcaatagataagttgcttattgagaagtctggttgttattctatatggtaacaatacagttgatgtatattttatgatagatcctttatattttcctcatgactttagaagggggaagggggagaaaattatgatgaccagactagttaaagagcattgaaagtccacagtactgtagctaaagtagaagtttgggtttgttatagactttacattatatcaactaataagcagatactgtacagtattgctcaccattttatcatacttttgcatatgaactactccattgccttttatagatgttttatagctgatcttaccagttttcctggtaactttttttatttcttttttttttttttgagacggagtctcgccctaacacccaggttggagtgcagtgccgtgatctcggctcactgcaacctctgcctcccgggttcaagcaattctcctgtctcagcctcccgagtacctgggactaccggtgcctgtctccacgcccggctaattttttgtatttgtagtagagacggggtttcaccgtgttagccaggatggtctcgatctcctgacctcatgatctgcctgcctctgcctggacctcccaaagtgctgggattacaggcgtgagcccccgcgcccagccactttctttaatactataactaagaatttattaaaatgcacaaattgtctaagactgtaaagtttattggggagaggccatgactacctctgaatttagtaaatttaaaatatttctgattctcaataaagaactaatatccat

SEQ ID NO: 114315 - DNA, 703 bp, Homo sapiens
  Payload ID: 2345
  Gene Symbol: CPM
  Gene Name: carboxypeptidase M
  ENST ID: ENST00000551728
  CDS Start-End: 65-259
gctataacacccggccccgccgggcggccgcgggtgggtagaggtgcgcgcctgggacctgaacatggacttcccgtgcctctggctagggctgttgctgcctttggtagctgcgctggatttcaactaccaccgccaggaagggatggaagcgtttttgaagactgttgcccaaaactacagttctgtcactcacttacacagtattgggaaatctgtgaaagactgttgggcgggagctgctgctccatctgattgactatctcgtaaccagtgatggcaaagaccctgaaatcacaaatctgatcaatagtacccggatacacatcatgccttccatgaacccagatggatttgaagccgtcaaaaagcctgactgttattacagcatcggaagggaaaattataaccagtatgacttgaatcgaaatttccccgatgcttttgaatataataatgtctcaaggcagcctgaaactgtggcagtcatgaagtggctgaaaacagagacgtttgtcctctctgcaaacctccatggtggtgccctcgtggccagttacccatttgataatggtgttcaagcaactggggcattatactcccgaagcttaacgcctgatgatgatgtttttcaatatcttgcacatacctatgcttcaagaaatcccaacatgaagaaaggagacgagtgtaaaaacaaaat

SEQ ID NO: 114316 - DNA, 794 bp, Homo sapiens
  Payload ID: 2345
  Gene Symbol: CPM
  Gene Name: carboxypeptidase M
  ENST ID: ENST00000548954
  CDS Start-End: 47-794
gctataacacccggccccgccgggcggccgcgggtgggtagagaacatggacttcccgtgcctctggctagggctgttgctgcctttggtagctgcgctggatttcaactaccaccgccaggaagggatggaagcgtttttgaagactgttgcccaaaactacagttctgtcactcacttacacagtattgggaaatctgtgaaaggtagaaacctgtgggttcttgttgtggggcggtttccaaaggaacacagaattgggattccagagttcaaatacgtggcaaatatgcatggagatgagactgttgggcgggagctgctgctccatctgattgactatctcgtaaccagtgatggcaaagaccctgaaatcacaaatctgatcaatagtacccggatacacatcatgccttccatgaacccagatggatttgaagccgtcaaaaagcctgactgttattacagcatcggaagggaaaattataaccagtatgacttgaatcgaaatttccccgatgcttttgaatataataatgtctcaaggcagcctgaaactgtggcagtcatgaagtggctgaaaacagagacgtttgtcctctctgcaaacctccatggtggtgccctcgtggccagttacccatttgataatggtgttcaagcaactggggcattatactcccgaagcttaacgcctgatgatgatgtttttcaatatcttgcacatacctatgcttcaagaaatcccaacatgaagaaaggagacgagtgtaaaaacaaaatgaactttccta

SEQ ID NO: 114317 - DNA, 697 bp, Homo sapiens
  Payload ID: 2345
  Gene Symbol: CPM
  Gene Name: carboxypeptidase M
  ENST ID: ENST00000546556
  CDS Start-End: 1-108
tcatgcccaatgattcctctatacagaaatttgccagaccactcagctgcaacaaagcctagtttgttcttatttttagtgagtcttttgcacatattcttcaaataaagtaaaatgtgaaactcaacccacatcaccacctggaatcagggattgctcactccaggttactgcaaccctaactcactctagtgggaccttgactggagaaactccacgatcttcctgaagaagagaaatggatgtttccaaattccacaataagcaatatgtggtgataatgaaaagaatgattcagtcttgacggtgaatggaagacacttacctaacaagtactgctcatttacactcaaattaatcttgaagtagtcttaaaatgtgtaagaagttaaaacttgagaagcaaaaaaatgcctgcaaaaagaagatcattttgtatacagagaaccggatgaatataagcaatgaagatgaacatttattgatcttctacatacaagacttcaccataaggccaggagcagtggctcacaccttgtaatcccagcactttgggaggccaagctgcgttcctttgcctgcaacaggggtcaagatgagttttgcctgacttctttgatgtcctgaactttccgtagtcctttttcttgaatttgttcattataaatatagcttggcatttgtttgatcttttcaa

SEQ ID NO: 114318 - DNA, 2116 bp, Homo sapiens
  Payload ID: 2345
  Gene Symbol: CPM
  Gene Name: carboxypeptidase M
  Uniprot ID: P14384
  ENST ID: ENST00000546373
  CDS Start-End: 105-1436
gtctagattcttcttggcctctctgagcagcatttcttccttctgcgtatgggacaggaccctttctggaatgggggtcttatgacctacaatcaaacaagaacatggacttcccgtgcctctggctagggctgttgctgcctttggtagctgcgctggatttcaactaccaccgccaggaagggatggaagcgtttttgaagactgttgcccaaaactacagttctgtcactcacttacacagtattgggaaatctgtgaaaggtagaaacctgtgggttcttgttgtggggcggtttccaaaggaacacagaattgggattccagagttcaaatacgtggcaaatatgcatggagatgagactgttgggcgggagctgctgctccatctgattgactatctcgtaaccagtgatggcaaagaccctgaaatcacaaatctgatcaatagtacccggatacacatcatgccttccatgaacccagatggatttgaagccgtcaaaaagcctgactgttattacagcatcggaagggaaaattataaccagtatgacttgaatcgaaatttccccgatgcttttgaatataataatgtctcaaggcagcctgaaactgtggcagtcatgaagtggctgaaaacagagacgtttgtcctctctgcaaacctccatggtggtgccctcgtggccagttacccatttgataatggtgttcaagcaactggggcattatactcccgaagcttaacgcctgatgatgatgtttttcaatatcttgcacatacctatgcttcaagaaatcccaacatgaagaaaggagacgagtgtaaaaacaaaatgaactttcctaatggtgttacaaatggatactcttggtatccactccaaggtggaatgcaagattacaactacatctgggcccagtgttttgaaattacgttggagctgtcatgctgtaaatatcctcgtgaggagaagcttccatccttttggaataataacaaagcctcattaattgaatatataaagcaggtgcacctaggtgtaaagggtcaagtttttgatcagaatggaaatccattacccaatgtaattgtggaagtccaagacagaaaacatatctgcccctatagaaccaacaaatatggagagtattatctccttctcttgcctgggtcttatataataaatgttacagtccctggacatgatccacacatcacaaaggtgattattccggagaaatcccagaacttcagtgctcttaaaaaggatattctacttccattccaagggcaattggattctatcccagtatcaaatccttcatgcccaatgattcctctatacagaaatttgccagaccactcagctgcaacaaagcctagtttgttcttatttttagtgagtcttttgcacatattcttcaaataaagtaaaatgtgaaactcaacccacatcaccacctggaatcagggattgctcactccaggttactgcaaccctaactcactctagtgggaccttgactggagaaactccacgatcttcctgaagaagagaaatggatgtttccaaattccacaataagcaatatgtggtgataatgaaaagaatgattcagtcttgacggtgaatggaagacacttacctaacaagtactgctcatttacactcaaattaatcttgaagtagtcttaaaatgtgtaagaagttaaaacttgagaagcaaaaaaatgcctgcaaaaagaagatcattttgtatacagagaaccggatgaatataagcaatgaagatgaacatttattgatcttctacatacaagacttcaccataaggccaggagcagtggctcacaccttgtaatcccagcactttgggaggccaaggtgggcggatcaccctgaggttaggagttcaaaaccagcctgaccaacatggtgaaaccctgtctctactaaatattagcggggtgtggtggcgggcacctgtaatcgcagcctttcaggaggctgagacaggagaatcgcttgaaccctagaggcggagtttgcagtgagccgagatagtgccattgtactccagcttgggcaacagagtaagactctgtctc

SEQ ID NO: 114319 - DNA, 655 bp, Homo sapiens
  Payload ID: 2345
  Gene Symbol: CPM
  Gene Name: carboxypeptidase M
  ENST ID: ENST00000551897
  CDS Start-End: 1-596
acccatttgataatggtgttcaagcaactggggcattatactcccgaagcttaacgcctgatgatgatgtttttcaatatcttgcacatacctatgcttcaagaaatcccaacatgaagaaaggagacgagtgtaaaaacaaaatgaactttcctaatggtgttacaaatggatactcttggtatccactccaaggtggaatgcaagattacaactacatctgggcccagtgttttgaaattacgttggagctgtcatgctgtaaatatcctcgtgaggagaagcttccatccttttggaataataacaaagcctcattaattgaatatataaagcaggtgcacctaggtgtaaagggtcaagtttttgatcagaatggaaatccattacccaatgtaattgtggaagtccaagacagaaaacatatctgcccctatagaaccaacaaatatggagagtattatctccttctcttgcctgggtcttatataataaatgttacagtccctggacatgatccacacatcacaaagctgcgttcctttgcctgcaacaggggtcaagatgagttttgcctgacttctttgatgtcctgaactttccgtagtcctttttcttgaatttgttcattataaatatagcttggcatttgttt

SEQ ID NO: 114320 - DNA, 243 bp, Homo sapiens
  Payload ID: 2345
  Gene Symbol: CPM
  Gene Name: carboxypeptidase M
  ENST ID: ENST00000549781
  CDS Start-End: 26-243
agaggtgcgcgcctgggacctgaacatggacttcccgtgcctctggctagggctgttgctgcctttggtagctgcgctggatttcaactaccaccgccaggaagggatggaagcgtttttgaagactgttgcccaaaactacagttctgtcactcacttacacagtattgggaaatctgtgaaagaaacctgtgggttcttgttgtggggcggtttccaaaggaacacagaattgggattcca

SEQ ID NO: 114321 - DNA, 6655 bp, Homo sapiens
  Payload ID: 2345
  Gene Symbol: CPM
  Gene Name: carboxypeptidase M
  Uniprot ID: P14384
  ENST ID: ENST00000551568
  CDS Start-End: 62-1393
ataacacccggccccgccgggcggccgcgggtgggtagaggtgcgcgcctgggacctgaacatggacttcccgtgcctctggctagggctgttgctgcctttggtagctgcgctggatttcaactaccaccgccaggaagggatggaagcgtttttgaagactgttgcccaaaactacagttctgtcactcacttacacagtattgggaaatctgtgaaaggtagaaacctgtgggttcttgttgtggggcggtttccaaaggaacacagaattgggattccagagttcaaatacgtggcaaatatgcatggagatgagactgttgggcgggagctgctgctccatctgattgactatctcgtaaccagtgatggcaaagaccctgaaatcacaaatctgatcaatagtacccggatacacatcatgccttccatgaacccagatggatttgaagccgtcaaaaagcctgactgttattacagcatcggaagggaaaattataaccagtatgacttgaatcgaaatttccccgatgcttttgaatataataatgtctcaaggcagcctgaaactgtggcagtcatgaagtggctgaaaacagagacgtttgtcctctctgcaaacctccatggtggtgccctcgtggccagttacccatttgataatggtgttcaagcaactggggcattatactcccgaagcttaacgcctgatgatgatgtttttcaatatcttgcacatacctatgcttcaagaaatcccaacatgaagaaaggagacgagtgtaaaaacaaaatgaactttcctaatggtgttacaaatggatactcttggtatccactccaaggtggaatgcaagattacaactacatctgggcccagtgttttgaaattacgttggagctgtcatgctgtaaatatcctcgtgaggagaagcttccatccttttggaataataacaaagcctcattaattgaatatataaagcaggtgcacctaggtgtaaagggtcaagtttttgatcagaatggaaatccattacccaatgtaattgtggaagtccaagacagaaaacatatctgcccctatagaaccaacaaatatggagagtattatctccttctcttgcctgggtcttatataataaatgttacagtccctggacatgatccacacatcacaaaggtgattattccggagaaatcccagaacttcagtgctcttaaaaaggatattctacttccattccaagggcaattggattctatcccagtatcaaatccttcatgcccaatgattcctctatacagaaatttgccagaccactcagctgcaacaaagcctagtttgttcttatttttagtgagtcttttgcacatattcttcaaataaagtaaaatgtgaaactcaacccacatcaccacctggaatcagggattgctcactccaggttactgcaaccctaactcactctagtgggaccttgactggagaaactccacgatcttcctgaagaagagaaatggatgtttccaaattccacaataagcaatatgtggtgataatgaaaagaatgattcagtcttgacggtgaatggaagacacttacctaacaagtactgctcatttacactcaaattaatcttgaagtagtcttaaaatgtgtaagaagttaaaacttgagaagcaaaaaaatgcctgcaaaaagaagatcattttgtatacagagaaccggatgaatataagcaatgaagatgaacatttattgatcttctacatacaagacttcaccataaggccaggagcagtggctcacaccttgtaatcccagcactttgggaggccaaggtgggcggatcaccctgaggttaggagttcaaaaccagcctgaccaacatggtgaaaccctgtctctactaaatattagcggggtgtggtggcgggcacctgtaatcgcagcctttcaggaggctgagacaggagaatcgcttgaaccctagaggcggagtttgcagtgagccgagatagtgccattgtactccagcttgggcaacagagtaagactctgtctcaaaaaaaaaaaaacaaaaacaaacaaacaaaaaaaacacctcaccatgagtgctacatgtgaatagatattaagtgccatatataattagttctcagaagaagggagaaatgatcataggactgggaattgttttgcaaacgttctaggagatgtgagagaaaatatgtaaccacatcttagtggcccaagaaaatacaggcctgaagggataagattgtgtctctatagagcttcaaagcatacaggtcaattaagaaagcccctctctctccagagccgtttccctagcttttggcacctggatgccacagtcctccattaggctgatgactccaaagatgtaactctagcctcttgcctgagcttcagactcgcgtcccactgcccacaggacacatccacctggatgtgactcacaggtacctccaacccatcatgtggagatactcatcctgttccccctagagctgctcttcctgctgcattctctctctcaattactgggaccaccaagctaggaacctgggagtcatccttgatactttctcttcctccttaatcctgtgtattcagcaagtaactaaaggttggtgttggccaggcatggtggctcatgcctgtaatcccagcattttgggaggccaaggcgggcggatcacttgaggtcaggagctcaagaccagcctggccaacatggtgaaaccccatctctactaaaaaaaaaaaaaaaattagtcgggcgtggtggtgcatgcctgtaatcccagctactggggaggctgaggcaggagaatcgcttgaacctgggaggcagaggttgcagtgagccgggattgcgccattgtactccagcctgggtgaagaagtgagactctgtcttaaaaaaaaaaattggtgctgataaatattgatgaattctgctctctgctctctatggttgtcaacactgcagagttgaggcctcatatctcacctgcactgctgcaacagcttactggtcccttgctcccagccttctcctcttcagtccatcgtccacacagcactggggaaggggagccacttgaaacaaaagtcaacaactggttgtagttcataaacacagagctgtttgtgtcccctgtatctggaatgccattatgacccactacattttttctttcctacccctcttaaaactcagttcaggtagcagctccactaggaagccttggctgaccataatcccattcaattccatttcacctcttcgcaggcagtctggggttagggaccctttctctttgctccccaaaataaactggttatctctactattggatttacaacattgtattataatcttctccatgtgtgccttctctagtagaatgtgagctctttgaggccaaggtctatttaatttgtttgaaaaattcattgttatatcctcaaagcctagcacatagtaggtactgaatgaatgaatgaacaaggggtgccaggagactgctactcccagtccttcccagaaactgcctagggctttgagtcattttatgaagctaggtcttaatgcgtaggcaacctcccagctcactatgaacgctgacagaagagtgttttcatgtctataatcaagaattccagatacattccttttactgaaccttgaattgatcctaagattggtagtaaaggtattatgttacctcctaacagcactacaaagtacctttttttatcagaaaaaaattttaccattaggactcaatttgaagtactaatgcttctcaagttctccactatgagagttaccctgtattagaccgttacctataagaattaaggggtaaagcactaaacagaaaagaaaaaaaaaatagcaactctggtgagcagatttctttcctttcttccttccttctcctcttcctaccttcctccctcctttccctctcctccccttctctccctttccctccccttcccttccttttcttctttcctccgctcccctccccttccctccccttcccatccttctttctcttttttttacttaatccccagtgtgacagtaatataggctgatttctagaagtgtggtgtattactcatggaaagtgagttgccttggttattactttcaattgaaagttctatgggatctagaaatgagacatactggcatggagagtgagaacgacaaaggaatgaagagctacaggagcatttaggccatttctatgccaagcttattctacatgcacaaaatcatacatgttaataaatataaacaaattggaggcttatttaaaccaattatgaaatctggtaatttgtgcagcagcaatagatgataaccaaaaaaaactcataataatctgaatatcttgatcatttgtatttaaagaagcagtaattatatacttgaaagtacataatatagtattgcaaaaatgactttggtatattacaaattaaaagtatataagatgaaacttgatttgctatcaagccccaagcaatttttcaactgggcattgaattctaacttttctaagatagcaatttttgaagagacacgaacaaaaatctgaattagttcatgagccttaatgtaaatctcttgctgaaatagtttttaaaatcagaatttagttatctatcagactcaaaatcatttaaagactaacaaaacacaatcatgatattctaactgtggtcaaaccaggtacccaagccacctccctgcccaacgcctttccggcttttcccctccctcttgggctggtggttatgctcctccagctctagttcagctataattccttttatagagaaaccaacctgatacacactttcatgatgggagaaaaatgtgggagtgaaatggtatttagaaagcagcagtcaggcacggtggctcatgcctgtaatcccagcactttgggaggctgaggcaggcggatcacttgaggtcaggagctcgagaccagcctggccaacacggtgaaaccccatctctactaaaaaaaaatacaaaaattagccgggcgtggtggcaggcacctgtaatcccagctacttgggaggctgaggcaggagaaatcgcctgaacccagaaggcagaggttgcagtgagccaagatcacatcactgcactgcactccagccggggtgacagagcgaacctctgtctcaaaaaaaaaaaaagaaaaaagaaagaaagaaaaaaggcagaagccctggattcaaatccgccacacattcagtttctttatctgtaaaatggagaccaccccccgccacgctgaacggtgattctgtgactggtaagagatgctacatttttggtgcttgttcaggtggaggaaagatgatagttaacactcaggtaataagtattttgaaggcagtataatataccttcttaaagagtatacctactcaaatgttggtaaatgttgacatgattgaatctaaatggcaaagagtattttagaaaaacattaagtccctgcagataaatgacagtgttgatttggatgcttaattacattcagacatgaactgttggatgtatctgaaatgttaaaagctttttctcaacatttccaaaagtctttccaagaaatcaatgttatgttttgttccagaagcaaatttgcatttgtgatctgtttctaaaaatggtacaagttagctctgtttagaaagtaaaaatatctgatgttagattggaagtatctcttcctggggaatccagaaagataagcatagcatattgtcttactgcaatagataagttgcttattgagaagtctggttgttattctatatggtaacaatacagttgatgtatattttatgatagatcctttatattttcctcatgactttagaagggggaagggggagaaaattatgatgaccagactagttaaagagcattgaaagtccacagtactgtagctaaagtagaagtttgggtttgttatagactttacattatatcaactaataagcagatactgtacagtattgctcaccattttatcatacttttgcatatgaactactccattgccttttatagatgttttatagctgatcttaccagttttcctggtaactttttttatttcttttttttttttttgagacggagtctcgccctaacacccaggttggagtgcagtgccgtgatctcggctcactgcaacctctgcctcccgggttcaagcaattctcctgtctcagcctcccgagtacctgggactaccggtgcctgtctccacgcccggctaattttttgtatttgtagtagagacggggtttcaccgtgttagccaggatggtctcgatctcctgacctcatgatctgcctgcctctgcctggacctcccaaagtgctgggattacaggcgtgagcccccgcgcccagccactttctttaatactataactaagaatttattaaaatgcacaaattgtctaagactgtaaagtttattggggagaggccatgactacctctgaatttagtaaatttaaaatatttctgattctcaataaagaactaatatccatataaa

SEQ ID NO: 114322 - DNA, 454 bp, Homo sapiens
  Payload ID: 2345
  Gene Symbol: CPM
  Gene Name: carboxypeptidase M
  ENST ID: ENST00000548262
  CDS Start-End: 46-454
gggtgggtagaggtgcgcgcctgggacctggtgaggctggggaacatggacttcccgtgcctctggctagggctgttgctgcctttggtagctgcgctggatttcaactaccaccgccaggaagggatggaagcgtttttgaagactgttgcccaaaactacagttctgtcactcacttacacagtattgggaaatctgtgaaaggtagaaacctgtgggttcttgttgtggggcggtttccaaaggaacacagaattgggattccagagttcaaatacgtggcaaatatgcatggagatgagactgttgggcgggagctgctgctccatctgattgactatctcgtaaccagtgatggcaaagaccctgaaatcacaaatctgatcaatagtacccggatacacatcatgccttccatgaacccagatggatttgaagccgtcaaaaagcctg

SEQ ID NO: 114323 - DNA, 536 bp, Homo sapiens
  Payload ID: 2345
  Gene Symbol: CPM
  Gene Name: carboxypeptidase M
  ENST ID: ENST00000547134
  CDS Start-End: 34-228
ataacacccggccccgccgggcggccgcggaacatggacttcccgtgcctctggctagggctgttgctgcctttggtagctgcgctggatttcaactaccaccgccaggaagggatggaagcgtttttgaagactgttgcccaaaactacagttctgtcactcacttacacagtattgggaaatctgtgaaagactgttgggcgggagctgctgctccatctgattgactatctcgtaaccagtgatggcaaagaccctgaaatcacaaatctgatcaatagtacccggatacacatcatgccttccatgaacccagatggatttgaagccgtcaaaaagcctgactgttattacagcatcggaagggaaaattataaccagtatgacttgaatcgaaatttccccgatgcttttgaatataataatgtctcaaggcagcctgaaactgtggcagtcatgaagtggctgaaaacagagacgtttgtcctctctgcaaacctccatggtggtgccctcgtggccagttacccatttg

SEQ ID NO: 114324 - DNA, 1863 bp, Homo sapiens
  Payload ID: 2346
  Gene Symbol: CPN1
  Gene Name: carboxypeptidase N, polypeptide 1
  Uniprot ID: P15169
  ENST ID: ENST00000370418
  CDS Start-End: 253-1629
tgcaaaaaacctttcaaaaggctttcctggattagagaaagaaagggagtgagggaggagagatgagtggctattccagaacgacataaagaatttccagccttggacggacagctgggaacgtcttccaatttggactggtgtttacaagcgggaagctaggtggaccttggattttggcgggtgaagaggctaggttgtttaaggaggtggggcgcgtttcagtggctctctttgaaaaagcccagcaagatgtcagacctgctctcagtcttcctccacctcctccttctcttcaagttggttgccccggtgacctttcgccaccaccgctatgatgatcttgtgcggacgctgtacaaggtgcaaaacgaatgccccggcatcacgcgggtctacagcattgggcgcagcgtggaggggagacacctctacgtgctggagttcagcgaccaccctggaatccacgagcccttggaaccagaggtcaagtatgtggggaacatgcacggcaacgaagcgttgggccgcgagctgatgctgcagctgtcggagtttctgtgcgaggagttccggaacaggaaccagcgcatcgtccagctcatccaggacacgcgcattcacatcctgccatccatgaaccccgacggctacgaggtggctgctgcccagggcccaaacaagcctgggtatctagttggcaggaacaatgcaaatggagtggacctgaaccgcaacttccctgatctcaatacctatatctactataacgagaagtacggaggccccaaccaccacctgccccttccagacaactggaaaagtcaggtggaacccgagacccgggcggtgatccggtggatgcactccttcaactttgttctttcagccaatctccacggaggggcggtggtggccaattacccgtatgacaagtcctttgagcaccgggtccgaggggtccgccgcaccgccagcacccccacgcctgacgacaagctcttccagaagctggccaaggtctactcctatgcacatggatggatgttccaaggttggaactgcggagattacttcccagatggcatcaccaatggggcttcctggtattctctcagcaagggaatgcaagactttaattatctccataccaactgctttgagatcacgctggaactgagttgcgacaagtttccccccgaagaggagttacagcgggagtggctgggtaatcgggaagccctaatccagttcctggaacaggttcaccagggcatcaagggaatggtgcttgatgagaattacaataatctcgccaatgctgtcatttctgtcagtgggattaaccatgatgtcacttcaggtgaccatggtgattacttccggctgctgcttccaggtatctacactgttagtgccacagcacctgggtatgacccagagacagtaactgtgaccgtgggtcctgcggaaccaacgttggttaacttccacctcaaaagaagcatccctcaagtaagccctgtgaggagagctcccagcagaaggcacggagtcagagccaaagtgcagccccaagccagaaagaaagaaatggagatgaggcagctgcagagaggccctgcctgaaacccacagtgccaggcaacccttcagaaaggctttgctcctgctctcagatcagatcaagcattctttctattttattatctgggacatatttaaatacaaacatattcagaacaattcagaatggtctccatctgttccaggggtaagccatctctaggtcatcatgaaaaaaattaggatctattgaaaggtgatgtggtggccgggtgtggtggctcacatctgtaatcc

SEQ ID NO: 114325 - DNA, 669 bp, Homo sapiens
  Payload ID: 2346
  Gene Symbol: CPN1
  Gene Name: carboxypeptidase N, polypeptide 1
  ENST ID: ENST00000441382
  CDS Start-End: 58-669
cgccaacctctcgcctcctcccaggtggaacccgagacccgggcggtgatccggtggatgcactccttcaactttgttctttcagccaatctccacggaggggcggtggtggccaattacccgtatgacaagtcctttgagcaccgggtccgaggggtccgccgcaccgccagcacccccacgcctgacgacaagctcttccagaagctggccaaggtctactcctatgcacatggatggatgttccaaggttggaactgcggagattacttcccagatggcatcaccaatggggcttcctggtattctctcagcaagggaatgcaagactttaattatctccataccaactgctttgagatcacgctggaactgagttgcgacaagtttccccccgaagaggagttacagcgggagtggctgggtaatcgggaagccctaatccagttcctggaacaggttcaccagggcatcaagggaatggtgcttgatgagaattacaataatctcgccaatgctgtcatttctgtcagtgggattaaccatgatgtcacttcaggtgaccatggtgattacttccggctgctgcttccaggtatctacactgttagtgccacagcacctgggtatgacccagagacagtaactgtgaccgtgggtcctgcggaa

SEQ ID NO: 114326 - DNA, 3028 bp, Homo sapiens
  Payload ID: 2347
  Gene Symbol: CPN2
  Gene Name: carboxypeptidase N, polypeptide 2
  Uniprot ID: P22792
  ENST ID: ENST00000323830
  CDS Start-End: 91-1728
ggattgagctgaccacaggccacaccagactcctctctgctcctgaggaagacagggcagcccggcgccacccgctcggccctcacgaagatgctccctggagcctggctgctctggacctccctcctgctcctggccaggcctgcccagccctgtcccatgggttgtgactgcttcgtccaggaggtgttctgctcagatgaggagcttgccaccgtcccactggacatcccgccatatacgaaaaacatcatctttgtggagacctcgttcaccacattggaaaccagagcttttggcagtaaccccaacttgaccaaggtggtcttcctcaacactcagctctgccagtttaggccggatgccttcggggggctgcccaggctggaggacctggaggtcacaggcagtagcttcttgaacctcagcaccaacatcttctccaacctgacctcgctgggcaagctcaccctcaacttcaacatgctggaggctctgcccgagggtcttttccagcacctggctgccctggagtccctccacctgcaggggaaccagctccaggccctgcccaggaggctcttccagcctctgacccatctgaagacactcaacctggcccagaacctcctggcccagctcccggaggagctgttccacccactcaccagcctgcagaccctgaagctgagcaacaacgcgctctctggtctcccccagggtgtgtttggcaaactgggcagcctgcaggagctcttcctggacagcaacaacatctcggagctgccccctcaggtgttctcccagctcttctgcctagagaggctgtggctgcaacgcaacgccatcacgcacctgccgctctccatctttgcctccctgggtaatctgacctttctgagcttgcagtggaacatgcttcgggtcctgcctgccggcctctttgcccacaccccgtgcctggttggcctgtctctgacccataaccagctggagactgtcgctgagggcacctttgcccacctgtccaacctgcgttccctcatgctctcatacaatgccattacccacctcccagctggcatcttcagagacctggaggagttggtcaaactctacctgggcagcaacaaccttacggcgctgcacccagccctcttccagaacctgtccaagctggagctgctcagcctctccaagaaccagctgaccacacttccggagggcatcttcgacaccaactacaacctgttcaacctggccctgcacggtaacccctggcagtgcgactgccacctggcctacctcttcaactggctgcagcagtacaccgatcggctcctgaacatccagacctactgcgctggccctgcctacctcaaaggccaggtggtgcccgccttgaatgagaagcagctggtgtgtcccgtcacccgggaccacttgggcttccaggtcacgtggccggacgaaagcaaggcagggggcagctgggatctggctgtgcaggaaagggcagcccggagccagtgcacctacagcaaccccgagggcaccgtggtgctcgcctgtgaccaggcccagtgtcgctggctgaacgtccagctctctcctcagcagggctccctgggactgcagtacaatgctagtcaggagtgggacctgaggtcgagctgcggttctctgcggctcaccgtgtctatcgaggctcgggcagcagggccctagtagcagcgcatacaggagctggggaagggggcctctggggcctgaccaggcgacaggtaggggcggaggggagctgagtctccgaagccttggcttttcacatgcaagggacagggttacatccccaaggtgagggggtggagtctggtctgctccactaaccagggtctcctcctcctcttccttcatcgcttctcctggagtgtgcggcctaacaaggccatccttatgccttgcaaagcaccctcaaaagctgcaccacagcctggagaataaaatatcctcagccctgatgcctccccattatgtaacacccaaccgctctcacctacaccctgaggtctattcactgcatcccagtgatacaaagtggaggccactgccttctgacatctggctcaaaagcccagtgtctgtttccatttatttccctggaatttcatttaaaattggtatagagaaaaaaaggatgtgacagaagcagagatgaccagaaagcacaggggcagggttctgactggcgtgtgggagaccctgtggccggcacccacctccacacgaggactaagctctgatttttttatcttgcccaaattcctacctaaggggtctagggagtcgcgccttacaaatcataaattctcatcagatgggttttatttgaccctgtatatcatgacttatttttaatctgactatggcataacattacaagacgaggcaaaaatatttaacccccaaatatatttccttgccctaccttgaacttgccctgcagagtctcttgtgaggagaatccacatcctataaagaagcccctttcccctttgttttccttcctttctttccagtccaggagatcatcaactaagagccaggcaccccttttaagtcgataagaaacagtttacaacctgctctctctctctctgaagtctgctgagagcttcccctgcacaataaaacttggcctccacgatcctttatcttaacctgaacattcctttccattgatcccaggtcttcagctaagctcaaccaattgtcaaccagaaaatgtttaaatttacctacagcctggaagcacccacccccgctgcttcgagttgtcctgcctttctgaactcaaccaatgtatttcttaaatgtatttgattgatgcctcattcctccctaaaatgtataaaaccaagctgtacctcgaccaccttgggcacatgttcccaggccctcctgaggtctgtgtcacgggccatggccactcatatttggctcagaataaatctcttcaaatatttta

SEQ ID NO: 114327 - DNA, 2008 bp, Homo sapiens
  Payload ID: 2347
  Gene Symbol: CPN2
  Gene Name: carboxypeptidase N, polypeptide 2
  Uniprot ID: P22792
  ENST ID: ENST00000429275
  CDS Start-End: 78-1715
gaccacaggccacaccagactcctctctgctcctgaggaagacagggcagcccggcgccacccgctcggccctcacgatgctccctggagcctggctgctctggacctccctcctgctcctggccaggcctgcccagccctgtcccatgggttgtgactgcttcgtccaggaggtgttctgctcagatgaggagcttgccaccgtcccactggacatcccgccatatacgaaaaacatcatctttgtggagacctcgttcaccacattggaaaccagagcttttggcagtaaccccaacttgaccaaggtggtcttcctcaacactcagctctgccagtttaggccggatgccttcggggggctgcccaggctggaggacctggaggtcacaggcagtagcttcttgaacctcagcaccaacatcttctccaacctgacctcgctgggcaagctcaccctcaacttcaacatgctggaggctctgcccgagggtcttttccagcacctggctgccctggagtccctccacctgcaggggaaccagctccaggccctgcccaggaggctcttccagcctctgacccatctgaagacactcaacctggcccagaacctcctggcccagctcccggaggagctgttccacccactcaccagcctgcagaccctgaagctgagcaacaacgcgctctctggtctcccccagggtgtgtttggcaaactgggcagcctgcaggagctcttcctggacagcaacaacatctcggagctgccccctcaggtgttctcccagctcttctgcctagagaggctgtggctgcaacgcaacgccatcacgcacctgccgctctccatctttgcctccctgggtaatctgacctttctgagcttgcagtggaacatgcttcgggtcctgcctgccggcctctttgcccacaccccgtgcctggttggcctgtctctgacccataaccagctggagactgtcgctgagggcacctttgcccacctgtccaacctgcgttccctcatgctctcatacaatgccattacccacctcccagctggcatcttcagagacctggaggagttggtcaaactctacctgggcagcaacaaccttacggcgctgcacccagccctcttccagaacctgtccaagctggagctgctcagcctctccaagaaccagctgaccacacttccggagggcatcttcgacaccaactacaacctgttcaacctggccctgcacggtaacccctggcagtgcgactgccacctggcctacctcttcaactggctgcagcagtacaccgatcggctcctgaacatccagacctactgcgctggccctgcctacctcaaaggccaggtggtgcccgccttgaatgagaagcagctggtgtgtcccgtcacccgggaccacttgggcttccaggtcacgtggccggacgaaagcaaggcagggggcagctgggatctggctgtgcaggaaagggcagcccggagccagtgcacctacagcaaccccgagggcaccgtggtgctcgcctgtgaccaggcccagtgtcgctggctgaacgtccagctctctcctcagcagggctccctgggactgcagtacaatgctagtcaggagtgggacctgaggtcgagctgcggttctctgcggctcaccgtgtctatcgaggctcgggcagcagggccctagtagcagcgcatacaggagctggggaagggggcctctggggcctgaccaggcgacaggtaggggcggaggggagctgagtctccgaagccttggcttttcacatgcaagggacagggttacatccccaaggtgagggggtggagtctggtctgctccactaaccagggtctcctcctcctcttccttcatcgcttctcctggagtgtgcggcctaacaaggccatccttatgccttgcaaagcaccctcaaaagctgcaccacagcctggagaataaaatatcctcagccctga

SEQ ID NO: 114328 - DNA, 1209 bp, Homo sapiens
  Payload ID: 2348
  Gene Symbol: CPO
  Gene Name: carboxypeptidase O
  Uniprot ID: Q8IVL8
  ENST ID: ENST00000272852
  CDS Start-End: 47-1171
ccactgccagagaggcccagaattttctaacttactgtgtggcagaatgaagcctctgcttgaaaccctttatcttttggggatgctggttcctggagggctgggatatgatagatccttagcccaacacagacaagagattgtggacaagtcagtgagtccatggagcctggagacgtattcctataacatataccaccccatgggagagatctatgagtggatgagagagatcagtgagaagtacaaggaagtggtgacacagcatttcctaggagtgacctatgagacccaccccatgtattatctgaagatcagccaaccatctggtaatcccaagaaaatcatttggatggactgtggaattcacgccagagaatggattgctcctgctttttgccaatggttcgtcaaagaaattctacaaaaccataaagacaactcaagtatacgcaagctccttaggaacctggacttctatgtccttccagttcttaacatagatggttatatctacacttggacaactgatcgtctttggaggaaatcccgttcaccccataataatggcacatgttttgggacggatctcaatcgaaatttcaatgcatcttggtgtagtattggtgcctctagaaactgccaagatcaaacattctgtgggacagggccagtgtctgaaccagagactaaagctgttgccagcttcatagagagcaagaaggatgatattttgtgcttcctgaccatgcactcttatgggcagttaattctcacaccttacggctacaccaaaaataaatcaagtaaccacccagaaatgattcaagttggacagaaggcagcaaatgcattgaaagcaaagtatggaaccaattatagagttggatcgagtgcagatattttatatgcctcatcagggtcttcaagagattgggcccgagacattgggattcccttctcatatacgtttgagctgagggacagtggaacatatgggtttgttctgccagaagctcagatccagcccacctgtgaggagaccatggaggctgtgctgtcagtcctggatgatgtgtatgcgaaacactggcactcggacagtgctggaagggtgacatctgccactatgctgctgggcctgctggtgtcctgcatgtctcttctctaagtgcattctgcccaggcctgctcaaccccagtggcatg

SEQ ID NO: 114329 - DNA, 1947 bp, Homo sapiens
  Payload ID: 2349
  Gene Symbol: CPQ
  Gene Name: carboxypeptidase Q
  Uniprot ID: Q9Y646
  ENST ID: ENST00000220763
  CDS Start-End: 211-1629
aggtctttgccccgcctctcggccccgcggcctggccggcaagcagggctgcagtcacggggcggcgcggagggccccagcccagtcaggggtgtggccgccgccaccgtaaggctaggccgcgagcttagtcctgggagccgcctccgtcgccgccgtcagagccgccctatcagattatcttaacaagaaaaccaactggaaaaaaaaatgaaattccttatcttcgcatttttcggtggtgttcaccttttatccctgtgctctgggaaagctatatgcaagaatggcatctctaagaggacttttgaagaaataaaagaagaaatagccagctgtggagatgttgctaaagcaatcatcaacctagctgtttatggtaaagcccagaacagatcctatgagcgattggcacttctggttgatactgttggacccagactgagtggctccaagaacctagaaaaagccatccaaattatgtaccaaaacctgcagcaagatgggctggagaaagttcacctggagccagtgagaataccccactgggagaggggagaagaatcagctgtgatgctggagccaagaattcataagatagccatcctgggtcttggcagcagcattgggactcctccagaaggcattacagcagaagttctggtggtgacctctttcgatgaactgcagagaagggcctcagaagcaagagggaagattgttgtttataaccaaccttacatcaactactcaaggacggtgcaataccgaacgcagggggcggtggaagctgccaaggtgggggctttggcatctctcattcgatccgtggcctccttctccatctacagtcctcacacaggtattcaggaataccaggatggcgtgcccaagattccaacagcctgtattacggtggaagatgcagaaatgatgtcaagaatggcttctcatgggatcaaaattgtcattcagctaaagatgggggcaaagacctacccagatactgattccttcaacactgtagcagagatcactgggagcaaatatccagaacaggttgtactggtcagtggacatctggacagctgggatgttgggcagggtgccatggatgatggcggtggagcctttatatcatgggaagcactctcacttattaaagatcttgggctgcgtccaaagaggactctgcggctggtgctctggactgcagaagaacaaggtggagttggtgccttccagtattatcagttacacaaggtaaatatttccaactacagtctggtgatggagtctgacgcaggaaccttcttacccactgggctgcaattcactggcagtgaaaaggccagggccatcatggaggaggttatgagcctgctgcagcccctcaatatcactcaggtcctgagccatggagaagggacagacatcaacttttggatccaagctggagtgcctggagccagtctacttgatgacttatacaagtatttcttcttccatcactcccacggagacaccatgactgtcatggatccaaagcagatgaatgttgctgctgctgtttgggctgttgtttcttatgttgttgcagacatggaagaaatgctgcctaggtcctagaaacagtaagaaagaaacgttttcatgcttctggccaggaatcctgggtctgcaactttggaaaactcctcttcacataacaatttcatccaattcatcttcaaagcacaactctatttcatgctttctgttattatctttcttgatactttccaaattctctgattctagaaaaaggaatcattctcccctccctcccaccacatagaatcaacatatggtagggattacagtgggggcatttctttatatcacctcttaaaaacattgtttccactttaaaagtaaacacttaataaatttttggaagatctctga

SEQ ID NO: 114330 - DNA, 466 bp, Homo sapiens
  Payload ID: 2349
  Gene Symbol: CPQ
  Gene Name: carboxypeptidase Q
  ENST ID: ENST00000522617
  CDS Start-End: 1-392
ccttccagtattatcagttacacaaggtaaatatttccaactacagtctggtgatggagtctgacgcaggaaccttcttacccactgggctgcaattcactggcagtgaaaaggccagggccatcatggaggaggttatgagcctgctgcagcccctcaatatcactcaggtcctgagccatggagaagggacagacatcaacttttggatccaagctggagtgcctggagccagtctacttgatgacttatacaagtatttcttcttccatcactcccacggagacaccatgactgtcatggatccaaagcagatgaatgttgctgctgctgtttgggctgttgtttcttatgttgttgcagacatggaagaaatgctgcctaggtcctagaaacactgtcctgccagtgaggcactgttgacccatcgtgcctgggcctaactgtcatgtagaaatagtttctg

SEQ ID NO: 114331 - DNA, 660 bp, Homo sapiens
  Payload ID: 2349
  Gene Symbol: CPQ
  Gene Name: carboxypeptidase Q
  ENST ID: ENST00000517742
  CDS Start-End: 103-660
gtcgccgccgtcagagccgccctatcagagttcctaccattttgtggttccagcagcttctgttccagattatcttaacaagaaaaccaactggaaaaaaaaatgaaattccttatcttcgcatttttcggtggtgttcaccttttatccctgtgctctgggaaagctatatgcaagaatggcatctctaagaggacttttgaagaaataaaagaagaaatagccagctgtggagatgttgctaaagcaatcatcaacctagctgtttatggtaaagcccagaacagatcctatgagcgattggcacttctggttgatactgttggacccagactgagtggctccaagaacctagaaaaagccatccaaattatgtaccaaaacctgcagcaagatgggctggagaaagttcacctggagccagtgagaataccccactgggagaggggagaagaatcagctgtgatgctggagccaagaattcataagatagccatcctgggtcttggcagcagcattgggactcctccagaaggcattacagcagaagttctggtggtgacctctttcgatgaactgcagagaagggcctcagaagcaagagggaagattgttgtttataaccaaccttacatcaactactcaaggacggtgcaatac

SEQ ID NO: 114332 - DNA, 677 bp, Homo sapiens
  Payload ID: 2349
  Gene Symbol: CPQ
  Gene Name: carboxypeptidase Q
  ENST ID: ENST00000521142
  CDS Start-End: 288-677
gcacatcaactcctgatacgcacgagctagcctgaactctgtgatgaccatcagatgcagataaactgccagacagagaagctgtcttgtagatgtgactttgctgccttcaagagcagggctttctgcacctatgctctaagcgcccttagtgttcctctcccagtggtcctggattgatttctctaatggggagcctcctctgtagggtctacaaggtgactggtggattgattgccctactccacgtaatattatcttaacaagaaaaccaactggaaaaaaaaatgaaattccttatcttcgcatttttcggtggtgttcaccttttatccctgtgctctgggaaagctatatgcaagaatggcatctctaagaggacttttgaagaaataaaagaagaaatagccagctgtggagatgttgctaaagcaatcatcaacctagctgtttatggtaaagcccagaacagatcctatgagcgattggcacttctggttgatactgttggacccagactgagtggctccaagaacctagaaaaagccatccaaattatgtaccaaaacctgcagcaagatgggctggagaaagttcacctggagccagtgagaataccccactgggagaggggagaagaatcagctgtgatgctggagccaagaattcataagata

SEQ ID NO: 114333 - DNA, 566 bp, Homo sapiens
  Payload ID: 2349
  Gene Symbol: CPQ
  Gene Name: carboxypeptidase Q
  ENST ID: ENST00000519900
  CDS Start-End: 172-566
ctccgtcgccgccgtcagagccgccctatcaggagtttccctacacaagctctttgcctgctgccatccatgtaagacatgacttgctcctccttcctttccaccattattatgaggcctcccagccctgtgtaactattatcttaacaagaaaaccaactggaaaaaaaaatgaaattccttatcttcgcatttttcggtggtgttcaccttttatccctgtgctctgggaaagctatatgcaagaatggcatctctaagaggacttttgaagaaataaaagaagaaatagccagctgtggagatgttgctaaagcaatcatcaacctagctgtttatggtaaagcccagaacagatcctatgagcgattggcacttctggttgatactgttggacccagactgagtggctccaagaacctagaaaaagccatccaaattatgtaccaaaacctgcagcaagatgggctggagaaagttcacctggagccagtgagaataccccactgggagaggggagaagaatcagctgtgatgctggagccaagaattcataagatagccat

SEQ ID NO: 114334 - DNA, 553 bp, Homo sapiens
  Payload ID: 2349
  Gene Symbol: CPQ
  Gene Name: carboxypeptidase Q
  ENST ID: ENST00000519484
  CDS Start-End: 141-553
aaagctgtaaaagtctcagttaggatgtgtgttgattaaactgtggtgtggctgagcattttgcctgaaacttcatagggaataagcatctgttaatgactttcagattatcttaacaagaaaaccaactggaaaaaaaaatgaaattccttatcttcgcatttttcggtggtgttcaccttttatccctgtgctctgggaaagctatatgcaagaatggcatctctaagaggacttttgaagaaataaaagaagaaatagccagctgtggagatgttgctaaagcaatcatcaacctagctgtttatggtaaagcccagaacagatcctatgagcgattggcacttctggttgatactgttggacccagactgagtggctccaagaacctagaaaaagccatccaaattatgtaccaaaacctgcagcaagatgggctggagaaagttcacctggagccagtgagaataccccactgggagaggggagaagaatcagctgtgatgctggagccaagaattcataagatagccatcctgggtcttggcagcag

SEQ ID NO: 114335 - DNA, 2391 bp, Homo sapiens
  Payload ID: 2350
  Gene Symbol: CPXM1
  Gene Name: carboxypeptidase X (M14 family), member 1
  Uniprot ID: Q96SM3
  ENST ID: ENST00000380605
  CDS Start-End: 66-2270
tcggcaggaagagaccgacccgccacccgccgtagcccgcgcgcccctggcactcaatccccgccatgtgggggctcctgctcgccctggccgccttcgcgccggccgtcggcccggctctgggggcgcccaggaactcggtgctgggcctcgcgcagcccgggaccaccaaggtcccaggctcgaccccggccctgcatagcagcccggcacagccgccggcggagacagctaacgggacctcagaacagcatgtccggattcgagtcatcaagaagaaaaaggtcattatgaagaagcggaagaagctaactctaactcgccccaccccactggtgactgccgggccccttgtgacccccactccagcagggaccctcgaccccgctgagaaacaagaaacaggctgtcctcctttgggtctggagtccctgcgagtttcagatagccggcttgaggcatccagcagccagtcctttggtcttggaccacaccgaggacggctcaacattcagtcaggcctggaggacggcgatctatatgatggagcctggtgtgctgaggagcaggacgccgatccatggtttcaggtggacgctgggcaccccacccgcttctcgggtgttatcacacagggcaggaactctgtctggaggtatgactgggtcacatcatacaaggtccagttcagcaatgacagtcggacctggtggggaagtaggaaccacagcagtgggatggacgcagtatttcctgccaattcagacccagaaactccagtgctgaacctcctgccggagccccaggtggcccgcttcattcgcctgctgccccagacctggctccagggaggcgcgccttgcctccgggcagagatcctggcctgcccagtctcagaccccaatgacctattccttgaggcccctgcgtcgggatcctctgaccctctagactttcagcatcacaattacaaggccatgaggaagctgatgaagcaggtacaagagcaatgccccaacatcacccgcatctacagcattgggaagagctaccagggcctgaagctgtatgtgatggaaatgtcggacaagcctggggagcatgagctgggggagcctgaggtgcgctacgtggctggcatgcatgggaacgaggccctggggcgggagttgcttctgctcctgatgcagttcctgtgccatgagttcctgcgagggaacccacgggtgacccggctgctctctgagatgcgcattcacctgctgccctccatgaaccctgatggctatgagatcgcctaccaccggggttcagagctggtgggctgggccgagggccgctggaacaaccagagcatcgatcttaaccataattttgctgacctcaacacaccactgtgggaagcacaggacgatgggaaggtgccccacatcgtccccaaccatcacctgccattgcccacttactacaccctgcccaatgccaccgtggctcctgaaacgcgggcagtaatcaagtggatgaagcggatcccctttgtgctaagtgccaacctccacgggggtgagctcgtggtgtcctacccattcgacatgactcgcaccccgtgggctgcccgcgagctcacgcccacaccagatgatgctgtgtttcgctggctcagcactgtctatgctggcagtaatctggccatgcaggacaccagccgccgaccctgccacagccaggacttctccgtgcacggcaacatcatcaacggggctgactggcacacggtccccgggagcatgaatgacttcagctacctacacaccaactgctttgaggtcactgtggagctgtcctgtgacaagttccctcacgagaatgaattgccccaggagtgggagaacaacaaagacgccctcctcacctacctggagcaggtgcgcatgggcattgcaggagtggtgagggacaaggacacggagcttgggattgctgacgctgtcattgccgtggatgggattaaccatgacgtgaccacggcgtggggcggggattattggcgtctgctgaccccaggggactacatggtgactgccagtgccgagggctaccattcagtgacacggaactgtcgggtcacctttgaagagggccccttcccctgcaatttcgtgctcaccaagactcccaaacagaggctgcgcgagctgctggcagctggggccaaggtgcccccggaccttcgcaggcgcctggagcggctaaggggacagaaggattgatacctgcggtttaagagccctagggcaggctggacctgtcaagacgggaaggggaagagtagagagggagggacaaagtgaggaaaaggtgctcattaaagctaccgggcaccttagctca

SEQ ID NO: 114336 - DNA, 3554 bp, Homo sapiens
  Payload ID: 2351
  Gene Symbol: CPXM2
  Gene Name: carboxypeptidase X (M14 family), member 2
  Uniprot ID: Q8N436
  ENST ID: ENST00000241305
  CDS Start-End: 156-2426
gccggtcacacgcgcagccagccggccgcctcccgcgcccaagcgcgccgctctgctgtgccctgcgcccttgccccgcgccagcttctgcgcccgcagcccgcccggcgcccccggtgaccgtgaccctgccctgggcgcggggcggagcaggcatgtcccgcccggggaccgctaccccagcgctggccctggtgctcctggcagtgaccctggccggggtcggagcccagggcgcagccctcgaggaccctgattattacgggcaggagatctggagccgggagccctactacgcgcgcccggagcccgagctcgagaccttctctccgccgctgcctgcggggcccggggaggagtgggagcggcgcccgcaggagcccaggccgcccaagagggccaccaagcccaagaaagctcccaagagggagaagtcggctccggagccgcctccaccaggtaaacacagcaacaaaaaagttatgagaaccaagagctctgagaaggctgccaacgatgatcacagtgtccgtgtggcccgtgaagatgtcagagagagttgcccacctcttggtctggaaaccttaaaaatcacagacttccagctccatgcctccacggtgaagcgctatggcctgggggcacatcgagggagactcaacatccaggcgggcattaatgaaaatgatttttatgacggagcgtggtgcgcgggaagaaatgacctccagcagtggattgaagtggatgctcggcgcctgaccagattcactggtgtcatcactcaagggaggaactccctctggctgagtgactgggtgacatcctataaggtcatggtgagcaatgacagccacacgtgggtcactgttaagaatggatctggagacatgatatttgagggaaacagtgagaaggagatccctgttctcaatgagctacccgtccccatggtggcccgctacatccgcataaaccctcagtcctggtttgataatgggagcatctgcatgagaatggagatcctgggctgcccactgccagatcctaataattattatcaccgccggaacgagatgaccaccactgatgacctggattttaagcaccacaattataaggaaatgcgccagttgatgaaagttgtgaatgaaatgtgtcccaatatcaccagaatttacaacattggaaaaagccaccagggcctgaagctgtatgctgtggagatctcagatcaccctggggagcatgaagtcggtgagcccgagttccactacatcgcgggggcccacggcaatgaggtgctgggccgggagctgctgctgctgctggtgcagttcgtgtgtcaggagtacttggcccggaatgcgcgcatcgtccacctggtggaggagacgcggattcacgtcctcccctccctcaaccccgatggctacgagaaggcctacgaagggggctcggagctgggaggctggtccctgggacgctggacccacgatggaattgacatcaacaacaactttcctgatttaaacacgctgctctgggaggcagaggatcgacagaatgtccccaggaaagttcccaatcactatattgcaatccctgagtggtttctgtcggaaaatgccacggtggctgccgagaccagagcagtcatagcctggatggaaaaaatcccttttgtgctgggcggcaacctgcagggcggcgagctggtggtggcgtacccctacgacctggtgcggtccccctggaagacgcaggaacacacccccacccccgacgaccacgtgttccgctggctggcctactcctatgcctccacacaccgcctcatgacagacgcccggaggagggtgtgccacacggaggacttccagaaggaggagggcactgtcaatggggcctcctggcacaccgtcgctggaagtctgaacgatttcagctaccttcatacaaactgcttcgaactgtccatctacgtgggctgtgataaatacccacatgagagccagctgcccgaggagtgggagaataaccgggaatctctgatcgtgttcatggagcaggttcatcgtggcattaaaggcttggtgagagattcacatggaaaaggaatcccaaacgccattatctccgtagaaggcattaaccatgacatccgaacagccaacgatggggattactggcgcctcctgaaccctggagagtatgtggtcacagcaaaggccgaaggtttcactgcatccaccaagaactgtatggttggctatgacatgggggccacaaggtgtgacttcacacttagcaaaaccaacatggccaggatccgagagatcatggagaagtttgggaagcagcccgtcagcctgccagccaggcggctgaagctgcgggggcagaagagacgacagcgtgggtgaccctcctgggcccttgagactcgtctgggacccatgcaaattaaaccaacctggtagtagctccatagtggactcactcactgttgtttcctctgtaattcaagaagtgcctggaagagagggtgcattgtgaggcaggtcccaaaagggaaggctggaggctgaggctgttttcttttctttgttcccatttatccaaataacttggacagagcagcagagaaaagctgatgggagtgagagaactcagcaagccaacctgggaatcagagagagaaggagaaggaggggagcctgtccgttcagagcctctggctgcatagaaaaggattctggtgcttcccctgtttgcgtggcagcaagggttccacgtgcatttgcaatttgcacagctaaaattgcagcatttccccagctgggctgtcccaaatgttaccatttgagatgctcccaggcgtcctaagagaatccaccctctctggccctgggacattgcaagctgctacaaataaattctgtgttcttttgacaatagcgtcattgccaagtgcacatcagtgagcctcttgaatctgtttagtctcctttttcaacaaaggagtgtgttcagaaaaggagagagaggctgagatcattcaggagtttgttgggcagcaagcatggagcttcttgcacaaattctgggtccataaacaacccccaaagtccctgctgatccagtagccctggaggttccccaggtagggagagccagaggtgccagccttcctgaagggccagaaaatttagcctggatctcctcttttacctgctaggactggaaagagccagaagtggggtggcctgaagccctctctctgcttgaggtattgcccctgtgtggaattgagtgctcatgggttggcctcatatcagcctgggagttatttttgatatgtagaatgccagatcttccagattaggctaaatgtaatgaaaacctcttaggattatctgtggagcatcagtttgggaagaattattgaattatcttgcaagaaaaaagtatgtctcactttttgttaatgttgctgcctcattgacctgggaaaaatgaaaaaaaaaaataaagcaaatggtaagaccctt

SEQ ID NO: 114337 - DNA, 2512 bp, Homo sapiens
  Payload ID: 2351
  Gene Symbol: CPXM2
  Gene Name: carboxypeptidase X (M14 family), member 2
  ENST ID: ENST00000615851
  CDS Start-End: 1838-2512
gggggctttcttgggcttggctgcttggaacacctgcctccaaggaccggcctcggaggggtcgccgggaaagggagggaagaaggaagggcggggccggcccccctgcgcccgccccgcgcctctgcgcgcccctgtccgccccggcccagcccagcccagccccgcgggccggtcacacgcgcagccagccggccgcctcccgcgcccaagcgcgccgctctgctgtgccctgcgcccttgccccgcgccagcttctgcgcccgcagcccgcccggcgcccccggtgaccgtgaccctgccctgggcgcggggcggagcaggcatgtcccgcccggggaccgctaccccagcgctggccctggtgctcctggcagtgaccctggccggggtcggagcccagggcgcagccctcgaggaccctgattattacgggcaggagatctggagccgggagccctactacgcgcgcccggagcccgagctcgagaccttctctccgccgctgcctgcggggcccggggaggagtgggagcggcgcccgcaggagcccaggccgcccaagagggccaccaagcccaagaaagctcccaagagggagaagtcggctccggagccgcctccaccaggtaaacacagcaacaaaaaagttatgagaaccaagagctctgagaaggctgccaacgatgatcacagtgtccgtgtggcccgtgaagatgtcagagagagttgcccacctcttggtctggaaaccttaaaaatcacagacttccagctccatgcctccacggtgaagcgctatggcctgggggcacatcgagggagactcaacatccaggcgggcattaatgaaaatgatttttatgacggagcgtggtgcgcgggaagaaatgacctccagcagtggattgaagtggatgctcggcgcctgaccagattcactggtgtcatcactcaagggaggaactccctctggctgagtgactgggtgacatcctataaggtcatggtgagcaatgacagccacacgtgggtcactgttaagaatggatctggagacatgatatttgagggaaacagtgagaaggagatccctgttctcaatgagctacccgtccccatggtggcccgctacatccgcataaaccctcagtcctggtttgataatgggagcatctgcatgagaatggagatcctgggctgcccactgccagatcctaataattattatcaccgccggaacgagatgaccaccactgatgacctggattttaagcaccacaattataaggaaatgcgccagttgatgaaagttgtgaatgaaatgtgtcccaatatcaccagaatttacaacattggaaaaagccaccagggcctgaagctgtatgctgtggagatctcagatcaccctggggagcatgaagtcggtgagcccgagttccactacatcgcgggggcccacggcaatgaggtgctgggccgggagctgctgctgctgctggtgcagttcgtgtgtcaggagtacttggcccggaatgcgcgcatcgtccacctggtggaggagacgcggattcacgtcctcccctccctcaaccccgatggctacgagaaggcctacgaagggggctcggagctgggaggctggtccctgggacgctggacccacgatggaattgacatcaacaacaactttcctgatttaaacacgctgctctgggaggcagaggatcgacagaatgtccccaggaaagttcccaatcactatattgcaatccctgagtggtttctgtcggaaaatgccacggtggctgccgagaccagagcagtcatagcctggatggaaaaaatcccttttgtgctgggcggcaacctgcagggcggcgagctggtggtggcgtacccctacgacctggtgcggtccccctggaagacgcaggaacacacccccacccccgacgaccacgtgttccgctggctggcctactcctatgcctccacacaccgcctcatgacagacgcccggaggagggtgtgccacacggaggacttccagaaggaggagggcactgtcaatggggcctcctggcacaccgtcgctggaagtctgaacgatttcagctaccttcatacaaactgcttcgaactgtccatctacgtgggctgtgataaatacccacatgagagccagctgcccgaggagtgggagaataaccgggaatctctgatcgtgttcatggagcaggttcatcgtggcattaaaggcttggtgagagattcacatggaaaaggaatcccaaacgccattatctccgtagaaggcattaaccatgacatccgaacaggcagagtttccctgcagaagctttctcttgcctgccgccgtgtgagatgtgcttttgctctttcttcatcttccaccatgattgtgaggcctccccagccatatggaactgtgcctcactctagtcctgaccctgttaccaccaaaatatccccactgaggaacttctag

SEQ ID NO: 114338 - DNA, 2136 bp, Homo sapiens
  Payload ID: 2352
  Gene Symbol: CPZ
  Gene Name: carboxypeptidase Z
  Uniprot ID: Q66K79
  ENST ID: ENST00000315782
  CDS Start-End: 79-2004
agcgagcgcagagccccggccccgcgcggcccgagtgccacatcactgcgctggccgtccaaggtccgccgccccaccatgccgcccccgctgccgctgctgctccttacagtcctggtcgtcgccgctgcccggccggggtgcgagtttgagcggaaccccgccgccacctgcgtggacctgcagctcaggacctgcagcgatgccgcctacaaccacaccaccttccccaacctgcttcagcaccggtcgtgggaggtggtggaggccagctccgagtacatcctgctgagcgttctacaccagctcctggaaggccagtgcaacccggacctgcggctgctgggctgtgctgtgctggccccccggtgtgagggcggctgggtgcgcagaccctgccggcacatctgcgagggcctgcgggaggtctgccagcccgccttcgacgccattgacatggcctggccctacttccttgactgccaccgctacttcacgagagaggacgagggctgctatgacccgctggagaagcttcggggaggcctggaggctgacgaggcactgccctcagggctgccgcccaccttcatccgcttcagccaccactcctacgcccagatggtgcgtgtgctgaggcggacggcctcccgctgcgcccacgtggccaggacctacagcatcgggcgcagcttcgacggcagggagctgctggtcatcgagttctccagccgccccggccagcacgagctgatggagcccgaggtgaagctcatcggcaacattcatggcaacgaggtggcgggccgggagatgctcatctacctagcccagtacctgtgctctgagtacctgcttggtaacccccgcatccagcgcctgctcaacaccacccgcatccacctgctgccctccatgaaccctgacggctatgaggtggcagctgccgagggtgccggctacaacgggtggacgagcgggaggcagaacgcgcagaacctggatctgaaccgaaatttcccggacctgacgtccgagtactaccggctggcggagacccgcggcgcacgcagcgaccacatccccatcccccagcactactggtggggtaaggtggccccggagacaaaggcaatcatgaagtggatgcagaccataccctttgtgctctcagccagccttcatgggggcgacctggtggtgtcctaccccttcgacttctccaagcacccccaggaggagaagatgttttctcccacgcccgacgagaagatgttcaagctgctgtccagagcctacgctgacgtccaccccatgatgatggacaggtcggagaataggtgtggaggcaatttcctgaagagggggagcatcatcaacggggcggactggtacagcttcacgggaggcatgtccgatttcaactacctgcacaccaactgctttgagatcacggtagagctgggctgtgtgaagttcccccccgaggaggccctgtacatactctggcagcacaacaaggagtcactcctgaatttcgtggagacggtgcaccggggcatcaaaggtgtggtgacagataaattcggcaagccagtcaaaaacgcccggatctcagtcaaaggcattcgccacgacatcaccacagccccagatggtgactactggagactgctgcccccaggtatccacattgtcattgcccaagcccctggctacgccaaagtcatcaagaaagtcatcatccccgcccggatgaagagggctggccgtgtggacttcattctgcaacctctggggatgggacccaagaactttattcatgggctgcggaggactgggccccacgacccactgggaggtgccagctctttgggggaggccacggagcccgacccgctccgggcgcgcaggcagccctcggccgacgggagtaagccctggtggtggtcctacttcacatcgctgagcacccacaggccacgctggctgctcaagtactagccccggccccagcacccgccaggatgtggagaccgaggcccatctccgcatcccgggctcctggctcttgattttgtctgccacagacatcccacaaagccgctgccattttattaaagtgttttgatccac

SEQ ID NO: 114339 - DNA, 2267 bp, Homo sapiens
  Payload ID: 2352
  Gene Symbol: CPZ
  Gene Name: carboxypeptidase Z
  Uniprot ID: Q66K79
  ENST ID: ENST00000360986
  CDS Start-End: 175-2133
agcggcatcctctctctagcttctggcgctgcccactgtaacccgactccggcatttgcgtttggggcgccctccctgcgccgggggcgggagcccagcgagcgcagagccccggccccgcgcggcccgagtgccacatcactgcgctggccgtccaaggtccgccgccccaccatgccgcccccgctgccgctgctgctccttacagtcctggtcgtcgccgctgcccggccggggtgcgagtttgagcggaaccccgccggtgaatgccacaggccaccagctgcagacagcgccacctgcgtggacctgcagctcaggacctgcagcgatgccgcctacaaccacaccaccttccccaacctgcttcagcaccggtcgtgggaggtggtggaggccagctccgagtacatcctgctgagcgttctacaccagctcctggaaggccagtgcaacccggacctgcggctgctgggctgtgctgtgctggccccccggtgtgagggcggctgggtgcgcagaccctgccggcacatctgcgagggcctgcgggaggtctgccagcccgccttcgacgccattgacatggcctggccctacttccttgactgccaccgctacttcacgagagaggacgagggctgctatgacccgctggagaagcttcggggaggcctggaggctgacgaggcactgccctcagggctgccgcccaccttcatccgcttcagccaccactcctacgcccagatggtgcgtgtgctgaggcggacggcctcccgctgcgcccacgtggccaggacctacagcatcgggcgcagcttcgacggcagggagctgctggtcatcgagttctccagccgccccggccagcacgagctgatggagcccgaggtgaagctcatcggcaacattcatggcaacgaggtggcgggccgggagatgctcatctacctagcccagtacctgtgctctgagtacctgcttggtaacccccgcatccagcgcctgctcaacaccacccgcatccacctgctgccctccatgaaccctgacggctatgaggtggcagctgccgagggtgccggctacaacgggtggacgagcgggaggcagaacgcgcagaacctggatctgaaccgaaatttcccggacctgacgtccgagtactaccggctggcggagacccgcggcgcacgcagcgaccacatccccatcccccagcactactggtggggtaaggtggccccggagacaaaggcaatcatgaagtggatgcagaccataccctttgtgctctcagccagccttcatgggggcgacctggtggtgtcctaccccttcgacttctccaagcacccccaggaggagaagatgttttctcccacgcccgacgagaagatgttcaagctgctgtccagagcctacgctgacgtccaccccatgatgatggacaggtcggagaataggtgtggaggcaatttcctgaagagggggagcatcatcaacggggcggactggtacagcttcacgggaggcatgtccgatttcaactacctgcacaccaactgctttgagatcacggtagagctgggctgtgtgaagttcccccccgaggaggccctgtacatactctggcagcacaacaaggagtcactcctgaatttcgtggagacggtgcaccggggcatcaaaggtgtggtgacagataaattcggcaagccagtcaaaaacgcccggatctcagtcaaaggcattcgccacgacatcaccacagccccagatggtgactactggagactgctgcccccaggtatccacattgtcattgcccaagcccctggctacgccaaagtcatcaagaaagtcatcatccccgcccggatgaagagggctggccgtgtggacttcattctgcaacctctggggatgggacccaagaactttattcatgggctgcggaggactgggccccacgacccactgggaggtgccagctctttgggggaggccacggagcccgacccgctccgggcgcgcaggcagccctcggccgacgggagtaagccctggtggtggtcctacttcacatcgctgagcacccacaggccacgctggctgctcaagtactagccccggccccagcacccgccaggatgtggagaccgaggcccatctccgcatcccgggctcctggctcttgattttgtctgccacagacatcccacaaagccgctgccattttattaaagtgttttgatccactt

SEQ ID NO: 114340 - DNA, 2538 bp, Homo sapiens
  Payload ID: 2352
  Gene Symbol: CPZ
  Gene Name: carboxypeptidase Z
  Uniprot ID: Q66K79
  ENST ID: ENST00000382480
  CDS Start-End: 849-2396
agcggcatcctctctctagcttctggcgctgcccactgtaacccgactccggcatttgcgtttggggcgccctccctgcgccgggggcgggagcccagcgagcgcagagccccggccccgcgcggcccgagtgccacatcactgcgctggccgtccaaggtccgccgccccaccatgccgcccccgctgccgctgctgctccttacagtcctggtcgtcgccgctgcccggccggggtgcgagtttgagcggaaccccgccggtgaatgccacaggccaccagctgcagacagcggtacagtaccgggacctccctggcttctgttctgtaggagggctgcagcccccacactgtcagagcactttaggcagctgaatccgtgatttcagaagctctgattcctgcacagtagctgttgtcctggtcctcccctgccagaccgtgggtgcccctccctgcaggccctggccctgcgtggggtcccctacgtaaatgtctgatgcgtgacggtcagggccactgcaggagggactgacctgccgaccctgcctccccagccacctgcgtggacctgcagctcaggacctgcagcgatgccgcctacaaccacaccaccttccccaacctgcttcagcaccggtcgtgggaggtggtggaggccagctccgagtacatcctgctgagcgttctacaccagctcctggaaggccagtgcaacccggacctgcggctgctgggctgtgctgtgctggccccccggtgtgagggcggctgggtgcgcagaccctgccggcacatctgcgagggcctgcgggaggtctgccagcccgccttcgacgccattgacatggcctggccctacttccttgactgccaccgctacttcacgagagaggacgagggctgctatgacccgctggagaagcttcggggaggcctggaggctgacgaggcactgccctcagggctgccgcccaccttcatccgcttcagccaccactcctacgcccagatggtgcgtgtgctgaggcggacggcctcccgctgcgcccacgtggccaggacctacagcatcgggcgcagcttcgacggcagggagctgctggtcatcgagttctccagccgccccggccagcacgagctgatggagcccgaggtgaagctcatcggcaacattcatggcaacgaggtggcgggccgggagatgctcatctacctagcccagtacctgtgctctgagtacctgcttggtaacccccgcatccagcgcctgctcaacaccacccgcatccacctgctgccctccatgaaccctgacggctatgaggtggcagctgccgagggtgccggctacaacgggtggacgagcgggaggcagaacgcgcagaacctggatctgaaccgaaatttcccggacctgacgtccgagtactaccggctggcggagacccgcggcgcacgcagcgaccacatccccatcccccagcactactggtggggtaaggtggccccggagacaaaggcaatcatgaagtggatgcagaccataccctttgtgctctcagccagccttcatgggggcgacctggtggtgtcctaccccttcgacttctccaagcacccccaggaggagaagatgttttctcccacgcccgacgagaagatgttcaagctgctgtccagagcctacgctgacgtccaccccatgatgatggacaggtcggagaataggtgtggaggcaatttcctgaagagggggagcatcatcaacggggcggactggtacagcttcacgggaggcatgtccgatttcaactacctgcacaccaactgctttgagatcacggtagagctgggctgtgtgaagttcccccccgaggaggccctgtacatactctggcagcacaacaaggagtcactcctgaatttcgtggagacggtgcaccggggcatcaaaggtgtggtgacagataaattcggcaagccagtcaaaaacgcccggatctcagtcaaaggcattcgccacgacatcaccacagccccagatggtgactactggagactgctgcccccaggtatccacattgtcattgcccaagcccctggctacgccaaagtcatcaagaaagtcatcatccccgcccggatgaagagggctggccgtgtggacttcattctgcaacctctggggatgggacccaagaactttattcatgggctgcggaggactgggccccacgacccactgggaggtgccagctctttgggggaggccacggagcccgacccgctccgggcgcgcaggcagccctcggccgacgggagtaagccctggtggtggtcctacttcacatcgctgagcacccacaggccacgctggctgctcaagtactagccccggccccagcacccgccaggatgtggagaccgaggcccatctccgcatcccgggctcctggctcttgattttgtctgccacagacatcccacaaagccgctgccattttattaaagtgttttgatccactttgcactgg

SEQ ID NO: 114341 - DNA, 2464 bp, Homo sapiens
  Payload ID: 2352
  Gene Symbol: CPZ
  Gene Name: carboxypeptidase Z
  ENST ID: ENST00000515606
  CDS Start-End: 109-318
gcgccctccctgcgccgggggcgggagcccagcgagcgcagagccccggccccgcgcggcccgagtgccacatcactgcgctggccgtccaaggtccgccgccccaccatgccgcccccgctgccgctgctgctccttacagtcctggtcgtcgccgctgcccggccggggtgcgagtttgagcggaaccccgccggtgaatgccacaggccaccagctgcagacagcggtacagtaccgggacctccctggcttctgttctgtaggagggctgcagcccccacactgtcagagcactttaggcagctgaatccgtgatttcagaagctctgattcctgcacagtagctgttgtcctggtcctcccctgccagaccgtgggtgcccctccctgcaggccctggccctgcgtggggtcccctacgtaaatgtctgatgcgtgacggtcagggccactgcaggagggactgacctgccgaccctgcctccccagccacctgcgtggacctgcagctcaggacctgcagcgatgccgcctacaaccacaccaccttccccaacctgcttcagcaccggtcgtgggaggtggtggaggccagctccgagtacatcctgctgagcgttctacaccagctcctggaaggccagtgcaacccggacctgcggctgctgggctgtgctgtgctggccccccggtgtgagggcggctgggtgcgcagaccctgccggcacatctgcgagggcctgcgggaggtctgccagcccgccttcgacgccattgacatggcctggccctacttccttgactgccaccgctacttcacgagagaggacgagggctgctatgacccgctggagaagcttcggggaggcctggaggctgacgaggcactgccctcagggctgccgcccaccttcatccgcttcagccaccactcctacgcccagatggtgcgtgtgctgaggcggacggcctcccgctgcgcccacgtggccaggacctacagcatcgggcgcagcttcgacggcagggagctgctggtcatcgagttctccagccgccccggccagcacgagctgatggagcccgaggtgaagctcatcggcaacattcatggcaacgaggtggcgggccgggagatgctcatctacctagcccagtacctgtgctctgagtacctgcttggtaacccccgcatccagcgcctgctcaacaccacccgcatccacctgctgccctccatgaaccctgacggctatgaggtggcagctgccgagggtgccggctacaacgggtggacgagcgggaggcagaacgcgcagaacctggatctgaaccgaaatttcccggacctgacgtccgagtactaccggctggcggagacccgcggcgcacgcagcgaccacatccccatcccccagcactactggtggggtaaggtggccccggagacaaaggcaatcatgaagtggatgcagaccataccctttgtgctctcagccagccttcatgggggcgacctggtggtgtcctaccccttcgacttctccaagcacccccaggaggagaagatgttttctcccacgcccgacgagaagatgttcaagctgctgtccagagcctacgctgacgtccaccccatgatgatggacaggtcggagaataggtgtggaggcaatttcctgaagagggggagcatcatcaacggggcggactggtacagcttcacgggaggcatgtccgatttcaactacctgcacaccaactgctttgagatcacggtagagctgggctgtgtgaagttcccccccgaggaggccctgtacatactctggcagcacaacaaggagtcactcctgaatttcgtggagacggtgcaccggggcatcaaaggtgtggtgacagataaattcggcaagccagtcaaaaacgcccggatctcagtcaaaggcattcgccacgacatcaccacagccccagatggtgactactggagactgctgcccccaggtatccacattgtcattgcccaagcccctggctacgccaaagtcatcaagaaagtcatcatccccgcccggatgaagagggctggccgtgtggacttcattctgcaacctctggggatgggacccaagaactttattcatgggctgcggaggactgggccccacgacccactgggaggtgccagctctttgggggaggccacggagcccgacccgctccgggcgcgcaggcagccctcggccgacgggagtaagccctggtggtggtcctacttcacatcgctgagcacccacaggccacgctggctgctcaagtactagccccggccccagcacccgccaggatgtggagaccgaggcccatctccgcatcccgggctcctggctcttgattttgtctgccacagacatcccacaaagccgctgccattttattaaagtgttttgatccactt

SEQ ID NO: 114342 - DNA, 2091 bp, Homo sapiens
  Payload ID: 2353
  Gene Symbol: CPVL
  Gene Name: carboxypeptidase, vitellogenic-like
  Uniprot ID: Q9H3G5
  ENST ID: ENST00000265394
  CDS Start-End: 120-1550
gtgactgggtggggctgcctcacttctgcctgatttgggaagcgctgcaaggacaaccggctggggtccttgcgcgccgcggctcagggaggagcaccgactgcgccgcaccctgagagatggttggtgccatgtggaaggtgattgtttcgctggtcctgttgatgcctggcccctgtgatgggctgtttcgctccctatacagaagtgtttccatgccacctaagggagactcaggacagccattatttctcaccccttacattgaagctgggaagatccaaaaaggaagagaattgagtttggtcggccctttcccaggactgaacatgaagagttatgccggcttcctcaccgtgaataagacttacaacagcaacctcttcttctggttcttcccagctcagatacagccagaagatgccccagtagttctctggctacagggtgggccgggaggttcatccatgtttggactctttgtggaacatgggccttatgttgtcacaagtaacatgaccttgcgtgacagagacttcccctggaccacaacgctctccatgctttacattgacaatccagtgggcacaggcttcagttttactgatgatacccacggatatgcagtcaatgaggacgatgtagcacgggatttatacagtgcactaattcagtttttccagatatttcctgaatataaaaataatgacttttatgtcactggggagtcttatgcagggaaatatgtgccagccattgcacacctcatccattccctcaaccctgtgagagaggtgaagatcaacctgaacggaattgctattggagatggatattctgatcccgaatcaattatagggggctatgcagaattcctgtaccaaattggcttgttggatgagaagcaaaaaaagtacttccagaagcagtgccatgaatgcatagaacacatcaggaagcagaactggtttgaggcctttgaaatactggataaactactagatggcgacttaacaagtgatccttcttacttccagaatgttacaggatgtagtaattactataactttttgcggtgcacggaacctgaggatcagctttactatgtgaaatttttgtcactcccagaggtgagacaagccatccacgtggggaatcagacttttaatgatggaactatagttgaaaagtacttgcgagaagatacagtacagtcagttaagccatggttaactgaaatcatgaataattataaggttctgatctacaatggccaactggacatcatcgtggcagctgccctgacagagcgctccttgatgggcatggactggaaaggatcccaggaatacaagaaggcagaaaaaaaagtttggaagatctttaaatctgacagtgaagtggctggttacatccggcaagcgggtgacttccatcaggtaattattcgaggtggaggacatattttaccctatgaccagcctctgagagcttttgacatgattaatcgattcatttatggaaaaggatgggatccttatgttggataaactaccttcccaaaagagaacatcagaggttttcattgctgaaaagaaaatcgtaaaaacagaaaatgtcataggaataaaaaaattatcttttcatatctgcaagatttttttcatcaataaaaattatccttgaaacaagtgagcttttgtttttggggggagatgtttactacaaaattaacatgagtacatgagtaagaattacattatttaacttaaaggatgaaaggtatggatgatgtgacactgagacaagatgtataaatgaaattttagggtcttgaataggaagttttaatttcttctaagagtaagtgaaaagtgcagttgtaacaaacaaagctgtaacatctttttctgccaataacagaagtttggcatgccgtgaaggtgtttggaaatattattggataagaatagctcaattatcccaaataaatggatgaagctataatagttttggggaaaagattctcaaatgtataaagtcttagaacaaaagaattctttgaaataaaaatattatatataaaagtaa

SEQ ID NO: 114343 - DNA, 1739 bp, Homo sapiens
  Payload ID: 2353
  Gene Symbol: CPVL
  Gene Name: carboxypeptidase, vitellogenic-like
  Uniprot ID: Q9H3G5
  ENST ID: ENST00000396276
  CDS Start-End: 168-1598
agcgctgcaaggacaaccggctggggtccttgcgcgccgcggctcagggaggagcaccgactgcgccgcgtaagtgccgcctgccctgcgtgggtcgtgccagctcagcgggacaggtcctcgcctcggtccctcggacttagggagcgcggggcagaccctgagagatggttggtgccatgtggaaggtgattgtttcgctggtcctgttgatgcctggcccctgtgatgggctgtttcgctccctatacagaagtgtttccatgccacctaagggagactcaggacagccattatttctcaccccttacattgaagctgggaagatccaaaaaggaagagaattgagtttggtcggccctttcccaggactgaacatgaagagttatgccggcttcctcaccgtgaataagacttacaacagcaacctcttcttctggttcttcccagctcagatacagccagaagatgccccagtagttctctggctacagggtgggccgggaggttcatccatgtttggactctttgtggaacatgggccttatgttgtcacaagtaacatgaccttgcgtgacagagacttcccctggaccacaacgctctccatgctttacattgacaatccagtgggcacaggcttcagttttactgatgatacccacggatatgcagtcaatgaggacgatgtagcacgggatttatacagtgcactaattcagtttttccagatatttcctgaatataaaaataatgacttttatgtcactggggagtcttatgcagggaaatatgtgccagccattgcacacctcatccattccctcaaccctgtgagagaggtgaagatcaacctgaacggaattgctattggagatggatattctgatcccgaatcaattatagggggctatgcagaattcctgtaccaaattggcttgttggatgagaagcaaaaaaagtacttccagaagcagtgccatgaatgcatagaacacatcaggaagcagaactggtttgaggcctttgaaatactggataaactactagatggcgacttaacaagtgatccttcttacttccagaatgttacaggatgtagtaattactataactttttgcggtgcacggaacctgaggatcagctttactatgtgaaatttttgtcactcccagaggtgagacaagccatccacgtggggaatcagacttttaatgatggaactatagttgaaaagtacttgcgagaagatacagtacagtcagttaagccatggttaactgaaatcatgaataattataaggttctgatctacaatggccaactggacatcatcgtggcagctgccctgacagagcgctccttgatgggcatggactggaaaggatcccaggaatacaagaaggcagaaaaaaaagtttggaagatctttaaatctgacagtgaagtggctggttacatccggcaagcgggtgacttccatcaggtaattattcgaggtggaggacatattttaccctatgaccagcctctgagagcttttgacatgattaatcgattcatttatggaaaaggatgggatccttatgttggataaactaccttcccaaaagagaacatcagaggttttcattgctgaaaagaaaatcgtaaaaacagaaaatgtcataggaataaaaaaattatcttttcatatctgcaagatttttttcatcaataaaaattatccttgaaacaa

SEQ ID NO: 114344 - DNA, 2213 bp, Homo sapiens
  Payload ID: 2353
  Gene Symbol: CPVL
  Gene Name: carboxypeptidase, vitellogenic-like
  Uniprot ID: Q9H3G5
  ENST ID: ENST00000409850
  CDS Start-End: 648-2078
gctcctttcgcttttcgctcgctgcactccaagccccggaacacccgcgtccgcacactaagggcaccaccgctctcccacctctgcgctgtcagatgtcaggcgcggaggtgctctgggcaccgaggtgctggcgaaccaaacaagtatcaccccggacgcctgcccccattccgagagagcgggcgggatggccacaggctgcaatacagtgacacgatcacagctcactgctacagcctctacctcctgggcttaatccatcctccctcctcagcctcccaagcagctgggactacaggtgattttgatatgctgctaaggtttgataagagaaatgagattcagagaacagattatattgttgaagagcttgactggaaatgatccaaacggaaacattggctcttcctggggttccagcctgctgtcttgacaggaactataccatcagctctcctgggtctcttacatgccaagtcatcctgcagatctgggactcactccgtaatcagcttgattgctgtaagttgaacacgtcagtggcatgggcaccagctgcacaaccctaggagccaccaaacacagtatattctatataaatgttgctgccaggagccccagttcaaactacaataccctgagagatggttggtgccatgtggaaggtgattgtttcgctggtcctgttgatgcctggcccctgtgatgggctgtttcgctccctatacagaagtgtttccatgccacctaagggagactcaggacagccattatttctcaccccttacattgaagctgggaagatccaaaaaggaagagaattgagtttggtcggccctttcccaggactgaacatgaagagttatgccggcttcctcaccgtgaataagacttacaacagcaacctcttcttctggttcttcccagctcagatacagccagaagatgccccagtagttctctggctacagggtgggccgggaggttcatccatgtttggactctttgtggaacatgggccttatgttgtcacaagtaacatgaccttgcgtgacagagacttcccctggaccacaacgctctccatgctttacattgacaatccagtgggcacaggcttcagttttactgatgatacccacggatatgcagtcaatgaggacgatgtagcacgggatttatacagtgcactaattcagtttttccagatatttcctgaatataaaaataatgacttttatgtcactggggagtcttatgcagggaaatatgtgccagccattgcacacctcatccattccctcaaccctgtgagagaggtgaagatcaacctgaacggaattgctattggagatggatattctgatcccgaatcaattatagggggctatgcagaattcctgtaccaaattggcttgttggatgagaagcaaaaaaagtacttccagaagcagtgccatgaatgcatagaacacatcaggaagcagaactggtttgaggcctttgaaatactggataaactactagatggcgacttaacaagtgatccttcttacttccagaatgttacaggatgtagtaattactataactttttgcggtgcacggaacctgaggatcagctttactatgtgaaatttttgtcactcccagaggtgagacaagccatccacgtggggaatcagacttttaatgatggaactatagttgaaaagtacttgcgagaagatacagtacagtcagttaagccatggttaactgaaatcatgaataattataaggttctgatctacaatggccaactggacatcatcgtggcagctgccctgacagagcgctccttgatgggcatggactggaaaggatcccaggaatacaagaaggcagaaaaaaaagtttggaagatctttaaatctgacagtgaagtggctggttacatccggcaagcgggtgacttccatcaggtaattattcgaggtggaggacatattttaccctatgaccagcctctgagagcttttgacatgattaatcgattcatttatggaaaaggatgggatccttatgttggataaactaccttcccaaaagagaacatcagaggttttcattgctgaaaagaaaatcgtaaaaacagaaaatgtcataggaataaaaaaattatcttttcatatctgcaagatttttttcatcaataaaaattatccttg

SEQ ID NO: 114345 - DNA, 553 bp, Homo sapiens
  Payload ID: 2353
  Gene Symbol: CPVL
  Gene Name: carboxypeptidase, vitellogenic-like
  ENST ID: ENST00000447426
  CDS Start-End: 129-553
gactcactctagttgaaagccctgggggaaggaacaaactctgcagcctgactgctgtgtttaatcccagctctcctctactagctggaagagaattgagtttggtcggccctttcccaggactgaacatgaagagttatgccggcttcctcaccgtgaataagacttacaacagcaacctcttcttctggttcttcccagctcagatacagccagaagatgccccagtagttctctggctacagggtgggccgggaggttcatccatgtttggactctttgtggaacatgggccttatgttgtcacaagtaacatgaccttgcgtgacagagacttcccctggaccacaacgctctccatgctttacattgacaatccagtgggcacaggcttcagttttactgatgatacccacggatatgcagtcaatgaggacgatgtagcacgggatttatacagtgcactaattcagtttttccagatatttcctgaatataaaaataatgacttttatgtcactggggagtcttatgcagggaaatatgtgccagc

SEQ ID NO: 114346 - DNA, 679 bp, Homo sapiens
  Payload ID: 2353
  Gene Symbol: CPVL
  Gene Name: carboxypeptidase, vitellogenic-like
  ENST ID: ENST00000432534
  CDS Start-End: 1-541
aaagtacttccagaagcagtgccatgaatgcatagaacacatcaggaagcagaactggtttgaggcctttgaagaacctgaggatcagctttactatgtgaaatttttgtcactcccagaggtgagacaagccatccacgtggggaatcagacttttaatgatggaactatagttgaaaagtacttgcgagaagatacagtacagtcagttaagccatggttaactgaaatcatgaataattataaggttctgatctacaatggccaactggacatcatcgtggcagctgccctgacagagcgctccttgatgggcatggactggaaaggatcccaggaatacaagaaggcagaaaaaaaagtttggaagatctttaaatctgacagtgaagtggctggttacatccggcaagcgggtgacttccatcaggtaattattcgaggtggaggacatattttaccctatgaccagcctctgagagcttttgacatgattaatcgattcatttatggaaaaggatgggatccttatgttggataaactaccttcccaaaagagaacatcagaggttttcattgctgaaaagaaaatcgtaaaaacagaaaatgtcataggaataaaaaaattatcttttcatatctgcaagatttttttcatcaataaaaattatccttgaaa

SEQ ID NO: 114347 - DNA, 561 bp, Homo sapiens
  Payload ID: 2353
  Gene Symbol: CPVL
  Gene Name: carboxypeptidase, vitellogenic-like
  ENST ID: ENST00000455893
  CDS Start-End: 1-426
attatagggggctatgcagaattcctgtaccaaattggcttgttggatgagaagcaaaaaaagtacttccagaagcagtgccatgaatgcatagaacacatcaggaagcagaactggtttgaggcctttgaagttctgatctacaatggccaactggacatcatcgtggcagctgccctgacagagcgctccttgatgggcatggactggaaaggatcccaggaatacaagaaggcagaaaaaaaagtttggaagatctttaaatctgacagtgaagtggctggttacatccggcaagcgggtgacttccatcaggtaattattcgaggtggaggacatattttaccctatgaccagcctctgagagcttttgacatgattaatcgattcatttatggaaaaggatgggatccttatgttggataaactaccttcccaaaagagaacatcagaggttttcattgctgaaaagaaaatcgtaaaaacagaaaatgtcataggaataaaaaaattatcttttcatatctgcaagatttttttcatcaataaaaattatccttg

SEQ ID NO: 114348 - DNA, 874 bp, Homo sapiens
  Payload ID: 2353
  Gene Symbol: CPVL
  Gene Name: carboxypeptidase, vitellogenic-like
  ENST ID: ENST00000448959
  CDS Start-End: 141-874
atctaatcactccatttcatccagactgagatagatggctcacatttttgttgttattgttttctgtaatccttgggtaaattttttttcccccactaggaagagaattgagtttggtcggccctttcccaggactgaacatgaagagttatgccggcttcctcaccgtgaataagacttacaacagcaacctcttcttctggttcttcccagctcagatacagccagaagatgccccagtagttctctggctacagggtgggccgggaggttcatccatgtttggactctttgtggaacatgggccttatgttgtcacaagtaacatgaccttgcgtgacagagacttcccctggaccacaacgctctccatgctttacattgacaatccagtgggcacaggcttcagttttactgatgatacccacggatatgcagtcaatgaggacgatgtagcacgggatttatacagtgcactaattcagtttttccagatatttcctgaatataaaaataatgacttttatgtcactggggagtcttatgcagggaaatatgtgccagccattgcacacctcatccattccctcaaccctgtgagagaggtgaagatcaacctgaacggaattgctattggagatggatattctgatcccgaatcaattatagggggctatgcagaattcctgtaccaaattggcttgttggatgagaagcaaaaaaagtacttccagaagcagtgccatgaatgcatagaacacatcaggaagcagaactggtttgaggcctttgaaatactggataaactactagatggcgacttaacaagtgatccttcttacttccagaatgttacaggatgtagtaattacta

SEQ ID NO: 114349 - DNA, 571 bp, Homo sapiens
  Payload ID: 2353
  Gene Symbol: CPVL
  Gene Name: carboxypeptidase, vitellogenic-like
  ENST ID: ENST00000455544
  CDS Start-End: 441-571
aaacaaagaaaatcaagtctgcgaggagcgagggtttgctcccctctgctccggatttgggtgtccagggtagcgggcgcggcacggcaaacaggtgattttgatatgctgctaaggtttgataagagaaatgagattcagagaacagattatattgttgaagagcttgactggaaatgatccaaacggaaacattggctcttcctggggttccagcctgctgtcttgacaggaactataccatcagctctcctgggtctcttacatgccaagtcatcctgcagatctgggactcactccgtaatcagcttgattgctgtaagttgaacacgtcagtggcatgggcaccagctgcacaaccctaggagccaccaaacacagtatattctatataaatgttgctgccaggagccccagttcaaactacaataccctgagagatggttggtgccatgtggaaggtgattgtttcgctggtcctgttgatgcctggcccctgtgatgggctgtttcgctccctatacagaagtgtttccatgccacctaagggagactcaggacagccattatt

SEQ ID NO: 114350 - DNA, 528 bp, Homo sapiens
  Payload ID: 2353
  Gene Symbol: CPVL
  Gene Name: carboxypeptidase, vitellogenic-like
  ENST ID: ENST00000449801
  CDS Start-End: 372-528
gtcagatgtcaggcgcggaggtgctctgggcaccgaggtgctggcgaaccaaacaagtatcaccccggacgcctgcccccattccgagagagcgggcgggatggccacagatccaaacggaaacattggctcttcctggggttccagcctgctgtcttgacaggaactataccatcagctctcctgggtctcttacatgccaagtcatcctgcagatctgggactcactccgtaatcagcttgattgctgtaagttgaacacgtcagtggcatgggcaccagctgcacaaccctaggagccaccaaacacagtatattctatataaatgttgctgccaggagccccagttcaaactacaataccctgagagatggttggtgccatgtggaaggtgattgtttcgctggtcctgttgatgcctggcccctgtgatgggctgtttcgctccctatacagaagtgtttccatgccacctaagggagactcaggacagccattatttctcaccccttacattgaagctggga

SEQ ID NO: 114351 - DNA, 524 bp, Homo sapiens
  Payload ID: 2353
  Gene Symbol: CPVL
  Gene Name: carboxypeptidase, vitellogenic-like
  ENST ID: ENST00000437527
  CDS Start-End: 505-524
aaagaaaatcaagtctgcgaggagcgagggtttgctcccctctgctccggatttgggtgtccagggtagcgggcgcggcacggcaaacaggtcggggcgctctgcttcaccccaaccttctccgccccgccagcccccgctccagctgcgccagaaagtgcgagcctgcccgctcctttcgcttttcgctcgctgcactccaagccccggaacacccgcgtccgcacactaagggcaccaccgctctcccacctctgcgctgtcagatgtcaggcgcggaggtgctctgggcaccgaggtgctggcgaaccaaacaagtatcaccccggacgcctgcccccattccgagagagcgggcgggatggccacaggcttgattgctgtaagttgaacacgtcagtggcatgggcaccagctgcacaaccctaggagccaccaaacacagtatattctatataaatgttgctgccaggagccccagttcaaactacaataccctgagagatggttggtgccatgtggaa

SEQ ID NO: 114352 - DNA, 525 bp, Homo sapiens
  Payload ID: 2353
  Gene Symbol: CPVL
  Gene Name: carboxypeptidase, vitellogenic-like
  ENST ID: ENST00000458405
  CDS Start-End: 224-525
aaaagacttgactgcatgataagaagacaccagcatatgaggcacagcctcattcaaagaaccaaagatgatcagtactttgctcatagtggagagtggttactgaggtctggggaggttttgtaggatttagtcacagccctgtaacacagagaggatttggatacagccagaagatgccccagtagttctctggctacagggtgggccgggaggttcatccatgtttggactctttgtggaacatgggccttatgttgtcacaagtaacatgaccttgcgtgacagagacttcccctggaccacaacgctctccatgctttacattgacaatccagtgggcacaggcttcagttttactgatgatacccacggatatgcagtcaatgaggacgatgtagcacgggatttatacagtgcactaattcagtttttccagatatttcctgaatataaaaataatgacttttatgtcactggggagtcttatgcagggaaatatgtgccagccattgcacacctcat

SEQ ID NO: 114353 - DNA, 1094 bp, Homo sapiens
  Payload ID: 2353
  Gene Symbol: CPVL
  Gene Name: carboxypeptidase, vitellogenic-like
  ENST ID: ENST00000612187
  CDS Start-End: 396-1094
cgcgccgcggctcagggaggagcaccgactgcgccgcaccctgagagatggttggtgccatgtggaaggtgattgtttcgctggtcctgttgatgcctggcccctgtgatgggctgtttcgctccctatacagaagtgtttccatgccacctaagggagactcaggacagccattatttctcaccccttacattgaagctgggaagatccaaaaaggaagagaattgagtttggtcggccctttcccaggactgaacatgaagagttatgccggcttcctcaccgtgaataagacttacaacagcaacctcttcttctggttcttcccagctcagatacagccagaagatgccccagtagttctctggctacagggtgggccgggaggttcatccatgtttggactctttgtggaacatgggccttatgttgtcacaagtaacatgaccttgcgtgacagagacttcccctggaccacaacgctctccatgctttacattgacaatccagtgggcacaggcttcagttttactgatgatacccacggatatgcagtcaatgaggacgatgtagcacgggatttatacagtgcactaattcagtttttccagatatttcctgaatataaaaataatgacttttatgtcactggggagtcttatgcagggaaatatgtgccagccattgcacacctcatccattccctcaaccctgtgagagaggtgaagatcaacctgaacggaattgctattggagatggatattctgatcccgaatcaattatagggggctatgcagaattcctgtaccaaattggcttgttggatgagaagcaaaaaaagtacttccagaagcagtgccatgaatgcatagaacacatcaggaagcagaactggtttgaggcctttgaaatactggataaactactagatggcgacttaacaagtgatccttcttacttccagaatgttacaggatgtagtaattactataactttttgcggtgcacggaacctgaggatcagctttactatgtgaaatttttgtcactcccagaggtgagacaagccccacgtggggaatcagacttttaa

SEQ ID NO: 114354 - DNA, 1563 bp, Homo sapiens
  Payload ID: 2353
  Gene Symbol: CPVL
  Gene Name: carboxypeptidase, vitellogenic-like
  ENST ID: ENST00000614864
  CDS Start-End: 354-1046
gagagatggttggtgccatgtggaaggtgattgtttcgctggtcctgttgatgcctggcccctgtgatgggctgtttcgctccctatacagaagtgtttccatgccacctaagggagactcaggacagccattatttctcaccccttacattgaagctgggaagatccaaaaaggaagagaattgagtttggtcggccctttcccaggactgaacatgaagagttatgccggcttcctcaccgtgaataagacttacaacagcaacctcttcttctggttcttcccagctcagatacagccagaagatgccccagtagttctctggctacagggtgggccgggaggttcatccatgtttggactctttgtggaacatgggccttatgttgtcacaagtaacatgaccttgcgtgacagagacttcccctggaccacaacgctctccatgctttacattgacaatccagtgggcacaggcttcagttttactgatgatacccacggatatgcagtcaatgaggacgatgtagcacgggatttatacagtgcactaattcagtttttccagatatttcctgaatataaaaataatgacttttatgtcactggggagtcttatgcagggaaatatgtgccagccattgcacacctcatccattccctcaaccctgtgagagaggtgaagatcaacctgaacggaattgctattggagatggatattctgatcccgaatcaattatagggggctatgcagaattcctgtaccaaattggcttgttggatgagaagcaaaaaaagtacttccagaagcagtgccatgaatgcatagaacacatcaggaagcagaactggtttgaggcctttgaaatactggataaactactagatggcgacttaacaagtgatccttcttacttccagaatgttacaggatgtagtaattactataactttttgcggtgcacggaacctgaggatcagctttactatgtgaaattttgtcactcccagagggacaagccacgtggggaatcagacttttaatgatggaactatagttgaaaagtacttgcgagaagatacagtacagtcagttaagccatggttaactgaaatcatgaataattataaggttctgatctacaatggccaactggacatcatcgtggcagctgccctgacagagcgctccttgatgggcatggactggaaaggatcccaggaatacaagaaggcagaaaaaaaagtttggaagatctttaaatctgacagtgaagtggctggttacatccggcaagcgggtgacttccatcaggtaattattcgaggtggaggacatattttaccctatgaccagcctctgagagcttttgacatgattaatcgattcatttatggaaaaggatgggatccttatgttggataaactaccttcccaaaagagaacatcagaggttttcattgctgaaaagaaaatcgtaaaaacagaaaatgtcataggaataaaaaaattatcttttcatatctgcaagatttttttcatcaataaaaattatccttg

SEQ ID NO: 114355 - DNA, 3519 bp, Homo sapiens
  Payload ID: 2354
  Gene Symbol: CEACAM1
  Gene Name: carcinoembryonic antigen-related cell adhesion molecule 1 (biliary glycoprotein)
  Uniprot ID: P13688
  ENST ID: ENST00000161559
  CDS Start-End: 136-1716
aaagctctgggccccagggaggaggctcagcacagagagtggaaaacagcagaggtgacagagcagccgtgctcgaagcgttcctggagcccaagctctcctccacaggtgaagacagggccagcaggagacaccatggggcacctctcagccccacttcacagagtgcgtgtaccctggcaggggcttctgctcacagcctcacttctaaccttctggaacccgcccaccactgcccagctcactactgaatccatgccattcaatgttgcagaggggaaggaggttcttctccttgtccacaatctgccccagcaactttttggctacagctggtacaaaggggaaagagtggatggcaaccgtcaaattgtaggatatgcaataggaactcaacaagctaccccagggcccgcaaacagcggtcgagagacaatataccccaatgcatccctgctgatccagaacgtcacccagaatgacacaggattctacaccctacaagtcataaagtcagatcttgtgaatgaagaagcaactggacagttccatgtatacccggagctgcccaagccctccatctccagcaacaactccaaccctgtggaggacaaggatgctgtggccttcacctgtgaacctgagactcaggacacaacctacctgtggtggataaacaatcagagcctcccggtcagtcccaggctgcagctgtccaatggcaacaggaccctcactctactcagtgtcacaaggaatgacacaggaccctatgagtgtgaaatacagaacccagtgagtgcgaaccgcagtgacccagtcaccttgaatgtcacctatggcccggacacccccaccatttccccttcagacacctattaccgtccaggggcaaacctcagcctctcctgctatgcagcctctaacccacctgcacagtactcctggcttatcaatggaacattccagcaaagcacacaagagctctttatccctaacatcactgtgaataatagtggatcctatacctgccacgccaataactcagtcactggctgcaacaggaccacagtcaagacgatcatagtcactgagctaagtccagtagtagcaaagccccaaatcaaagccagcaagaccacagtcacaggagataaggactctgtgaacctgacctgctccacaaatgacactggaatctccatccgttggttcttcaaaaaccagagtctcccgtcctcggagaggatgaagctgtcccagggcaacaccaccctcagcataaaccctgtcaagagggaggatgctgggacgtattggtgtgaggtcttcaacccaatcagtaagaaccaaagcgaccccatcatgctgaacgtaaactataatgctctaccacaagaaaatggcctctcacctggggccattgctggcattgtgattggagtagtggccctggttgctctgatagcagtagccctggcatgttttctgcatttcgggaagaccggcagggcaagcgaccagcgtgatctcacagagcacaaaccctcagtctccaaccacactcaggaccactccaatgacccacctaacaagatgaatgaagttacttattctaccctgaactttgaagcccagcaacccacacaaccaacttcagcctccccatccctaacagccacagaaataatttattcagaagtaaaaaagcagtaatgaaacctgtcctgctcactgcagtgctgatgtatttcaagtctctcaccctcatcactaggagattcctttcccctgtaggggtagaggggtggggacagaaacaactttctcctactcttccttcctaataggcatctccaggctgcctggtcactgcccctctctcagtgtcaatagatgaaagtacattgggagtctgtaggaaacccaaccttcttgtcattgaaatttggcaaagctgactttgggaaagagggaccagaacttcccctcccttccccttttcccaacctggacttgttttaaacttgcctgttcagagcactcattccttcccacccccagtcctgtcctatcactctaattcggatttgccatagccttgaggttatgtccttttccattaagtacatgtgccaggaaacaagagagagagaaagtaaaggcagtaatgccttctcctatttctccaaagccttgtgtgaactcaccaaacacaagaaaatcaaatatataaccaatagtgaaatgccacacctttgtccactgtcagggttgtctacctgtaggatcagggtctaagcaccttggtgcttagctagaataccacctaatccttctggcaagcctgtcttcagagaacccactagaagcaactaggaaaatcacttgccaaaatccaaggcaattcctgatggaaaatgcaaaagcacatatatgttttaatatctttatgggctctgttcaaggcagtgctgagagggaggggttatagcttcaggagggaaccagcttctgataaacacaatctgctaggaacttgggaaaggaatcagagagctgcccttcagcgattatttaaattattgttaaagaatacacaatttggggtattgggatttttctccttttctctgagacattccaccattttaatttttgtaactgcttatttatgtgaaaagggttatttttacttagcttagctatgtcagccaatccgattgccttaggtgaaagaaaccaccgaaatccctcaggtcccttggtcaggagcctctcaagattttttttgtcagaggctccaaatagaaaataagaaaaggttttcttcattcatggctagagctagatttaactcagtttctaggcacctcagaccaatcatcaactaccattctattccatgtttgcacctgtgcattttctgtttgcccccattcactttgtcaggaaaccttggcctctgctaaggtgtatttggtccttgagaagtgggagcaccctacagggacactatcactcatgctggtggcattgtttacagctagaaagctgcactggtgctaatgccccttggggaaatggggctgtgaggaggaggattataacttaggcctagcctcttttaacagcctctgaaatttatcttttcttctatggggtctataaatgtatcttataataaaaaggaaggacaggaggaagacaggcaaatgtacttctcacccagtcttctacacagatggaatctctttggggctaagagaaaggttttattctatattgcttacctgatctcatgttaggcctaagaggctttctccaggaggattagcttggagttctctatactcaggtacctctttcagggttttctaaccctgacacggactgtgcatactttccctcatccatgctgtgctgtgttatttaatttttcctggctaagatcatgtctgaattatgtatgaaaattattctatgtttttataataaaaataatatatcagacatcga

SEQ ID NO: 114356 - DNA, 3170 bp, Homo sapiens
  Payload ID: 2354
  Gene Symbol: CEACAM1
  Gene Name: carcinoembryonic antigen-related cell adhesion molecule 1 (biliary glycoprotein)
  Uniprot ID: P13688
  ENST ID: ENST00000352591
  CDS Start-End: 73-1365
cagccgtgctcgaagcgttcctggagcccaagctctcctccacaggtgaagacagggccagcaggagacaccatggggcacctctcagccccacttcacagagtgcgtgtaccctggcaggggcttctgctcacagcctcacttctaaccttctggaacccgcccaccactgcccagctcactactgaatccatgccattcaatgttgcagaggggaaggaggttcttctccttgtccacaatctgccccagcaactttttggctacagctggtacaaaggggaaagagtggatggcaaccgtcaaattgtaggatatgcaataggaactcaacaagctaccccagggcccgcaaacagcggtcgagagacaatataccccaatgcatccctgctgatccagaacgtcacccagaatgacacaggattctacaccctacaagtcataaagtcagatcttgtgaatgaagaagcaactggacagttccatgtatacccggagctgcccaagccctccatctccagcaacaactccaaccctgtggaggacaaggatgctgtggccttcacctgtgaacctgagactcaggacacaacctacctgtggtggataaacaatcagagcctcccggtcagtcccaggctgcagctgtccaatggcaacaggaccctcactctactcagtgtcacaaggaatgacacaggaccctatgagtgtgaaatacagaacccagtgagtgcgaaccgcagtgacccagtcaccttgaatgtcacctatggcccggacacccccaccatttccccttcagacacctattaccgtccaggggcaaacctcagcctctcctgctatgcagcctctaacccacctgcacagtactcctggcttatcaatggaacattccagcaaagcacacaagagctctttatccctaacatcactgtgaataatagtggatcctatacctgccacgccaataactcagtcactggctgcaacaggaccacagtcaagacgatcatagtcactgataatgctctaccacaagaaaatggcctctcacctggggccattgctggcattgtgattggagtagtggccctggttgctctgatagcagtagccctggcatgttttctgcatttcgggaagaccggcagggcaagcgaccagcgtgatctcacagagcacaaaccctcagtctccaaccacactcaggaccactccaatgacccacctaacaagatgaatgaagttacttattctaccctgaactttgaagcccagcaacccacacaaccaacttcagcctccccatccctaacagccacagaaataatttattcagaagtaaaaaagcagtaatgaaacctgtcctgctcactgcagtgctgatgtatttcaagtctctcaccctcatcactaggagattcctttcccctgtaggggtagaggggtggggacagaaacaactttctcctactcttccttcctaataggcatctccaggctgcctggtcactgcccctctctcagtgtcaatagatgaaagtacattgggagtctgtaggaaacccaaccttcttgtcattgaaatttggcaaagctgactttgggaaagagggaccagaacttcccctcccttccccttttcccaacctggacttgttttaaacttgcctgttcagagcactcattccttcccacccccagtcctgtcctatcactctaattcggatttgccatagccttgaggttatgtccttttccattaagtacatgtgccaggaaacaagagagagagaaagtaaaggcagtaatgccttctcctatttctccaaagccttgtgtgaactcaccaaacacaagaaaatcaaatatataaccaatagtgaaatgccacacctttgtccactgtcagggttgtctacctgtaggatcagggtctaagcaccttggtgcttagctagaataccacctaatccttctggcaagcctgtcttcagagaacccactagaagcaactaggaaaatcacttgccaaaatccaaggcaattcctgatggaaaatgcaaaagcacatatatgttttaatatctttatgggctctgttcaaggcagtgctgagagggaggggttatagcttcaggagggaaccagcttctgataaacacaatctgctaggaacttgggaaaggaatcagagagctgcccttcagcgattatttaaattattgttaaagaatacacaatttggggtattgggatttttctccttttctctgagacattccaccattttaatttttgtaactgcttatttatgtgaaaagggttatttttacttagcttagctatgtcagccaatccgattgccttaggtgaaagaaaccaccgaaatccctcaggtcccttggtcaggagcctctcaagattttttttgtcagaggctccaaatagaaaataagaaaaggttttcttcattcatggctagagctagatttaactcagtttctaggcacctcagaccaatcatcaactaccattctattccatgtttgcacctgtgcattttctgtttgcccccattcactttgtcaggaaaccttggcctctgctaaggtgtatttggtccttgagaagtgggagcaccctacagggacactatcactcatgctggtggcattgtttacagctagaaagctgcactggtgctaatgccccttggggaaatggggctgtgaggaggaggattataacttaggcctagcctcttttaacagcctctgaaatttatcttttcttctatggggtctataaatgtatcttataataaaaaggaaggacaggaggaagacaggcaaatgtacttctcacccagtcttctacacagatggaatctctttggggctaagagaaaggttttattctatattgcttacctgatctcatgttaggcctaagaggctttctccaggaggattagcttggagttctctatactcaggtacctctttcagggttttctaaccctgacacggactgtgcatactttccctcatccatgctgtgctgtgttatttaatttttcctggctaagatcatgtctgaattatgtatgaaaattattctatgtttttataataaaaataatatatcagacatcgaca

SEQ ID NO: 114357 - DNA, 1484 bp, Homo sapiens
  Payload ID: 2354
  Gene Symbol: CEACAM1
  Gene Name: carcinoembryonic antigen-related cell adhesion molecule 1 (biliary glycoprotein)
  Uniprot ID: P13688
  ENST ID: ENST00000358394
  CDS Start-End: 93-1478
aaacagcagaggtgacagagcagccgtgctcgaagcgttcctggagcccaagctctcctccacaggtgaagacagggccagcaggagacaccatggggcacctctcagccccacttcacagagtgcgtgtaccctggcaggggcttctgctcacagcctcacttctaaccttctggaacccgcccaccactgcccagctcactactgaatccatgccattcaatgttgcagaggggaaggaggttcttctccttgtccacaatctgccccagcaactttttggctacagctggtacaaaggggaaagagtggatggcaaccgtcaaattgtaggatatgcaataggaactcaacaagctaccccagggcccgcaaacagcggtcgagagacaatataccccaatgcatccctgctgatccagaacgtcacccagaatgacacaggattctacaccctacaagtcataaagtcagatcttgtgaatgaagaagcaactggacagttccatgtatacccggagctgcccaagccctccatctccagcaacaactccaaccctgtggaggacaaggatgctgtggccttcacctgtgaacctgagactcaggacacaacctacctgtggtggataaacaatcagagcctcccggtcagtcccaggctgcagctgtccaatggcaacaggaccctcactctactcagtgtcacaaggaatgacacaggaccctatgagtgtgaaatacagaacccagtgagtgcgaaccgcagtgacccagtcaccttgaatgtcacctatggcccggacacccccaccatttccccttcagacacctattaccgtccaggggcaaacctcagcctctcctgctatgcagcctctaacccacctgcacagtactcctggcttatcaatggaacattccagcaaagcacacaagagctctttatccctaacatcactgtgaataatagtggatcctatacctgccacgccaataactcagtcactggctgcaacaggaccacagtcaagacgatcatagtcactgagagacagaatctcaccatgttacccaggctggactcgaactcctgggctcaagcaatcctcccatctgtttcccaaagtgctgagattacagataatgctctaccacaagaaaatggcctctcacctggggccattgctggcattgtgattggagtagtggccctggttgctctgatagcagtagccctggcatgttttctgcatttcgggaagaccggcagggcaagcgaccagcgtgatctcacagagcacaaaccctcagtctccaaccacactcaggaccactccaatgacccacctaacaagatgaatgaagttacttattctaccctgaactttgaagcccagcaacccacacaaccaacttcagcctccccatccctaacagccacagaaataatttattcagaagtaaaaaagcagtaatgaaac

SEQ ID NO: 114358 - DNA, 1263 bp, Homo sapiens
  Payload ID: 2354
  Gene Symbol: CEACAM1
  Gene Name: carcinoembryonic antigen-related cell adhesion molecule 1 (biliary glycoprotein)
  Uniprot ID: P13688
  ENST ID: ENST00000403461
  CDS Start-End: 7-1113
gacaccatggggcacctctcagccccacttcacagagtgcgtgtaccctggcaggggcttctgctcacagcctcacttctaaccttctggaacccgcccaccactgcccagctcactactgaatccatgccattcaatgttgcagaggggaaggaggttcttctccttgtccacaatctgccccagcaactttttggctacagctggtacaaaggggaaagagtggatggcaaccgtcaaattgtaggatatgcaataggaactcaacaagctaccccagggcccgcaaacagcggtcgagagacaatataccccaatgcatccctgctgatccagaacgtcacccagaatgacacaggattctacaccctacaagtcataaagtcagatcttgtgaatgaagaagcaactggacagttccatgtatacccggagctgcccaagccctccatctccagcaacaactccaaccctgtggaggacaaggatgctgtggccttcacctgtgaacctgagactcaggacacaacctacctgtggtggataaacaatcagagcctcccggtcagtcccaggctgcagctgtccaatggcaacaggaccctcactctactcagtgtcacaaggaatgacacaggaccctatgagtgtgaaatacagaacccagtgagtgcgaaccgcagtgacccagtcaccttgaatgtcacctatggcccggacacccccaccatttccccttcagacacctattaccgtccaggggcaaacctcagcctctcctgctatgcagcctctaacccacctgcacagtactcctggcttatcaatggaacattccagcaaagcacacaagagctctttatccctaacatcactgtgaataatagtggatcctatacctgccacgccaataactcagtcactggctgcaacaggaccacagtcaagacgatcatagtcactgataatgctctaccacaagaaaatggcctctcacctggggccattgctggcattgtgattggagtagtggccctggttgctctgatagcagtagccctggcatgttttctgcatttcgggaagaccggcagctcaggaccactccaatgacccacctaacaagatgaatgaagttacttattctaccctgaactttgaagcccagcaacccacacaaccaacttcagcctccccatccctaacagccacagaaataatttattcagaagtaaaaaagcagtaatgaaacctgtcctgctc

SEQ ID NO: 114359 - DNA, 3427 bp, Homo sapiens
  Payload ID: 2354
  Gene Symbol: CEACAM1
  Gene Name: carcinoembryonic antigen-related cell adhesion molecule 1 (biliary glycoprotein)
  Uniprot ID: P13688
  ENST ID: ENST00000403444
  CDS Start-End: 105-1499
acagagagtggaaaacagcagaggtgacagagcagccgtgctcgaagcgttcctggagcccaagctctcctccacaggtgaagacagggccagcaggagacaccatggggcacctctcagccccacttcacagagtgcgtgtaccctggcaggggcttctgctcacagcctcacttctaaccttctggaacccgcccaccactgcccagctcactactgaatccatgccattcaatgttgcagaggggaaggaggttcttctccttgtccacaatctgccccagcaactttttggctacagctggtacaaaggggaaagagtggatggcaaccgtcaaattgtaggatatgcaataggaactcaacaagctaccccagggcccgcaaacagcggtcgagagacaatataccccaatgcatccctgctgatccagaacgtcacccagaatgacacaggattctacaccctacaagtcataaagtcagatcttgtgaatgaagaagcaactggacagttccatgtatacccggagctgcccaagccctccatctccagcaacaactccaaccctgtggaggacaaggatgctgtggccttcacctgtgaacctgagactcaggacacaacctacctgtggtggataaacaatcagagcctcccggtcagtcccaggctgcagctgtccaatggcaacaggaccctcactctactcagtgtcacaaggaatgacacaggaccctatgagtgtgaaatacagaacccagtgagtgcgaaccgcagtgacccagtcaccttgaatgtcacctatggcccggacacccccaccatttccccttcagacacctattaccgtccaggggcaaacctcagcctctcctgctatgcagcctctaacccacctgcacagtactcctggcttatcaatggaacattccagcaaagcacacaagagctctttatccctaacatcactgtgaataatagtggatcctatacctgccacgccaataactcagtcactggctgcaacaggaccacagtcaagacgatcatagtcactgagctaagtccagtagtagcaaagccccaaatcaaagccagcaagaccacagtcacaggagataaggactctgtgaacctgacctgctccacaaatgacactggaatctccatccgttggttcttcaaaaaccagagtctcccgtcctcggagaggatgaagctgtcccagggcaacaccaccctcagcataaaccctgtcaagagggaggatgctgggacgtattggtgtgaggtcttcaacccaatcagtaagaaccaaagcgaccccatcatgctgaacgtaaactataatgctctaccacaagaaaatggcctctcacctggggccattgctggcattgtgattggagtagtggccctggttgctctgatagcagtagccctggcatgttttctgcatttcgggaagaccggcagctcaggaccactccaatgacccacctaacaagatgaatgaagttacttattctaccctgaactttgaagcccagcaacccacacaaccaacttcagcctccccatccctaacagccacagaaataatttattcagaagtaaaaaagcagtaatgaaacctgtcctgctcactgcagtgctgatgtatttcaagtctctcaccctcatcactaggagattcctttcccctgtaggggtagaggggtggggacagaaacaactttctcctactcttccttcctaataggcatctccaggctgcctggtcactgcccctctctcagtgtcaatagatgaaagtacattgggagtctgtaggaaacccaaccttcttgtcattgaaatttggcaaagctgactttgggaaagagggaccagaacttcccctcccttccccttttcccaacctggacttgttttaaacttgcctgttcagagcactcattccttcccacccccagtcctgtcctatcactctaattcggatttgccatagccttgaggttatgtccttttccattaagtacatgtgccaggaaacaagagagagagaaagtaaaggcagtaatgccttctcctatttctccaaagccttgtgtgaactcaccaaacacaagaaaatcaaatatataaccaatagtgaaatgccacacctttgtccactgtcagggttgtctacctgtaggatcagggtctaagcaccttggtgcttagctagaataccacctaatccttctggcaagcctgtcttcagagaacccactagaagcaactaggaaaatcacttgccaaaatccaaggcaattcctgatggaaaatgcaaaagcacatatatgttttaatatctttatgggctctgttcaaggcagtgctgagagggaggggttatagcttcaggagggaaccagcttctgataaacacaatctgctaggaacttgggaaaggaatcagagagctgcccttcagcgattatttaaattattgttaaagaatacacaatttggggtattgggatttttctccttttctctgagacattccaccattttaatttttgtaactgcttatttatgtgaaaagggttatttttacttagcttagctatgtcagccaatccgattgccttaggtgaaagaaaccaccgaaatccctcaggtcccttggtcaggagcctctcaagattttttttgtcagaggctccaaatagaaaataagaaaaggttttcttcattcatggctagagctagatttaactcagtttctaggcacctcagaccaatcatcaactaccattctattccatgtttgcacctgtgcattttctgtttgcccccattcactttgtcaggaaaccttggcctctgctaaggtgtatttggtccttgagaagtgggagcaccctacagggacactatcactcatgctggtggcattgtttacagctagaaagctgcactggtgctaatgccccttggggaaatggggctgtgaggaggaggattataacttaggcctagcctcttttaacagcctctgaaatttatcttttcttctatggggtctataaatgtatcttataataaaaaggaaggacaggaggaagacaggcaaatgtacttctcacccagtcttctacacagatggaatctctttggggctaagagaaaggttttattctatattgcttacctgatctcatgttaggcctaagaggctttctccaggaggattagcttggagttctctatactcaggtacctctttcagggttttctaaccctgacacggactgtgcatactttccctcatccatgctgtgctgtgttatttaatttttcctggctaagatcatgtctgaattatgtatgaaaattattctatgtttttataataaaaataatatatca

SEQ ID NO: 114360 - DNA, 434 bp, Homo sapiens
  Payload ID: 2354
  Gene Symbol: CEACAM1
  Gene Name: carcinoembryonic antigen-related cell adhesion molecule 1 (biliary glycoprotein)
  ENST ID: ENST00000600172
  CDS Start-End: 138-434
gaggaagacagacacccaaagagatctagaatgtgaggtcaggtgttgacaagagccctggagggaacagagcagaaaaagcctcacttctaaccttctggaacccgcccaccactgcccagctcactactgaatccatgccattcaatgttgcagaggggaaggaggttcttctccttgtccacaatctgccccagcaactttttggctacagctggtacaaaggggaaagagtggatggcaaccgtcaaattgtaggatatgcaataggaactcaacaagctaccccagggcccgcaaacagcggtcgagagacaatataccccaatgcatccctgctgatccagaacgtcacccagaatgacacaggattctacaccctacaagtcataaagtcagatcttgtgaatgaagaagcaactggacagttccat

SEQ ID NO: 114361 - DNA, 1342 bp, Homo sapiens
  Payload ID: 2354
  Gene Symbol: CEACAM1
  Gene Name: carcinoembryonic antigen-related cell adhesion molecule 1 (biliary glycoprotein)
  Uniprot ID: P13688
  ENST ID: ENST00000599389
  CDS Start-End: 108-1307
agcacagagagtggaaaacagcagaggtgacagagcagccgtgctcgaagcgttcctggagcccaagctctcctccacaggtgaagacagggccagcaggagacaccatggggcacctctcagccccacttcacagagtgcgtgtaccctggcaggggcttctgctcacagcctcacttctaaccttctggaacccgcccaccactgcccagctcactactgaatccatgccattcaatgttgcagaggggaaggaggttcttctccttgtccacaatctgccccagcaactttttggctacagctggtacaaaggggaaagagtggatggcaaccgtcaaattgtaggatatgcaataggaactcaacaagctaccccagggcccgcaaacagcggtcgagagacaatataccccaatgcatccctgctgatccagaacgtcacccagaatgacacaggattctacaccctacaagtcataaagtcagatcttgtgaatgaagaagcaactggacagttccatgtatacccggagctgcccaagccctccatctccagcaacaactccaaccctgtggaggacaaggatgctgtggccttcacctgtgaacctgagactcaggacacaacctacctgtggtggataaacaatcagagcctcccggtcagtcccaggctgcagctgtccaatggcaacaggaccctcactctactcagtgtcacaaggaatgacacaggaccctatgagtgtgaaatacagaacccagtgagtgcgaaccgcagtgacccagtcaccttgaatgtcacctatggcccggacacccccaccatttccccttcagacacctattaccgtccaggggcaaacctcagcctctcctgctatgcagcctctaacccacctgcacagtactcctggcttatcaatggaacattccagcaaagcacacaagagctctttatccctaacatcactgtgaataatagtggatcctatacctgccacgccaataactcagtcactggctgcaacaggaccacagtcaagacgatcatagtcactgagatggcgtttcaccatgttgccaaggctggtctcaaactcctgagctcaagcaatccacccgcctccacctcccaaagtgctaagattacagataatgctctaccacaagaaaatggcctctcacctggggccattgctggcattgtgattggagtagtggccctggttgctctgatagcagtagccctggcatgttttctgcatttcgggaagaccggcagctcaggaccactccaatgacccacctaacaagatgaatgaagttacttattcta

SEQ ID NO: 114362 - DNA, 417 bp, Homo sapiens
  Payload ID: 2354
  Gene Symbol: CEACAM1
  Gene Name: carcinoembryonic antigen-related cell adhesion molecule 1 (biliary glycoprotein)
  ENST ID: ENST00000471298
  CDS Start-End: 135-417
gaagacagacaagcaaagagatctagaatgtgaggtcaggtgttgacaagagccctggagggaacagagcagaaaaagcctcacttctaaccttctggaacccgcccaccactgcccagctcactactgaatccatgccattcaatgttgcagaggggaaggaggttcttctccttgtccacaatctgccccagcaactttttggctacagctggtacaaaggggaaagagtggatggcaaccgtcaaattgtaggatatgcaataggaactcaacaagctaccccagggcccgcaaacagcggtcgagagacaatataccccaatgcatccctgctgatccagaacgtcacccagaatgacacaggattctacaccctacaagtcataaagtcagatcttgtgaatgaagaagcaa

SEQ ID NO: 114363 - DNA, 1583 bp, Homo sapiens
  Payload ID: 2355
  Gene Symbol: CEACAM16
  Gene Name: carcinoembryonic antigen-related cell adhesion molecule 16
  Uniprot ID: Q2WEN9
  ENST ID: ENST00000405314
  CDS Start-End: 98-1375
ggtcctgcggcagacggagccgagccccaaccaggaagggagtccgagcactgggacttcaacgccaccatctccaagactcggtttggggtgaaagatggcgctgactgggtacagctggctgctcctcagtgccacattcctgaatgtgggggccgagatctctatcaccctggagcctgcccagccgagcgaaggggacaacgtcacgctggtcgtccatgggctttcgggggaactgctcgcctacagctggtatgcggggcccacactcagcgtgtcatacctggtggccagctacatcgtgagcacaggcgatgagactcctggcccggcccacacggggcgggaggctgtgcgccccgatggcagcctggacatccagggcatcctgccccggcactcaggcacctacatcctgcagaccttcaacaggcagttgcagaccgaggtgggctacggacacgtgcaggtccatgagatcctggcccagcccacagtcttggccaacagcacagcgctggtggaacgtcgagacaccctgcgccttatgtgcagcagccccagccccaccgccgaggtccgctggttcttcaacggtggggccctgcccgtcgctctccgcctgggcctgtcccctgacggccgggtgctggccaggcatggcatccgccgggaggaggccggcgcctatcagtgtgaggtgtggaacccggtcagtgtcagccgcagcgagcccatcaacctgaccgtgtactttggcccagagcgtgtggccatcctccaggattccaccacccgcacaggctgcaccatcaaagttgacttcaacacgtccctcaccctgtggtgcgtgtccaggtcctgcccagagcccgagtatgtgtggaccttcaacgggcaggccctaaagaacggccaagaccacctcaacatcagcagcatgacagccgcccaggaggggacgtacacatgtattgcgaagaacaccaagaccctgctatctggatctgcctcagtcgtggtcaagctctctgctgcagcagttgccacgatgatcgtgcccgtgcccaccaagccaacggagggccaggacgtaacactgaccgtgcagggctaccccaaggacctgctggtctacgcctggtaccgcgggcctgcctccgagcccaaccggctgctcagccagctgccgtcaggaacctggattgcaggccccgcgcacacaggccgggaggtgggcttccccaactgctcgctgttggtgcagaagctgaacctcacagacactggccgctacacactcaagactgtcacagtgcagggcaagactgagacactggaagtggagctgcaggtggcccccctggggtaacagcgtgaccctggagacgtccagagagaagagctcttcgcaccatcctctggtcctcgccctctgagtgggaaccactcccccacagcgaggatgccaggctgtggtcctgctgttctcctgcctccaccctagagctagagccacagggccccactccctcgctgagctgttggggagccaccgaggccataaacgtcctggttaa

SEQ ID NO: 114364 - DNA, 1701 bp, Homo sapiens
  Payload ID: 2355
  Gene Symbol: CEACAM16
  Gene Name: carcinoembryonic antigen-related cell adhesion molecule 16
  Uniprot ID: Q2WEN9
  ENST ID: ENST00000587331
  CDS Start-End: 216-1493
ctgcatcctcagcgcctagaacagcacctggcaaacaataggtgctcattcagtatttgtccaataagtgaatgagtgatttactgagcatttactctgcgccagtcgtggtaagtactgtcctgcggcagacggagccgagccccaaccaggaagggagtccgagcactgggacttcaacgccaccatctccaagactcggtttggggtgaaagatggcgctgactgggtacagctggctgctcctcagtgccacattcctgaatgtgggggccgagatctctatcaccctggagcctgcccagccgagcgaaggggacaacgtcacgctggtcgtccatgggctttcgggggaactgctcgcctacagctggtatgcggggcccacactcagcgtgtcatacctggtggccagctacatcgtgagcacaggcgatgagactcctggcccggcccacacggggcgggaggctgtgcgccccgatggcagcctggacatccagggcatcctgccccggcactcaggcacctacatcctgcagaccttcaacaggcagttgcagaccgaggtgggctacggacacgtgcaggtccatgagatcctggcccagcccacagtcttggccaacagcacagcgctggtggaacgtcgagacaccctgcgccttatgtgcagcagccccagccccaccgccgaggtccgctggttcttcaacggtggggccctgcccgtcgctctccgcctgggcctgtcccctgacggccgggtgctggccaggcatggcatccgccgggaggaggccggcgcctatcagtgtgaggtgtggaacccggtcagtgtcagccgcagcgagcccatcaacctgaccgtgtactttggcccagagcgtgtggccatcctccaggattccaccacccgcacaggctgcaccatcaaagttgacttcaacacgtccctcaccctgtggtgcgtgtccaggtcctgcccagagcccgagtatgtgtggaccttcaacgggcaggccctaaagaacggccaagaccacctcaacatcagcagcatgacagccgcccaggaggggacgtacacatgtattgcgaagaacaccaagaccctgctatctggatctgcctcagtcgtggtcaagctctctgctgcagcagttgccacgatgatcgtgcccgtgcccaccaagccaacggagggccaggacgtaacactgaccgtgcagggctaccccaaggacctgctggtctacgcctggtaccgcgggcctgcctccgagcccaaccggctgctcagccagctgccgtcaggaacctggattgcaggccccgcgcacacaggccgggaggtgggcttccccaactgctcgctgttggtgcagaagctgaacctcacagacactggccgctacacactcaagactgtcacagtgcagggcaagactgagacactggaagtggagctgcaggtggcccccctggggtaacagcgtgaccctggagacgtccagagagaagagctcttcgcaccatcctctggtcctcgccctctgagtgggaaccactcccccacagcgaggatgccaggctgtggtcctgctgttctcctgcctccaccctagagctagagccacagggccccactccctcgctgagctgttggggagccaccgaggccataaacgtcctggttaa

SEQ ID NO: 114365 - DNA, 1476 bp, Homo sapiens
  Payload ID: 2356
  Gene Symbol: CEACAM18
  Gene Name: carcinoembryonic antigen-related cell adhesion molecule 18
  Uniprot ID: A8MTB9
  ENST ID: ENST00000396477
  CDS Start-End: 22-1176
ctggaggaccccaggcagctcatggacctttccagacccagatggagcctgtggaggagggtcttcctcatggccagtctgctggcctgtgggatctgccaggcctctggccaaatcttcatcacccaaaccctggggatcaagggatatcggactgtcgtggccctggataaggtccctgaggatgttcaggaatacagctggtactggggtgcaaacgacagcgcaggaaacatgattatcagccacaaaccgcccagtgcccagcagcctgggcccatgtacactggcagggagagagtgaacagagaaggcagcctgttgatcaggccgactgcattaaatgacacgggaaactacactgttcgggtggttgcaggcaatgagacccaaagagcaaccggctggctggaggttctagagttgggaagcaatctgggcatctccgtcaatgccagctccctggtggagaacatggattctgtggctgctgactgcctcacaaatgtcaccaacatcacgtggtatgtgaatgatgtgcctacctctagtagtgaccggatgacaatttccccagacggcaagaccctcgtcatcctcagggtcagccgctatgacagaacaattcagtgcatgatagagagtttcccagagatctttcagagaagtgaacgcatctctctgactgtggcctatgggcccgactatgtgctgctgaggagcaatcctgatgatttcaacggcattgtgacagctgagatcggctcccaagtggaaatggagtgtatctgctattccttcctggatctcaagtaccactggatccacaatggctccctcctgaacttctcagatgcaaagatgaacctctcgagtcttgcctgggagcagatgggccgttaccgatgcactgtggagaaccccgtgacacagctgatcatgtacatggacgtcaggatccaggccccccatgaggatcttacctgttgtccacagagatttctccatctcaggatccatggtgatgttcctcatcatgctgacagtgctgggtggcgtttacatctgtggagtcctgatccatgctctgatcaaccactactcaatcaggacaaatcgggctccatgagtgtccaccccagacctgaggacaagaccagaagggcaagcaggtgaggagagggtgatggagaagggctgggggtccccatagggccagcgaggctgaaaagggtccagggtctctttggagggtactggcaagagagggacccagcccagtcacacggaagcctggagatggaggctccagtaggaggtctgcagaccccacccgggacctgaagatgatgtcgtgggtagcgtggccattgggcgcttcatctgccaatcagagctggtcaatgggttgcaggtcggggcgggccatgcgcaaagctgggctctaattccaagcgcctcctccctcagctccgg

SEQ ID NO: 114366 - DNA, 2249 bp, Homo sapiens
  Payload ID: 2357
  Gene Symbol: CEACAM19
  Gene Name: carcinoembryonic antigen-related cell adhesion molecule 19
  Uniprot ID: Q7Z692
  ENST ID: ENST00000358777
  CDS Start-End: 481-1380
gtgaaatcccacctctgtctattggcagacttgcctcttttcctgggcctctgtttccacatctgtgcaatgggaacagttatttatggtggctgctgaatgaggcagtgtgtgtttgaacaaacccaggggaattgttcaaacagaggctgttatgactattgctacagtgactgctgttgtagtcacgctgagtgagaaaaagaggttgaagagggtcaggggaggagtcctgggaagttccccagtcaccctgaaaaactggttcaacctctgtctgtgctcccatcccagggagtataggtggagcctccagagcccatggacagggcatgctggggctgggccagccccagcggtgtctctaaggcacccctgggatccccactgagctggcctacttcagacagccagggcccacccctctggcccccttagtgtccagctcgtggccccttggcatttccacaagacgccaagatggagattcccatggggacccagggctgcttctcaaagagcctcctgctctcagcctcaatcctggtcctctggatgctccaaggctcccaggcagctctctacatccagaagattccagagcagcctcaaaagaaccaggaccttctcctgtcagtccagggtgtcccagacaccttccaggacttcaactggtacctgggggaggagacgtacggaggcacgaggctatttacctacatccctgggatacaacggcctcagagggatggcagtgccatgggacagcgagacatcgtgggcttccccaatggttccatgctgctgcgccgcgcccagcctacagacagtggcacctaccaagtagccattaccatcaactctgaatggactatgaaggccaagactgaggtccaggtagctgaaaagaataaggagctgcccagtacacacctgcccaccaacgctgggatcctggcggccaccatcattggatctcttgctgccggggcccttctcatcagctgcattgcctatctcctggtgacaaggaactggaggggccagagccacagactgcctgctccgaggggccagggatctctgtccatcttgtgctcggctgtatccccagtgccttcagtgacgcccagcacatggatggcgaccacagagaagccagaattgggccctgctcatgatgctggtgacaacaacatctatgaagtgatgccctctccagtcctcctggtgtcccccatcagtgacacaaggtccataaacccagcccggcccctgcccacacccccacacctgcaggcggagccagagaaccaccagtaccaggacctgctaaaccccgaccctgccccctactgccagctggtgccaacttcctgatgggtcctgggccaggccagccagggagaagacaaggccccagccctcctctgggagcctcacacctgagaccagcaggacaaggccattgggggctgtggggccgatgaggtggactcagccaaagactcagcagcacatggggcaggtgtcctggcagggggacaggagactgtaacaggcccaggtccttgtgcagcccgtgaatgcacgcccgccttcggtctgttccttcaagcaagctggcctgggccatgtgcctgtgaaaggcaggctctggcccctttccatgccaaagtcccccaagatctggatatctggggacaagatggtggcctcaggcctgcctcccaggcagttggctgggctcccaactgtctgtcctcaatgccctaccccaactccactagtgaccctcagagtcttctccccttaggacaaggcagacaccccaccatgcgggcctcaggtggcagagaggcccagcctcacaggcctgtggccccacacaccagtcccagcaaggtgaccacggctgctggaccccttccctgttcaggcaggcccagcccctctcagaacctgctgccagctgctggtcttggcccccaccctgaatcttactgagtccctctgggcagcagctcccttctccaccccaccccagcacccgtcccaaatgtggcctcagcttgtcctccccttccccaaactatgcattcattcagcaataaatgagcctttgctgtatgccagacccagttctaggctcttgcagccctggtagaaagcaaaacaaaaactcccgctttcccagagggtcacttggcaggggaaagaatcaggaaataaaataaataatgaacatg

SEQ ID NO: 114367 - DNA, 1982 bp, Homo sapiens
  Payload ID: 2357
  Gene Symbol: CEACAM19
  Gene Name: carcinoembryonic antigen-related cell adhesion molecule 19
  Uniprot ID: Q7Z692
  ENST ID: ENST00000403660
  CDS Start-End: 211-1113
cctctgtctgtgctcccatcccagggagtataggtggagcctccagagcccatggacagggcatgctggggctgggccagccccagcggtgtctctaaggcacccctgggatccccactgagctggcctacttcagacagccagggcccacccctctggcccccttagtgtccagctcgtggccccttggcatttccacaagacgccaagatggagattcccatggggacccagggctgcttctcaaagagcctcctgctctcagcctcaatcctggtcctctggatgctccaaggctcccaggcagctctctacatccagaagattccagagcagcctcaaaagaaccaggaccttctcctgtcagtccagggtgtcccagacaccttccaggacttcaactggtacctgggggaggagacgtacggaggcacgaggctatttacctacatccctgggatacaacggcctcagagggatggcagtgccatgggacagcgagacatcgtgggcttccccaatggttccatgctgctgcgccgcgcccagcctacagacagtggcacctaccaagtagccattaccatcaactctgaatggactatgaaggccaagactgaggtccaggtagctgaaaagaataaggagctgcccagtacacacctgcccaccaacgctgggatcctggcggccaccatcattggatctcttgctgccggggcccttctcatcagctgcattgcctatctcctggtgacaaggaactggaggggccagagccacagactgcctgctccgaggggccagggatctctgtccatcttgtgctcggctgtatccccagtgccttcagtgacgcccagcacatggatggcgaccacagagaagccagaattgggccctgctcatgatgctggtgacaacaacatctatgaagtgatgccctctccagtcctcctggtgtcccccatcagtgacacaaggtccataaacccagcccggcccctgcccacacccccacacctgcaggcggagccagagaaccaccagtaccagcaggacctgctaaaccccgaccctgccccctactgccagctggtgccaacttcctgatgggtcctgggccaggccagccagggagaagacaaggccccagccctcctctgggagcctcacacctgagaccagcaggacaaggccattgggggctgtggggccgatgaggtggactcagccaaagactcagcagcacatggggcaggtgtcctggcagggggacaggagactgtaacaggcccaggtccttgtgcagcccgtgaatgcacgcccgccttcggtctgttccttcaagcaagctggcctgggccatgtgcctgtgaaaggcaggctctggcccctttccatgccaaagtcccccaagatctggatatctggggacaagatggtggcctcaggcctgcctcccaggcagttggctgggctcccaactgtctgtcctcaatgccctaccccaactccactagtgaccctcagagtcttctccccttaggacaaggcagacaccccaccatgcgggcctcaggtggcagagaggcccagcctcacaggcctgtggccccacacaccagtcccagcaaggtgaccacggctgctggaccccttccctgttcaggcaggcccagcccctctcagaacctgctgccagctgctggtcttggcccccaccctgaatcttactgagtccctctgggcagcagctcccttctccaccccaccccagcacccgtcccaaatgtggcctcagcttgtcctccccttccccaaactatgcattcattcagcaataaatgagcctttgctgtatgccagacccagttctaggctcttgcagccctggtagaaagcaaaacaaaaactcccgctttcccagagggtcacttggcaggggaaagaatcaggaaataaaataaataatgaacatg

SEQ ID NO: 114368 - DNA, 475 bp, Homo sapiens
  Payload ID: 2357
  Gene Symbol: CEACAM19
  Gene Name: carcinoembryonic antigen-related cell adhesion molecule 19
  ENST ID: ENST00000592789
  CDS Start-End: 308-475
acagggtctggctctgttggcagactagagtacagtggtgagatcacagttcattgcagccttgacttctcaacgccaagtcatcctcccacctcagcctcctgagtagctatgactacagggagtataggtggagcctccagagcccatggacagggcatgctggggctgggccagccccagcggtgtctctaaggcacccctgggatccccactgagctggcctacttcagacagccagggcccacccctctggcccccttagtgtccagctcgtggccccttggcatttccacaagacgccaagatggagattcccatggggacccagggctgcttctcaaagagcctcctgctctcagcctcaatcctggtcctctggatgctccaaggctcccaggcagctctctacatccagaagattccagagcagcctcaaaagaaccaggaccttctcctgtcagtccagggtgtc

SEQ ID NO: 114369 - DNA, 608 bp, Homo sapiens
  Payload ID: 2357
  Gene Symbol: CEACAM19
  Gene Name: carcinoembryonic antigen-related cell adhesion molecule 19
  ENST ID: ENST00000591979
  CDS Start-End: 441-608
acagggtctggctctgttggcagactagagtacagtggtgagatcacagttcattgcagccttgacttctcaacgccaagtcatcctcccacctcagcctcctgagtagctatgactacagtagagacagggtttcaccatgttggccaggctggtctcaaattcctcacctcgtgatctacccaccttggcctcccaaaatgctgggattacaggcgtgagccaccgcacccagcctgcctcagagccttcaaggagtataggtggagcctccagagcccatggacagggcatgctggggctgggccagccccagcggtgtctctaaggcacccctgggatccccactgagctggcctacttcagacagccagggcccacccctctggcccccttagtgtccagctcgtggccccttggcatttccacaagacgccaagatggagattcccatggggacccagggctgcttctcaaagagcctcctgctctcagcctcaatcctggtcctctggatgctccaaggctcccaggcagctctctacatccagaagattccagagcagcctcaaaagaaccaggaccttctcctgtcagtccagggtgtc

SEQ ID NO: 114370 - DNA, 835 bp, Homo sapiens
  Payload ID: 2357
  Gene Symbol: CEACAM19
  Gene Name: carcinoembryonic antigen-related cell adhesion molecule 19
  ENST ID: ENST00000622237
  CDS Start-End: 672-835
acagggtctggctctgttggcagactagagtacagtggtgagatcacagttcattgcagccttgacttctcaacgccaagtcatcctcccacctcagcctcctgagtagctatgactacaggggaggaggctgaggcccagagaggtgaagtcgtgtgccacaaaataccccagccatatggtggtagaaccaagttttcagccagactcaccagctcacagcagagctgccctggactctacagccattcagtgtatagctgggccactccatcattcaaggcagttcaacgtcaagattcctgatttgcctcaacctggggcctctagaagataccatcacccccaacaagctgaagacgtgtgtccggaacactcagacacacacaaagtgctatggatacaccacaccccgacctagctgtctcttcctgatggacctcactgggtagaaatgcctggcaccgcctgcctcagatccctagggagtataggtggagcctccagagcccatggacagggcatgctggggctgggccagccccagcggtgtctctaaggcacccctgggatccccactgagctggcctacttcagacagccagggcccacccctctggcccccttagtgtccagctcgtggccccttggcatttccacaagacgccaagatggagattcccatggggacccagggctgcttctcaaagagcctcctgctctcagcctcaatcctggtcctctggatgctccaaggctcccaggcagctctctacatccagaagattccagagcagcctcaaaagaaccaggaccttctcctgtcagtccaggg

SEQ ID NO: 114371 - DNA, 828 bp, Homo sapiens
  Payload ID: 2357
  Gene Symbol: CEACAM19
  Gene Name: carcinoembryonic antigen-related cell adhesion molecule 19
  ENST ID: ENST00000619799
  CDS Start-End: 661-828
acagggtctggctctgttggcagactagagtacagtggtgagatcacagttcattgcagccttgacttctcaacgccaagtcatcctcccacctcagcctcctgagtagctatgactacaggggaggaggctgaggcccagagaggtgaagtcgtgtgccacaaaataccccagccatatggtggtagaaccaagttttcagccagactcaccagctcacagcagagctgccctggactctacagccattcagtgtatagctgggccactccatcattcaaggcagttcaacgtcaagattcctgatttgcctcaacctggggcctctagaagataccatcacccccaacaagctgaagacgtgtgtccggaacactcagacacacacaaagtgctatggatacaccacaccccgacctagctgtctcttcctgatggacctcactgggtagaaatgcctggcaccgcctgcctcagatccctagtagagacagggtttcaccatgttggccaggctggtctcaaattcctcacctcgtgatctacccaccttggcctcccaaaatgctgggattacaggcgtgagccaccgcacccagcctgcctcagagccttcaatgtccagctcgtggccccttggcatttccacaagacgccaagatggagattcccatggggacccagggctgcttctcaaagagcctcctgctctcagcctcaatcctggtcctctggatgctccaaggctcccaggcagctctctacatccagaagattccagagcagcctcaaaagaaccaggaccttctcctgtcagtccagggtgtc

SEQ ID NO: 114372 - DNA, 972 bp, Homo sapiens
  Payload ID: 2357
  Gene Symbol: CEACAM19
  Gene Name: carcinoembryonic antigen-related cell adhesion molecule 19
  ENST ID: ENST00000618372
  CDS Start-End: 805-972
acagggtctggctctgttggcagactagagtacagtggtgagatcacagttcattgcagccttgacttctcaacgccaagtcatcctcccacctcagcctcctgagtagctatgactacaggggaggaggctgaggcccagagaggtgaagtcgtgtgccacaaaataccccagccatatggtggtagaaccaagttttcagccagactcaccagctcacagcagagctgccctggactctacagccattcagtgtatagctgggccactccatcattcaaggcagttcaacgtcaagattcctgatttgcctcaacctggggcctctagaagataccatcacccccaacaagctgaagacgtgtgtccggaacactcagacacacacaaagtgctatggatacaccacaccccgacctagctgtctcttcctgatggacctcactgggtagaaatgcctggcaccgcctgcctcagatccctagtagagacagggtttcaccatgttggccaggctggtctcaaattcctcacctcgtgatctacccaccttggcctcccaaaatgctgggattacaggcgtgagccaccgcacccagcctgcctcagagccttcaaggagtataggtggagcctccagagcccatggacagggcatgctggggctgggccagccccagcggtgtctctaaggcacccctgggatccccactgagctggcctacttcagacagccagggcccacccctctggcccccttagtgtccagctcgtggccccttggcatttccacaagacgccaagatggagattcccatggggacccagggctgcttctcaaagagcctcctgctctcagcctcaatcctggtcctctggatgctccaaggctcccaggcagctctctacatccagaagattccagagcagcctcaaaagaaccaggaccttctcctgtcagtccagggtgtc

SEQ ID NO: 114373 - DNA, 2119 bp, Homo sapiens
  Payload ID: 2358
  Gene Symbol: CEACAM20
  Gene Name: carcinoembryonic antigen-related cell adhesion molecule 20
  ENST ID: ENST00000621342
  CDS Start-End: 280-2037
cggtctccagggttcctggacttcccgctctttgtgctgggcagggaaggaaagtgagccctgggggtagagggcagaggtggggtcaaagttactttcctgccaccacccctgtctgtcctgggagctgcagttactgcagtgtgtgtgtgagtttgtagcagggtgggagaggagagaagggaggtggaggggctgcacctggagtgaggactgtatctgtgtgtgcaagccggggcgacagacggcctggcacactgaagtcaggtgccgggacccatggggcctgctgactcatggggacaccactggatgggaatcctgctttcagcctcgctttgtaccgtatggagtcctccagctgcagcccagctcaccctcaatgccaacccacttgatgccacccaaagtgaggatgttgttctgcctgtgtttgggacccccaggacaccccagattcatggcagatccagagagctggccaaaccctccattgcagtcagcccaggcactgccatagagcagaaggacatggtgaccttctactgcaccactaaggacgtcaacattaccatccactgggtttccaacaacctctccattgtgttccatgagcgcatgcagctgtccaaggatggcaagatcctcaccattctcattgtccagcgggaggactcagggacttaccaatgtgaagctcgagatgcccttctgagccagaggagcgaccccatcttcctggatgtgaagtatggtcctgatcctgttgaaatcaaattggagtctggtgttgccagtggggaggtggttgaggtgatggagggctccagcatgaccttcttagcggaaacaaagtctcacccaccctgtgcctatacttggtttctccttgactccattctgtctcacaccacgagaacattcaccatccatgctgtgtccagagaacatgagggcctgtacaggtgcttggtgtccaacagtgccacccacctgtccagcctgggtactctgaaggtccgagtacttgaaacactgaccatgcctcaagtcgtgccttcaagcctgaaccttgtggagaatgctaggtctgtggacctgacctgccaaaccgtcaatcagagtgtgaatgtccagtggttcctaagtggccagcccctcctgcccagtgagcacctgcagctgtcagctgacaacaggaccctaatcatccatggcctccagcggaatgacaccgggccctatgcctgtgaggtctggaactggggcagccgggcccggagtgagccccttgagctgaccatcaactatggtcctgaccaagtgcacatcaccagggagtcggcatctgagatgatcagcaccatagaggcagagctcaactccagcctgaccctgcagtgttgggccgagtccaagccaggtgctgagtatcgctggactcttgaacactccaccggggagcacctgggtgagcagctgattatcagggctctgacctgggaacacgacgggatctacaactgcacagcctccaactctctcactggcctggcccgctccacttcagtcctggtcaaggtggtaggtccccagtcctcctccctgtcctcaggggccatcgctggtattgtcatcgggatcctggctgtcattgctgtggcctcagaactgggctattttctctgcatcagaaatgccagacggccctcaaggaaaacaacagaggaccccagtcatgagacctcacaacccatcccgaaggaggagcaccccacagagcccagttccgaaagcctgagtcctgagtatcgcaatatatcccagcttcagggacggatcagagtcgaactgatgcaaccaccagaccttccagaggagacctatgagacgaagctgccttcagcaagccgtagaggcaattctttcagcccctggaagccaccacccaaacctctgatgcccccactcagattggtctccactgtgccaaaaaacatggagtcaatctatgaggtgttggggatgcagcagtgatcaacatcgataaaatgcttttccttatggaattgacatcgtagtggtaggtcggacagtagaccaaataaataattaaaat

SEQ ID NO: 114374 - DNA, 1494 bp, Homo sapiens
  Payload ID: 2358
  Gene Symbol: CEACAM20
  Gene Name: carcinoembryonic antigen-related cell adhesion molecule 20
  ENST ID: ENST00000620096
  CDS Start-End: 17-1492
tcaggtgccgggacccatggggcctgctgactcatggggacaccactggatgggaatcctgctttcagcctcgctttgtaccgtatggagtcctccagctgcagcccagctcaccctcaatgccaacccacttgatgccacccaaagtgaggatgttgttctgcctgtgtttgggacccccaggacaccccagattcatggcagatccagagagctggccaaaccctccattgcagtcagcccaggcactgccatagagcagaaggacatggtgaccttctactgcaccactaaggacgtcaacattaccatccactgggtttccaacaacctctccattgtgttccatgagcgcatgcagctgtccaaggatggcaagatcctcaccattctcattgtccagcgggaggactcagggacttaccaatgtgaagctcgagatgcccttctgagccagaggagcgaccccatcttcctggatgtgaagtatggtcctgatcctgttgaaatcaaattggagtctggtgttgccagtggggaggtggttgaggtgatggagggctccagcatgaccttcttagcggaaacaaagtctcacccaccctgtgcctatacttggtttctccttgactccattctgtctcacaccacgagaacattcaccatccatgctgtgtccagagaacatgagggcctgtacaggtgcttggtgtccaacagtgccacccacctgtccagcctgggtactctgaaggtccgagtacttgaaacactgaccatgcctcaagtcgtgccttcaagcctgaaccttgtggagaatgctaggtctgtggacctgacctgccaaaccgtcaatcagagtgtgaatgtccagtggttcctaagtggccagcccctcctgcccagtgagcacctgcagctgtcagctgacaacaggaccctaatcatccatggcctccagcggaatgacaccgggccctatgcctgtgaggtctggaactggggcagccgggcccggagtgagccccttgagctgaccatcaactgtccccagtcctcctccctgtcctcaggggccatcgctggtattgtcatcgggatcctggctgtcattgctgtggcctcagaactgggctattttctctgcatcagaaatgccagacggccctcaaggaaaacaacagaggaccccagtcatgagacctcacaacccatcccgaaggaggagcaccccacagagcccagttccgaaagcctgagtcctgagtatcgcaatatatcccagcttcagggacggatcagagtcgaactgacgaagctgccttcagcaagccgtagaggcaattctttcagcccctggaagccaccacccaaacctctgatgcccccactcagattggtctccactgtgccaaaaaacatggagtcaatctatgaggagcttgtgaatccagagcccaacacttacatccaaatcaacccctccgtctaatg

SEQ ID NO: 114375 - DNA, 1809 bp, Homo sapiens
  Payload ID: 2358
  Gene Symbol: CEACAM20
  Gene Name: carcinoembryonic antigen-related cell adhesion molecule 20
  ENST ID: ENST00000614924
  CDS Start-End: 17-1807
tcaggtgccgggacccatggggcctgctgactcatggggacaccactggatgggaatcctgctttcagcctcgctttgtaccgtatggagtcctccagctgcagcccagctcaccctcaatgccaacccacttgatgccacccaaagtgaggatgttgttctgcctgtgtttgggacccccaggacaccccagattcatggcagatccagagagctggccaaaccctccattgcagtcagcccaggcactgccatagagcagaaggacatggtgaccttctactgcaccactaaggacgtcaacattaccatccactgggtttccaacaacctctccattgtgttccatgagcgcatgcagctgtccaaggatggcaagatcctcaccattctcattgtccagcgggaggactcagggacttaccaatgtgaagctcgagatgcccttctgagccagaggagcgaccccatcttcctggatgtgaagtatggtcctgatcctgttgaaatcaaattggagtctggtgttgccagtggggaggtggttgaggtgatggagggctccagcatgaccttcttagcggaaacaaagtctcacccaccctgtgcctatacttggtttctccttgactccattctgtctcacaccacgagaacattcaccatccatgctgtgtccagagaacatgagggcctgtacaggtgcttggtgtccaacagtgccacccacctgtccagcctgggtactctgaaggtccgagtacttgaaacactgaccatgcctcaagtcgtgccttcaagcctgaaccttgtggagaatgctaggtctgtggacctgacctgccaaaccgtcaatcagagtgtgaatgtccagtggttcctaagtggccagcccctcctgcccagtgagcacctgcagctgtcagctgacaacaggaccctaatcatccatggcctccagcggaatgacaccgggccctatgcctgtgaggtctggaactggggcagccgggcccggagtgagccccttgagctgaccatcaactatggtcctgaccaagtgcacatcaccagggagtcggcatctgagatgatcagcaccatagaggcagagctcaactccagcctgaccctgcagtgttgggccgagtccaagccaggtgctgagtatcgctggactcttgaacactccaccggggagcacctgggtgagcagctgattatcagggctctgacctgggaacacgacgggatctacaactgcacagcctccaactctctcactggcctggcccgctccacttcagtcctggtcaaggtggtaggtccccagtcctcctccctgtcctcaggggccatcgctggtattgtcatcgggatcctggctgtcattgctgtggcctcagaactgggctattttctctgcatcagaaatgccagacggccctcaaggaaaacaacagaggaccccagtcatgagacctcacaacccatcccgaaggaggagcaccccacagagcccagttccgaaagcctgagtcctgagtatcgcaatatatcccagcttcagggacggatcagagtcgaactgatgcaaccaccagaccttccagaggagacctatgagacgaagctgccttcagcaagccgtagaggcaattctttcagcccctggaagccaccacccaaacctctgatgcccccactcagattggtctccactgtgccaaaaaacatggagtcaatctatgaggagcttgtgaatccagagcccaacacttacatccaaatcaacccctccgtctaatg

SEQ ID NO: 114376 - DNA, 1530 bp, Homo sapiens
  Payload ID: 2358
  Gene Symbol: CEACAM20
  Gene Name: carcinoembryonic antigen-related cell adhesion molecule 20
  ENST ID: ENST00000614577
  CDS Start-End: 17-1528
tcaggtgccgggacccatggggcctgctgactcatggggacaccactggatgggaatcctgctttcagcctcgctttgtaccgtatggagtcctccagctgcagcccagctcaccctcaatgccaacccacttgatgccacccaaagtgaggatgttgttctgcctgtgtttgggacccccaggacaccccagattcatggcagatccagagagctggccaaaccctccattgcagtcagcccaggcactgccatagagcagaaggacatggtgaccttctactgcaccactaaggacgtcaacattaccatccactgggtttccaacaacctctccattgtgttccatgagcgcatgcagctgtccaaggatggcaagatcctcaccattctcattgtccagcgggaggactcagggacttaccaatgtgaagctcgagatgcccttctgagccagaggagcgaccccatcttcctggatgtgaagtatggtcctgatcctgttgaaatcaaattggagtctggtgttgccagtggggaggtggttgaggtgatggagggctccagcatgaccttcttagcggaaacaaagtctcacccaccctgtgcctatacttggtttctccttgactccattctgtctcacaccacgagaacattcaccatccatgctgtgtccagagaacatgagggcctgtacaggtgcttggtgtccaacagtgccacccacctgtccagcctgggtactctgaaggtccgagtacttgaaacactgaccatgcctcaagtcgtgccttcaagcctgaaccttgtggagaatgctaggtctgtggacctgacctgccaaaccgtcaatcagagtgtgaatgtccagtggttcctaagtggccagcccctcctgcccagtgagcacctgcagctgtcagctgacaacaggaccctaatcatccatggcctccagcggaatgacaccgggccctatgcctgtgaggtctggaactggggcagccgggcccggagtgagccccttgagctgaccatcaactgtccccagtcctcctccctgtcctcaggggccatcgctggtattgtcatcgggatcctggctgtcattgctgtggcctcagaactgggctattttctctgcatcagaaatgccagacggccctcaaggaaaacaacagaggaccccagtcatgagacctcacaacccatcccgaaggaggagcaccccacagagcccagttccgaaagcctgagtcctgagtatcgcaatatatcccagcttcagggacggatcagagtcgaactgatgcaaccaccagaccttccagaggagacctatgagacgaagctgccttcagcaagccgtagaggcaattctttcagcccctggaagccaccacccaaacctctgatgcccccactcagattggtctccactgtgccaaaaaacatggagtcaatctatgaggagcttgtgaatccagagcccaacacttacatccaaatcaacccctccgtctaatg

SEQ ID NO: 114377 - DNA, 2034 bp, Homo sapiens
  Payload ID: 2358
  Gene Symbol: CEACAM20
  Gene Name: carcinoembryonic antigen-related cell adhesion molecule 20
  ENST ID: ENST00000617951
  CDS Start-End: 280-2034
cggtctccagggttcctggacttcccgctctttgtgctgggcagggaaggaaagtgagccctgggggtagagggcagaggtggggtcaaagttactttcctgccaccacccctgtctgtcctgggagctgcagttactgcagtgtgtgtgtgagtttgtagcagggtgggagaggagagaagggaggtggaggggctgcacctggagtgaggactgtatctgtgtgtgcaagccggggcgacagacggcctggcacactgaagtcaggtgccgggacccatggggcctgctgactcatggggacaccactggatgggaatcctgctttcagcctcgctttgtaccgtatggagtcctccagctgcagcccagctcaccctcaatgccaacccacttgatgccacccaaagtgaggatgttgttctgcctgtgtttgggacccccaggacaccccagattcatggcagatccagagagctggccaaaccctccattgcagtcagcccaggcactgccatagagcagaaggacatggtgaccttctactgcaccactaaggacgtcaacattaccatccactgggtttccaacaacctctccattgtgttccatgagcgcatgcagctgtccaaggatggcaagatcctcaccattctcattgtccagcgggaggactcagggacttaccaatgtgaagctcgagatgcccttctgagccagaggagcgaccccatcttcctggatgtgaagtatggtcctgatcctgttgaaatcaaattggagtctggtgttgccagtggggaggtggttgaggtgatggagggctccagcatgaccttcttagcggaaacaaagtctcacccaccctgtgcctatacttggtttctccttgactccattctgtctcacaccacgagaacattcaccatccatgctgtgtccagagaacatgagggcctgtacaggtgcttggtgtccaacagtgccacccacctgtccagcctgggtactctgaaggtccgagtacttgaaacactgaccatgcctcaagtcgtgccttcaagcctgaaccttgtggagaatgctaggtctgtggacctgacctgccaaaccgtcaatcagagtgtgaatgtccagtggttcctaagtggccagcccctcctgcccagtgagcacctgcagctgtcagctgacaacaggaccctaatcatccatggcctccagcggaatgacaccgggccctatgcctgtgaggtctggaactggggcagccgggcccggagtgagccccttgagctgaccatcaactatggtcctgaccaagtgcacatcaccagggagtcggcatctgagatgatcagcaccatagaggcagagctcaactccagcctgaccctgcagtgttgggccgagtccaagccaggtgctgagtatcgctggactcttgaacactccaccggggagcacctgggtgagcagctgattatcagggctctgacctgggaacacgacgggatctacaactgcacagcctccaactctctcactggcctggcccgctccacttcagtcctggtcaaggtggtaggtccccagtcctcctccctgtcctcaggggccatcgctggtattgtcatcgggatcctggctgtcattgctgtggcctcagaactgggctattttctctgcatcagaaatgccagacggccctcaaggaaaacaacagaggaccccagtcatgagacctcacaacccatcccgaaggaggagcaccccacagagcccagttccgaaagcctgagtcctgagtatcgcaatatatcccagcttcagggacggatcagagtcgaactgatgcaaccaccagaccttccagaggagacctatgagacgaagctgccttcagcaagccgtagaggcaattctttcagcccctggaagccaccacccaaacctctgatgcccccactcagattggtctccactgtgccaaaaaacatggagtcaatctatgaggtatttatgccacactga

SEQ ID NO: 114378 - DNA, 1773 bp, Homo sapiens
  Payload ID: 2358
  Gene Symbol: CEACAM20
  Gene Name: carcinoembryonic antigen-related cell adhesion molecule 20
  ENST ID: ENST00000611497
  CDS Start-End: 17-1771
tcaggtgccgggacccatggggcctgctgactcatggggacaccactggatgggaatcctgctttcagcctcgctttgtaccgtatggagtcctccagctgcagcccagctcaccctcaatgccaacccacttgatgccacccaaagtgaggatgttgttctgcctgtgtttgggacccccaggacaccccagattcatggcagatccagagagctggccaaaccctccattgcagtcagcccaggcactgccatagagcagaaggacatggtgaccttctactgcaccactaaggacgtcaacattaccatccactgggtttccaacaacctctccattgtgttccatgagcgcatgcagctgtccaaggatggcaagatcctcaccattctcattgtccagcgggaggactcagggacttaccaatgtgaagctcgagatgcccttctgagccagaggagcgaccccatcttcctggatgtgaagtatggtcctgatcctgttgaaatcaaattggagtctggtgttgccagtggggaggtggttgaggtgatggagggctccagcatgaccttcttagcggaaacaaagtctcacccaccctgtgcctatacttggtttctccttgactccattctgtctcacaccacgagaacattcaccatccatgctgtgtccagagaacatgagggcctgtacaggtgcttggtgtccaacagtgccacccacctgtccagcctgggtactctgaaggtccgagtacttgaaacactgaccatgcctcaagtcgtgccttcaagcctgaaccttgtggagaatgctaggtctgtggacctgacctgccaaaccgtcaatcagagtgtgaatgtccagtggttcctaagtggccagcccctcctgcccagtgagcacctgcagctgtcagctgacaacaggaccctaatcatccatggcctccagcggaatgacaccgggccctatgcctgtgaggtctggaactggggcagccgggcccggagtgagccccttgagctgaccatcaactatggtcctgaccaagtgcacatcaccagggagtcggcatctgagatgatcagcaccatagaggcagagctcaactccagcctgaccctgcagtgttgggccgagtccaagccaggtgctgagtatcgctggactcttgaacactccaccggggagcacctgggtgagcagctgattatcagggctctgacctgggaacacgacgggatctacaactgcacagcctccaactctctcactggcctggcccgctccacttcagtcctggtcaaggtggtaggtccccagtcctcctccctgtcctcaggggccatcgctggtattgtcatcgggatcctggctgtcattgctgtggcctcagaactgggctattttctctgcatcagaaatgccagacggccctcaaggaaaacaacagaggaccccagtcatgagacctcacaacccatcccgaaggaggagcaccccacagagcccagttccgaaagcctgagtcctgagtatcgcaatatatcccagcttcagggacggatcagagtcgaactgacgaagctgccttcagcaagccgtagaggcaattctttcagcccctggaagccaccacccaaacctctgatgcccccactcagattggtctccactgtgccaaaaaacatggagtcaatctatgaggagcttgtgaatccagagcccaacacttacatccaaatcaacccctccgtctaatg

SEQ ID NO: 114379 - DNA, 1300 bp, Homo sapiens
  Payload ID: 2359
  Gene Symbol: CEACAM21
  Gene Name: carcinoembryonic antigen-related cell adhesion molecule 21
  Uniprot ID: Q3KPI0
  ENST ID: ENST00000187608
  CDS Start-End: 41-919
ctcctctccacagaggaggacagagcaggcagcagagaccatggggcccccctcagcttgtccccacagagaatgcatcccctggcaggggctcttgctcacagcctcacttttaactttctggaacgcacccaccactgcctggctctttattgcatcagcgccctttgaagttgctgaaggggagaatgttcatctctctgtggtttatctgcccgagaatctttacagctatggctggtacaaagggaaaacggtggagcccaaccagctaatcgcagcatatgtaatagacactcacgttaggactccagggcctgcatacagcggtcgagagacaatatcacccagtggagatctgcatttccagaacgtcaccctagaggacacgggatactacaacctacaagtcacatacagaaattctcagattgaacaggcatctcaccatctccgtgtatacgagtcagtggctcagccctccatccaagccagcagcaccacagtcacagagaagggctccgtggtcctgacctgccacacaaataacactggaacctctttccagtggattttcaacaaccagcgtctgcaggtcacgaagaggatgaagctgtcctggtttaaccatgtgctcaccatagaccccatcaggcaggaggacgctggggagtatcagtgtgaggtctccaacccagtcagctccaacaggagcgaccccctcaagctgactgtaaaatatgacaacactctaggcatcctgatcggggtcctggttgggagtcttctggtggctgcacttgtgtgtttcctgctcctccgaaaaactggcagggccagcgatcagagtgacttcagggagcagcagcccccagcctccacccccggccatggaccctctgacagctccatctcctaggaattgctacactctgacacaaacatttactgctggatcgaccacaaagcagatgtggcttcttaggttcctctgggagctgctcctgtgggttgatggagcgtccctgaagcccccagccctggggatggggaaggacatggagcctgagccagagaaccagctctgagtcctgaggagacacaggcctggggacaggaagggatgggggtccctgctgaatatatagagacctcaacagactgccccgggctctgggtgggccaaggcgaaggcttcccatcaccacaggaagtgggggcttgcagggaaagtgaatgggcctatggcccacccggggtcacctggaaaggatctgaataaaggggaaacttcctctca

SEQ ID NO: 114380 - DNA, 1691 bp, Homo sapiens
  Payload ID: 2359
  Gene Symbol: CEACAM21
  Gene Name: carcinoembryonic antigen-related cell adhesion molecule 21
  ENST ID: ENST00000407170
  CDS Start-End: 814-1311
agagcagaacttggactgagtcctgcaggacacaggttccgccgagcccgtcccttggcggtggtgtcactggatgctgggaagagatggtgggaagagcctccatccattggcgcgtcactaattagacaaggaggccttgggctcccttgagagagtcacggtttctcctccgttgacccgcccttcattgaactcctttacttggatattcagagcgctggacagagatcacttggcgctaacaccctcggaggtcctcacggcgctccgtcggaatgacacagtcggattcccaagctgcgaagggtgagggagggactgcagcgcaggaactgaggaggagaggcccgcgcgcccactggagccgagcggtgaggaataaccggaccgacccccgacggtgcgtgcctcacttttaactttctggaacgcacccaccactgcctggctctttattgcatcagcgccctttgaagttgctgaaggggagaatgttcatctctctgtggtttatctgcccgagaatctttacagctatggctggtacaaagggaaaacggtggagcccaaccagctaatcgcagcatatgtaatagacactcacgttaggactccagggcctgcatacagcggtcgagagacaatatcacccagtggagatctgcatttccagaacgtcaccctagaggacacgggatactacaacctacaagtcacatacagaaattctcagattgaacaggcatctcaccatctccgtgtatacggagaatgttctaaatttgactctgagatctctgaggatgcagcatggccccaagacactttctgttggtcactctatccacagagtcagtggctcagccctccatccaagccagcagcaccacagtcacagagaagggctccgtggtcctgacctgccacacaaataacactggaacctctttccagtggattttcaacaaccagcgtctgcaggtcacgaagaggatgaagctgtcctggtttaaccatgtgctcaccatagaccccatcaggcaggaggacgctggggagtatcagtgtgaggtctccaacccagtcagctccaacaggagcgaccccctcaagctgactgtaaaatcagatgacaacactctaggcatcctgatcggggtcctggttgggagtcttctggtggctgcacttgtgtgtttcctgctcctccgaaaaactggcagggccagcgatcagagtgacttcagggagcagcagcccccagcctccacccccggccatggaccctctgacagctccatctcctaggaattgctacactctgacacaaacatttactgctggatcgaccacaaagcagatgtggcttcttaggttcctctgggagctgctcctgtgggttgatggagcgtccctgaagcccccagccctggggatggggaaggacatggagcctgagccagagaaccagctctgagtcctgaggagacacaggcctggggacaggaagggatgggggtccctgctgaatatatagagacctcaacagactgccccgggctctgggtgggccaaggcgaaggcttcccatcaccacaggaagtgggggcttgcagggaaagtgaatgggcctatggcccacccggggtcacctggaaaggatctgaataaaggggaaacttcctctc

SEQ ID NO: 114381 - DNA, 1008 bp, Homo sapiens
  Payload ID: 2359
  Gene Symbol: CEACAM21
  Gene Name: carcinoembryonic antigen-related cell adhesion molecule 21
  Uniprot ID: Q3KPI0
  ENST ID: ENST00000401445
  CDS Start-End: 27-908
ggaggacagagcaggcagcagagaccatggggcccccctcagcttgtccccacagagaatgcatcccctggcaggggctcttgctcacagcctcacttttaactttctggaacgcacccaccactgcctggctctttattgcatcagcgccctttgaagttgctgaaggggagaatgttcatctctctgtggtttatctgcccgagaatctttacagctatggctggtacaaagggaaaacggtggagcccaaccagctaatcgcagcatatgtaatagacactcacgttaggactccagggcctgcatacagcggtcgagagacaatatcacccagtggagatctgcatttccagaacgtcaccctagaggacacgggatactacaacctacaagtcacatacagaaattctcagattgaacaggcatctcaccatctccgtgtatacgagtcagtggctcagccctccatccaagccagcagcaccacagtcacagagaagggctccgtggtcctgacctgccacacaaataacactggaacctctttccagtggattttcaacaaccagcgtctgcaggtcacgaagaggatgaagctgtcctggtttaaccatgtgctcaccatagaccccatcaggcaggaggacgctggggagtatcagtgtgaggtctccaacccagtcagctccaacaggagcgaccccctcaagctgactgtaaaatcagatgacaacactctaggcatcctgatcggggtcctggttgggagtcttctggtggctgcacttgtgtgtttcctgctcctccgaaaaactggcagggccagcgatcagagtgacttcagggagcagcagcccccagcctccacccccggccatggaccctctgacagctccatctcctaggaattgctacactctgacacaaacatttactgctggatcgaccacaaagcagatgtggcttcttaggttcctctgggagctgctcctgtgggttgatgga

SEQ ID NO: 114382 - DNA, 1435 bp, Homo sapiens
  Payload ID: 2359
  Gene Symbol: CEACAM21
  Gene Name: carcinoembryonic antigen-related cell adhesion molecule 21
  Uniprot ID: Q3KPI0
  ENST ID: ENST00000457737
  CDS Start-End: 97-672
ggacagcagagacaacagtcacagtaaccctgtctagagcgttcctggagcccaagctcctctccacagaggaggacagagcaggcagcagagaccatggggcccccctcagcttgtccccacagagaatgcatcccctggcaggggctcttgctcacagcctcacttttaactttctggaacgcacccaccactgcctggctctttattgcatcagcgccctttgaagttgctgaaggggagaatgttcatctctctgtggtttatctgcccgagaatctttacagctatggctggtacaaagggaaaacggtggagcccaaccagctaatcgcagcatatgtaatagacactcacgttaggactccagggcctgcatacagcggtcgagagacaatatcacccagtggagatctgcatttccagaacgtcaccctagaggacacgggatactacaacctacaagtcacatacagaaattctcagattgaacaggcatctcaccatctccgtgtatacggagaatgttctaaatttgactctgagatctctgaggatgcagcatggccccaagacactttctgttggtcactctatccacagagtcagtggctcagccctccatccaagccagcagcaccacagtcacagagaagggctccgtggtcctgacctgccacacaaataacactggaacctctttccagtggattttcaacaaccagcgtctgcaggtcacgaagaggatgaagctgtcctggtttaaccatgtgctcaccatagaccccatcaggcaggaggacgctggggagtatcagtgtgaggtctccaacccagtcagctccaacaggagcgaccccctcaagctgactgtaaaatatgacaacactctaggcatcctgatcggggtcctggttgggagtcttctggtggctgcacttgtgtgtttcctgctcctccgaaaaactggcagggccagcgatcagagtgacttcagggagcagcagcccccagcctccacccccggccatggaccctctgacagctccatctcctaggaattgctacactctgacacaaacatttactgctggatcgaccacaaagcagatgtggcttcttaggttcctctgggagctgctcctgtgggttgatggagcgtccctgaagcccccagccctggggatggggaaggacatggagcctgagccagagaaccagctctgagtcctgaggagacacaggcctggggacaggaagggatgggggtccctgctgaatatatagagacctcaacagactgccccgggctctgggtgggccaaggcgaaggcttcccatcaccacaggaagtgggggcttgcagggaaagtgaatgggcctatggcccacccggggtcacctggaaaggatctgaataaaggggaaacttcct

SEQ ID NO: 114383 - DNA, 1691 bp, Homo sapiens; identical to SEQ ID NO: 114380
  Payload ID: 2359
  Gene Symbol: CEACAM21
  Gene Name: carcinoembryonic antigen-related cell adhesion molecule 21
  ENST ID: ENST00000614555
  CDS Start-End: 814-1311

SEQ ID NO: 114384 - DNA, 1300 bp, Homo sapiens; identical to SEQ ID NO: 114379
  Payload ID: 2359
  Gene Symbol: CEACAM21
  Gene Name: carcinoembryonic antigen-related cell adhesion molecule 21
  Uniprot ID: Q3KPI0
  ENST ID: ENST00000611554
  CDS Start-End: 41-919

SEQ ID NO: 114385 - DNA, 1435 bp, Homo sapiens; identical to SEQ ID NO: 114382
  Payload ID: 2359
  Gene Symbol: CEACAM21
  Gene Name: carcinoembryonic antigen-related cell adhesion molecule 21
  ENST ID: ENST00000627877
  CDS Start-End: 97-672

SEQ ID NO: 114386 - DNA, 1008 bp, Homo sapiens; identical to SEQ ID NO: 114381
  Payload ID: 2359
  Gene Symbol: CEACAM21
  Gene Name: carcinoembryonic antigen-related cell adhesion molecule 21
  ENST ID: ENST00000629689
  CDS Start-End: 27-908

SEQ ID NO: 114387 - DNA, 710 bp, Homo sapiens
  Payload ID: 2359
  Gene Symbol: CEACAM21
  Gene Name: carcinoembryonic antigen-related cell adhesion molecule 21
  ENST ID: ENST00000632983
  CDS Start-End: 1-287
tgctcaccatagaccccatcaggcaggaggacgctggggagtatcagtgtgaggtctccaacccagtcagctccaacaggagcgaccccctcaagctgactgtaaaatatgacaacactctaggcatcctgatcggggtcctggttgggagtcttctggtggctgcacttgtgtgtttcctgctcctccgaaaaactggcagggccagcgatcagagtgacttcagggagcagcagcccccagcctccacccccggccatggaccctctgacagctccatctcctagattcccctacccagcaccagggcagctgctctcatctatgaggaattgctacactctgacacaaacatttactgctggatcgaccacaaagcagatgtggcttcttaggttcctctgggagctgctcctgtgggttgatggagcgtccctgaagcccccagccctggggatggggaaggacatggagcctgagccagagaaccagctctgagtcctgaggagacacaggcctggggacaggaagggatgggggtccctgctgaatatatagagacctcaacagactgccccgggctctgggtgggccaaggcgaaggcttcccatcaccacaggaagtgggggcttgcagggaaagtgaatgggcctatggcccacccggggtcacctggaaaggatctgaataaaggggaaacttcctctca

SEQ ID NO: 114388 - DNA, 1022 bp, Homo sapiens
  Payload ID: 2360
  Gene Symbol: CEACAM3
  Gene Name: carcinoembryonic antigen-related cell adhesion molecule 3
  Uniprot ID: P40198
  ENST ID: ENST00000344550
  CDS Start-End: 55-693
tcctggagcccaggctcttttccacagaggaggaaagagcaggcagcagagaccatggggcccccctcagcctctccccacagagaatgcatcccctggcaggggcttctgctcacagcctcacttctaaacttctggaacccgcccaccactgccaagctcactattgaatccatgccgctcagtgtcgcagaggggaaggaggtgcttctacttgtccacaatctgccccagcatctttttggctacagctggtacaaaggggaaagagtggatggcaacagtctaattgtaggatatgtaataggaactcaacaagctaccccaggggccgcatacagcggtcgagagacaatatacaccaatgcatccctgctgatccagaatgtcacccagaatgacataggattctacaccctacaagtcataaagtcagatcttgtgaatgaagaagcaactggacagttccatgtataccaagaaaatgccccaggccttcctgtgggggccgtcgccggcatcgtgaccggggtcctggtcggagtggcgctggtggccgcgctggtgtgtttcctgctccttgccaaaactggaaggccgtggtccctcccacagctctgccttctcgatgtcccctctctccactgcccaggcccccctacccaaccccaggacagcagcttccatctatgagaagtggcttcttagcttcctccaggagctgctcctgtgtgttgatggagagtccccaaggcccccagccctggggatggggaaggacatgaagcctgagccagagaaccagctataagtcctgagaagacactggtgtctgggggcagggagggatgggggtccctgatgaatatctggagacctcgacagcctgccctaggccctgggtgggtcaggacaaaggcctctcatcaccgcagaaagcgggggcttgcagggaaagtgaatgggcctgtggcccacctggggtcacttggaaaggatctgaataaaggggacccttcctc

SEQ ID NO: 114389 - DNA, 1316 bp, Homo sapiens
  Payload ID: 2360
  Gene Symbol: CEACAM3
  Gene Name: carcinoembryonic antigen-related cell adhesion molecule 3
  Uniprot ID: P40198
  ENST ID: ENST00000357396
  CDS Start-End: 242-1000
aaatgtagacagaagggagaaaggaagaagagaaaatgaggcaaaactgagaggggaggggacagagaggtgacctgggcagagcttcacccatgaccctggaaagtgctcctgccctgggaggaggctcagcatggaaagaggaaggacagcagagcctaagtcacagtagccctgactacagcattcctggagcccaggctcttttccacagaggaggaaagagcaggcagcagagaccatggggcccccctcagcctctccccacagagaatgcatcccctggcaggggcttctgctcacagcctcacttctaaacttctggaacccgcccaccactgccaagctcactattgaatccatgccgctcagtgtcgcagaggggaaggaggtgcttctacttgtccacaatctgccccagcatctttttggctacagctggtacaaaggggaaagagtggatggcaacagtctaattgtaggatatgtaataggaactcaacaagctaccccaggggccgcatacagcggtcgagagacaatatacaccaatgcatccctgctgatccagaatgtcacccagaatgacataggattctacaccctacaagtcataaagtcagatcttgtgaatgaagaagcaactggacagttccatgtataccaagaaaatgccccaggccttcctgtgggggccgtcgccggcatcgtgaccggggtcctggtcggagtggcgctggtggccgcgctggtgtgtttcctgctccttgccaaaactggaagaaccagcatccagcgtgacctcaaggagcagcagccccaagcccttgcccctggccgtggtccctcccacagctctgccttctcgatgtcccctctctccactgcccaggcccccctacccaaccccaggacagcagcttccatctatgaggaattgctaaaacatgacacaaacatttactgccggatggaccacaaagcagaagtggcttcttagcttcctccaggagctgctcctgtgtgttgatggagagtccccaaggcccccagccctggggatggggaaggacatgaagcctgagccagagaaccagctataagtcctgagaagacactggtgtctgggggcagggagggatgggggtccctgatgaatatctggagacctcgacagcctgccctaggccctgggtgggtcaggacaaaggcctctcatcaccgcagaaagcgggggcttgcagggaaagtgaatgggcctgtggcccacctggggtcacttggaaaggatctgaataaaggggacccttcctctc

SEQ ID NO: 114390 - DNA, 1640 bp, Homo sapiens
  Payload ID: 2360
  Gene Symbol: CEACAM3
  Gene Name: carcinoembryonic antigen-related cell adhesion molecule 3
  Uniprot ID: P40198
  ENST ID: ENST00000415495
  CDS Start-End: 62-595
acagcattcctggagcccaggctcttttccacagaggaggaaagagcaggcagcagagaccatggggcccccctcagcctctccccacagagaatgcatcccctggcaggggcttctgctcacagcctcacttctaaacttctggaacccgcccaccactgccaagctcactattgaatccatgccgctcagtgtcgcagaggggaaggaggtgcttctacttgtccacaatctgccccagcatctttttggctacagctggtacaaaggggaaagagtggatggcaacagtctaattgtaggatatgtaataggaactcaacaagctaccccaggggccgcatacagcggtcgagagacaatatacaccaatgcatccctgctgatccagaatgtcacccagaatgacataggattctacaccctacaagtcataaagtcagatcttgtgaatgaagaagcaactggacagttccatgtatacccggagctgcccaagccctccatctccagcaacaactccaaccccaaggaggacaaggatgctgtggccttcacctgtgaacctgagattcacagcacaacctgcctgtagtgggtaaatggtcagagcctcccggtcagttccaggctgcagctgtccaatgacaagaggaccctcactctactcagtgtcacaaggaatgacacaggaccctatgagtgtgaaataccgaacccagtgggtgccagctacagtgacccagtcacgctgaatgtcctctgtatcttctgttcctctgtggcccaggcttccagcccaaatccacacagccagaggccaggcctctcagtccctctcaagtccagggactcagactctcacccaggctggccatcacttcctgtcccaagcaaacctgggcagacccagccttgaccaagaataggaggggagaggctgctcctgtcctgggaggctcagggtccacagcctgtgatgggagaaacagaaaatgccccaggccttcctgtgggggccgtcgccggcatcgtgaccggggtcctggtcggagtggcgctggtggccgcgctggtgtgtttcctgctccttgccaaaactggaagaaccagcatccagcgtgacctcaaggagcagcagccccaagcccttgcccctggccgtggtccctcccacagctctgccttctcgatgtcccctctctccactgcccaggcccccctacccaaccccaggacagcagcttccatctatgaggaattgctaaaacatgacacaaacatttactgccggatggaccacaaagcagaagtggcttcttagcttcctccaggagctgctcctgtgtgttgatggagagtccccaaggcccccagccctggggatggggaaggacatgaagcctgagccagagaaccagctataagtcctgagaagacactggtgtctgggggcagggagggatgggggtccctgatgaatatctggagacctcgacagcctgccctaggccctgggtgggtcaggacaaaggcctctcatcaccgcagaaagcgggggcttgcagggaaagtgaatgggcctgtggcccacctggggtcacttggaaaggatctgaataaaggggacccttcctctc

SEQ ID NO: 114391 - DNA, 474 bp, Homo sapiens
  Payload ID: 2360
  Gene Symbol: CEACAM3
  Gene Name: carcinoembryonic antigen-related cell adhesion molecule 3
  ENST ID: ENST00000596544
  CDS Start-End: 178-474
agacaagtctctgtgttcaaagagcttacactcttgcagagatgaagatagacacccaaagagatctagaatgtgagttcaggtgttgacaagagccctggagggaacagagcagaaaaagcctcacttctaaacttctggaacccgcccaccactgccaagctcactattgaatccatgccgctcagtgtcgcagaggggaaggaggtgcttctacttgtccacaatctgccccagcatctttttggctacagctggtacaaaggggaaagagtggatggcaacagtctaattgtaggatatgtaataggaactcaacaagctaccccaggggccgcatacagcggtcgagagacaatatacaccaatgcatccctgctgatccagaatgtcacccagaatgacataggattctacaccctacaagtcataaagtcagatcttgtgaatgaagaagcaactggacagttccat

SEQ ID NO: 114392 - DNA, 1110 bp, Homo sapiens
  Payload ID: 2360
  Gene Symbol: CEACAM3
  Gene Name: carcinoembryonic antigen-related cell adhesion molecule 3
  Uniprot ID: P40198
  ENST ID: ENST00000630848
  CDS Start-End: 89-727
agagcctaagtcacagtagccctgactacagcattcctggagcccaggctcttttccacagaggaggaaagagcaggcagcagagaccatggggcccccctcagcctctccccacagagaatgcatcccctggcaggggcttctgctcacagcctcacttctaaacttctggaacccgcccaccactgccaagctcactattgaatccatgccgctcagtgtcgcagaggggaaggaggtgcttctacttgtccacaatctgccccagcatctttttggctacagctggtacaaaggggaaagagtggatggcaacagtctaattgtaggatatgtaataggaactcaacaagctaccccaggggccgcatacagcggtcgagagacaatatacaccaatgcatccctgctgatccagaatgtcacccagaatgacataggattctacaccctacaagtcataaagtcagatcttgtgaatgaagaagcaactggacagttccatgtataccaagaaaatgccccaggccttcctgtgggggccgtcgccggcatcgtgaccggggtcctggtcggagtggcgctggtggccgcgctggtgtgtttcctgctccttgccaaaactggaaggccgtggtccctcccacagctctgccttctcgatgtcccctctctccactgcccaggcccccctacccaaccccaggacagcagcttccatctatgaggaattgctaaaacatgacacaaacatttactgccggatggaccacaaagcagaagtggcttcttagcttcctccaggagctgctcctgtgtgttgatggagagtccccaaggcccccagccctggggatggggaaggacatgaagcctgagccagagaaccagctataagtcctgagaagacactggtgtctgggggcagggagggatgggggtccctgatgaatatctggagacctcgacagcctgccctaggccctgggtgggtcaggacaaaggcctctcatcaccgcagaaagcgggggcttgcagggaaagtgaatgggcctgtggcccacctggggtcacttggaaaggatctgaataaaggggacccttcctctc

SEQ ID NO: 114393 - DNA, 1205 bp, Homo sapiens
  Payload ID: 2361
  Gene Symbol: CEACAM4
  Gene Name: carcinoembryonic antigen-related cell adhesion molecule 4
  Uniprot ID: O75871
  ENST ID: ENST00000221954
  CDS Start-End: 112-846
acagaaggaggaaggtcagcagccccgacagccgacagtcacagcagctctgacaagagcgttcctggagcccagctcctctccacagaggacaagcaggcagcagagaccatgggccccccctcagccgctccccgtggagggcacaggccctggcaggggctcctgatcacagcctcacttttaaccttctggcacccgcccaccactgtccagttcactattgaagccctgccgtccagtgctgcagagggaaaggatgttcttctactggcctgcaatatttcagaaactattcaagcctattattggcacaaggggaaaacggcagaagggagccctctcattgctggttatataacagacattcaagcaaatatcccaggggccgcatacagtggtcgagagacagtataccccaatggatccctgctgttccaaaacatcaccctggaggacgcaggatcctacaccctacgaaccataaatgccagttacgactctgaccaagcaactggccagctccacgtacaccaaaacaacgtcccaggccttcctgtgggggccgtcgctggcatcgtgactggggtcctggttggggtggctctggtggccgccctggtgtgttttctgcttctctccaggactggaagggccagcatccagcgtgacctcagggagcagccgcccccagcctccacccctggccatggtccctctcacagatccaccttctcggcccctctacccagccccagaacagccactcccatctatgaggaattgctatactctgatgcaaacatttactgccagatcgaccacaaagcagatgtggtctcttaggttcctctgggagctgctcttgtgggttgatggagcgtccccgaagctcccagccctggggacggggaaggacatggagcctgagccagagaaccagctctgagtcctgaggagacacaggcctggggacagggagggatgggagtccctgctgaatatctggagaccctgacaggttgccctgggctctgggtgggccgggacaaaggcctctcatcaccacaggaagcgggggcttgcaaggaaagtgaatgggcctgtggcccacccggggtcaccaggaaaggatctgaataaagaggacccttcctctcattggctctttttctgctcacgggaacttagcagaaactcacctg

SEQ ID NO: 114394 - DNA, 899 bp, Homo sapiens
  Payload ID: 2361
  Gene Symbol: CEACAM4
  Gene Name: carcinoembryonic antigen-related cell adhesion molecule 4
  ENST ID: ENST00000600925
  CDS Start-End: 112-876
acagaaggaggaaggtcagcagccccgacagccgacagtcacagcagctctgacaagagcgttcctggagcccagctcctctccacagaggacaagcaggcagcagagaccatgggccccccctcagccgctccccgtggagggcacaggccctggcaggggctcctgatcacagcctcacttttaaccttctggcacccgcccaccactgtccagttcactattgaagccctgccgtccagtgctgcagagggaaaggatgttcttctactggcctgcaatatttcagaaactattcaagcctattattggcacaaggggaaaacggcagaagggagccctctcattgctggttatataacagacattcaagcaaatatcccaggggccgcatacagtggtcgagagacagtataccccaatggatccctgctgttccaaaacatcaccctggaggacgcaggatcctacaccctacgaaccataaatgccagttacgactctgaccaagcaactggccagctccacgtacaccaaaacaacgtcccaggccttcctgtgggggccgtcgctggcatcgtgactggggtcctggttggggtggctctggtggccgccctggtgtgttttctgcttctctccaggactggaagcatccagcgtgacctcagggagcagccgcccccagcctccacccctggccatggtccctctcacagatccaccttctcggcccctctacccagccccagaacagccactcccatctatgaggtgagtgtgggccatggatgttctggtcccgcaggctccaggggacccaggatctgcccccaccagcacctggctgagctcagattcaggaaaatgcagtgaaaatgagaacaggtggtggtgag

SEQ ID NO: 114395 - DNA, 1205 bp, Homo sapiens; identical to SEQ ID NO: 114393
  Payload ID: 2361
  Gene Symbol: CEACAM4
  Gene Name: carcinoembryonic antigen-related cell adhesion molecule 4
  Uniprot ID: O75871
  ENST ID: ENST00000616476
  CDS Start-End: 112-846

SEQ ID NO: 114396 - DNA, 899 bp, Homo sapiens; identical to SEQ ID NO: 114394
  Payload ID: 2361
  Gene Symbol: CEACAM4
  Gene Name: carcinoembryonic antigen-related cell adhesion molecule 4
  ENST ID: ENST00000626555
  CDS Start-End: 112-876

SEQ ID NO: 114397 - DNA, 2874 bp, Homo sapiens
  Payload ID: 2362
  Gene Symbol: CEACAM5
  Gene Name: carcinoembryonic antigen-related cell adhesion molecule 5
  Uniprot ID: P06731
  ENST ID: ENST00000221992
  CDS Start-End: 115-2223
ctcagggcagagggaggaaggacagcagaccagacagtcacagcagccttgacaaaacgttcctggaactcaagctcttctccacagaggaggacagagcagacagcagagaccatggagtctccctcggcccctccccacagatggtgcatcccctggcagaggctcctgctcacagcctcacttctaaccttctggaacccgcccaccactgccaagctcactattgaatccacgccgttcaatgtcgcagaggggaaggaggtgcttctacttgtccacaatctgccccagcatctttttggctacagctggtacaaaggtgaaagagtggatggcaaccgtcaaattataggatatgtaataggaactcaacaagctaccccagggcccgcatacagtggtcgagagataatataccccaatgcatccctgctgatccagaacatcatccagaatgacacaggattctacaccctacacgtcataaagtcagatcttgtgaatgaagaagcaactggccagttccgggtatacccggagctgcccaagccctccatctccagcaacaactccaaacccgtggaggacaaggatgctgtggccttcacctgtgaacctgagactcaggacgcaacctacctgtggtgggtaaacaatcagagcctcccggtcagtcccaggctgcagctgtccaatggcaacaggaccctcactctattcaatgtcacaagaaatgacacagcaagctacaaatgtgaaacccagaacccagtgagtgccaggcgcagtgattcagtcatcctgaatgtcctctatggcccggatgcccccaccatttcccctctaaacacatcttacagatcaggggaaaatctgaacctctcctgccacgcagcctctaacccacctgcacagtactcttggtttgtcaatgggactttccagcaatccacccaagagctctttatccccaacatcactgtgaataatagtggatcctatacgtgccaagcccataactcagacactggcctcaataggaccacagtcacgacgatcacagtctatgcagagccacccaaacccttcatcaccagcaacaactccaaccccgtggaggatgaggatgctgtagccttaacctgtgaacctgagattcagaacacaacctacctgtggtgggtaaataatcagagcctcccggtcagtcccaggctgcagctgtccaatgacaacaggaccctcactctactcagtgtcacaaggaatgatgtaggaccctatgagtgtggaatccagaacgaattaagtgttgaccacagcgacccagtcatcctgaatgtcctctatggcccagacgaccccaccatttccccctcatacacctattaccgtccaggggtgaacctcagcctctcctgccatgcagcctctaacccacctgcacagtattcttggctgattgatgggaacatccagcaacacacacaagagctctttatctccaacatcactgagaagaacagcggactctatacctgccaggccaataactcagccagtggccacagcaggactacagtcaagacaatcacagtctctgcggagctgcccaagccctccatctccagcaacaactccaaacccgtggaggacaaggatgctgtggccttcacctgtgaacctgaggctcagaacacaacctacctgtggtgggtaaatggtcagagcctcccagtcagtcccaggctgcagctgtccaatggcaacaggaccctcactctattcaatgtcacaagaaatgacgcaagagcctatgtatgtggaatccagaactcagtgagtgcaaaccgcagtgacccagtcaccctggatgtcctctatgggccggacacccccatcatttcccccccagactcgtcttacctttcgggagcgaacctcaacctctcctgccactcggcctctaacccatccccgcagtattcttggcgtatcaatgggataccgcagcaacacacacaagttctctttatcgccaaaatcacgccaaataataacgggacctatgcctgttttgtctctaacttggctactggccgcaataattccatagtcaagagcatcacagtctctgcatctggaacttctcctggtctctcagctggggccactgtcggcatcatgattggagtgctggttggggttgctctgatatagcagccctggtgtagtttcttcatttcaggaagactgacagttgttttgcttcttccttaaagcatttgcaacagctacagtctaaaattgcttctttaccaaggatatttacagaaaagactctgaccagagatcgagaccatcctagccaacatcgtgaaaccccatctctactaaaaatacaaaaatgagctgggcttggtggcgcacacctgtagtcccagttactcgggaggctgaggcaggagaatcgcttgaacccgggaggtggagattgcagtgagcccagatcgcaccactgcactccagtctggcaacagagcaagactccatctcaaaaagaaaagaaaagaagactctgacctgtactcttgaatacaagtttctgataccactgcactgtctgagaatttccaaaactttaatgaactaactgacagcttcatgaaactgtccaccaagatcaagcagagaaaataattaatttcatgggactaaatgaactaatgaggataatattttcataattttttatttgaaattttgctgattctttaaatgtcttgtttcccagatttcaggaaactttttttcttttaagctatccacagcttacagcaatttgataaaatatacttttgtgaacaaaaa

SEQ ID NO: 114398 - DNA, 2451 bp, Homo sapiens
  Payload ID: 2362
  Gene Symbol: CEACAM5
  Gene Name: carcinoembryonic antigen-related cell adhesion molecule 5
  Uniprot ID: P06731
  ENST ID: ENST00000398599
  CDS Start-End: 148-2253
gatgctgagaagtactcctgccctaggaagagactcagggcagagggaggaaggacagcagaccagacagtcacagcagccttgacaaaacgttcctggaactcaagctcttctccacagaggaggacagagcagacagcagagaccatggagtctccctcggcccctccccacagatggtgcatcccctggcagaggctcctgctcacagcctcacttctaaccttctggaacccgcccaccactgccaagctcactattgaatccacgccgttcaatgtcgcagaggggaaggaggtgcttctacttgtccacaatctgccccagcatctttttggctacagctggtacaaaggtgaaagagtggatggcaaccgtcaaattataggatatgtaataggaactcaacaagctaccccagggcccgcatacagtggtcgagagataatataccccaatgcatccctgctgatccagaacatcatccagaatgacacaggattctacaccctacacgtcataaagtcagatcttgtgaatgaagaagcaactggccagttccgggtatacccggagctgcccaagccctccatctccagcaacaactccaaacccgtggaggacaaggatgctgtggccttcacctgtgaacctgagactcaggacgcaacctacctgtggtgggtaaacaatcagagcctcccggtcagtcccaggctgcagctgtccaatggcaacaggaccctcactctattcaatgtcacaagaaatgacacagcaagctacaaatgtgaaacccagaacccagtgagtgccaggcgcagtgattcagtcatcctgaatgtcctctatggcccggatgcccccaccatttcccctctaaacacatcttacagatcaggggaaaatctgaacctctcctgccacgcagcctctaacccacctgcacagtactcttggtttgtcaatgggactttccagcaatccacccaagagctctttatccccaacatcactgtgaataatagtggatcctatacgtgccaagcccataactcagacactggcctcaataggaccacagtcacgacgatcacagtctatgagccacccaaacccttcatcaccagcaacaactccaaccccgtggaggatgaggatgctgtagccttaacctgtgaacctgagattcagaacacaacctacctgtggtgggtaaataatcagagcctcccggtcagtcccaggctgcagctgtccaatgacaacaggaccctcactctactcagtgtcacaaggaatgatgtaggaccctatgagtgtggaatccagaacgaattaagtgttgaccacagcgacccagtcatcctgaatgtcctctatggcccagacgaccccaccatttccccctcatacacctattaccgtccaggggtgaacctcagcctctcctgccatgcagcctctaacccacctgcacagtattcttggctgattgatgggaacatccagcaacacacacaagagctctttatctccaacatcactgagaagaacagcggactctatacctgccaggccaataactcagccagtggccacagcaggactacagtcaagacaatcacagtctctgcggagctgcccaagccctccatctccagcaacaactccaaacccgtggaggacaaggatgctgtggccttcacctgtgaacctgaggctcagaacacaacctacctgtggtgggtaaatggtcagagcctcccagtcagtcccaggctgcagctgtccaatggcaacaggaccctcactctattcaatgtcacaagaaatgacgcaagagcctatgtatgtggaatccagaactcagtgagtgcaaaccgcagtgacccagtcaccctggatgtcctctatgggccggacacccccatcatttcccccccagactcgtcttacctttcgggagcgaacctcaacctctcctgccactcggcctctaacccatccccgcagtattcttggcgtatcaatgggataccgcagcaacacacacaagttctctttatcgccaaaatcacgccaaataataacgggacctatgcctgttttgtctctaacttggctactggccgcaataattccatagtcaagagcatcacagtctctgcatctggaacttctcctggtctctcagctggggccactgtcggcatcatgattggagtgctggttggggttgctctgatatagcagccctggtgtagtttcttcatttcaggaagactgacagttgttttgcttcttccttaaagcatttgcaacagctacagtctaaaattgcttctttaccaaggatatttacagaaaagactctgaccagagatcgagaccatcctagccaacatcgtgaaaccccatctctactaaaaatacaaaaatgagctgggc

SEQ ID NO: 114399 - DNA, 2354 bp, Homo sapiens
  Payload ID: 2362
  Gene Symbol: CEACAM5
  Gene Name: carcinoembryonic antigen-related cell adhesion molecule 5
  Uniprot ID: P06731
  ENST ID: ENST00000405816
  CDS Start-End: 84-2192
agacagtcacagcagccttgacaaaacgttcctggaactcaagctcttctccacagaggaggacagagcagacagcagagaccatggagtctccctcggcccctccccacagatggtgcatcccctggcagaggctcctgctcacagcctcacttctaaccttctggaacccgcccaccactgccaagctcactattgaatccacgccgttcaatgtcgcagaggggaaggaggtgcttctacttgtccacaatctgccccagcatctttttggctacagctggtacaaaggtgaaagagtggatggcaaccgtcaaattataggatatgtaataggaactcaacaagctaccccagggcccgcatacagtggtcgagagataatataccccaatgcatccctgctgatccagaacatcatccagaatgacacaggattctacaccctacacgtcataaagtcagatcttgtgaatgaagaagcaactggccagttccgggtatacccggagctgcccaagccctccatctccagcaacaactccaaacccgtggaggacaaggatgctgtggccttcacctgtgaacctgagactcaggacgcaacctacctgtggtgggtaaacaatcagagcctcccggtcagtcccaggctgcagctgtccaatggcaacaggaccctcactctattcaatgtcacaagaaatgacacagcaagctacaaatgtgaaacccagaacccagtgagtgccaggcgcagtgattcagtcatcctgaatgtcctctatggcccggatgcccccaccatttcccctctaaacacatcttacagatcaggggaaaatctgaacctctcctgccacgcagcctctaacccacctgcacagtactcttggtttgtcaatgggactttccagcaatccacccaagagctctttatccccaacatcactgtgaataatagtggatcctatacgtgccaagcccataactcagacactggcctcaataggaccacagtcacgacgatcacagtctatgcagagccacccaaacccttcatcaccagcaacaactccaaccccgtggaggatgaggatgctgtagccttaacctgtgaacctgagattcagaacacaacctacctgtggtgggtaaataatcagagcctcccggtcagtcccaggctgcagctgtccaatgacaacaggaccctcactctactcagtgtcacaaggaatgatgtaggaccctatgagtgtggaatccagaacgaattaagtgttgaccacagcgacccagtcatcctgaatgtcctctatggcccagacgaccccaccatttccccctcatacacctattaccgtccaggggtgaacctcagcctctcctgccatgcagcctctaacccacctgcacagtattcttggctgattgatgggaacatccagcaacacacacaagagctctttatctccaacatcactgagaagaacagcggactctatacctgccaggccaataactcagccagtggccacagcaggactacagtcaagacaatcacagtctctgcggagctgcccaagccctccatctccagcaacaactccaaacccgtggaggacaaggatgctgtggccttcacctgtgaacctgaggctcagaacacaacctacctgtggtgggtaaatggtcagagcctcccagtcagtcccaggctgcagctgtccaatggcaacaggaccctcactctattcaatgtcacaagaaatgacgcaagagcctatgtatgtggaatccagaactcagtgagtgcaaaccgcagtgacccagtcaccctggatgtcctctatgggccggacacccccatcatttcccccccagactcgtcttacctttcgggagcgaacctcaacctctcctgccactcggcctctaacccatccccgcagtattcttggcgtatcaatgggataccgcagcaacacacacaagttctctttatcgccaaaatcacgccaaataataacgggacctatgcctgttttgtctctaacttggctactggccgcaataattccatagtcaagagcatcacagtctctgcatctggaacttctcctggtctctcagctggggccactgtcggcatcatgattggagtgctggttggggttgctctgatatagcagccctggtgtagtttcttcatttcaggaagactgcatttgcaacagctacagtctaaaattgcttctttaccaaggatatttacagaaaagactctgaccagagatcgagaccatcctagccaacatcgtgaaaccccatctctactaaaaatacaaaaa

SEQ ID NO: 114400 - DNA, 423 bp, Homo sapiens
  Payload ID: 2362
  Gene Symbol: CEACAM5
  Gene Name: carcinoembryonic antigen-related cell adhesion molecule 5
  ENST ID: ENST00000595403
  CDS Start-End: 1-423
ccaagctcactattgaatccacgccgttcaatgtcgcagaggggaaggaggtgcttctacttgtccacaatctgccccagcatctttttggctacagctggtacaaaggtgaaagagtggatggcaaccgtcaaattataggatatgtaataggaactcaacaagctaccccagggcccgcatacagtggtcgagagataatataccccaatgcatccctgctgatccagaacatcatccagaatgacacaggattctacaccctacacgtcataaagtcagatcttgtgaatgaagaagcaactggccagttccgggtatacccggagctgcccaagccctccatctccagcaacaactccaaacccgtggaggacaaggatgctgtggccttcacctgtgaacctgaggctcagaacacaa

SEQ ID NO: 114401 - DNA, 581 bp, Homo sapiens
  Payload ID: 2362
  Gene Symbol: CEACAM5
  Gene Name: carcinoembryonic antigen-related cell adhesion molecule 5
  ENST ID: ENST00000595113
  CDS Start-End: 1-581
taatataccccaatgcatccctgctgatccagaacatcatccagaatgacacaggattctacaccctacacgtcataaagtcagatcttgtgaatgaagaagcaactggccagttccgggtatacccggagctgcccaagccctccatctccagcaacaactccaaacccgtggaggacaaggatgctgtggccttcacctgtgaacctgagactcaggacgcaacctacctgtggtgggtaaacaatcagagcctcccggtcagtcccaggctgcagctgtccaatggcaacaggaccctcactctattcaatgtcacaagaaatgacacagcaagctacaaatgtgaaacccagaacccagtgagtgccaggcgcagtgattcagtcatcctgaatgtcctctcagagccacccaaacccttcatcaccagcaacaactccaaccccgtggaggatgaggatgctgtagccttaacctgtgaacctgagattcagaacacaacctacctgtggtgggtaaataatcagagcctcccggtcagtcccaggctgcagctgtccaatgacaacaggaccctc

SEQ ID NO: 114402 - DNA, 1160 bp, Homo sapiens
  Payload ID: 2362
  Gene Symbol: CEACAM5
  Gene Name: carcinoembryonic antigen-related cell adhesion molecule 5
  ENST ID: ENST00000616453
  CDS Start-End: 84-1124
agacagtcacagcagccttgacaaaacgttcctggaactcaagctcttctccacagaggaggacagagcagacagcagagaccatggagtctccctcggcccctccccacagatggtgcatcccctggcagaggctcctgctcacagcctcacttctaaccttctggaacccgcccaccactgccaagctcactattgaatccacgccgttcaatgtcgcagaggggaaggaggtgcttctacttgtccacaatctgccccagcatctttttggctacagctggtacaaaggtgaaagagtggatggcaaccgtcaaattataggatatgtaataggaactcaacaagctaccccagggcccgcatacagtggtcgagagataatataccccaatgcatccctgctgatccagaacatcatccagaatgacacaggattctacaccctacacgtcataaagtcagatcttgtgaatgaagaagcaactggccagttccgggtatacccggagctgcccaagccctccatctccagcaacaactccaaacccgtggaggacaaggatgctgtggccttcacctgtgaacctgagactcaggacgcaacctacctgtggtgggtaaacaatcagagcctcccggtcagtcccaggctgcagctgtccaatggcaacaggaccctcactctattcaatgtcacaagaaatgacgcaagagcctatgtatgtggaatccagaactcagtgagtgcaaaccgcagtgacccagtcaccctggatgtcctctatgggccggacacccccatcatttcccccccagactcgtcttacctttcgggagcgaacctcaacctctcctgccactcggcctctaacccatccccgcagtattcttggcgtatcaatgggataccgcagcaacacacacaagttctctttatcgccaaaatcacgccaaataataacgggacctatgcctgttttgtctctaacttggctactggccgcaataattccatagtcaagagcatcacagtctctgcatctggaacttctcctggtctctcagctggggccactgtcggcatcatgattggagtgctggttggggttgctctgatatagcagccctggtgtagtttcttcatttcaggaagactg

SEQ ID NO: 114403 - DNA, 1694 bp, Homo sapiens
  Payload ID: 2362
  Gene Symbol: CEACAM5
  Gene Name: carcinoembryonic antigen-related cell adhesion molecule 5
  ENST ID: ENST00000615021
  CDS Start-End: 84-1658
agacagtcacagcagccttgacaaaacgttcctggaactcaagctcttctccacagaggaggacagagcagacagcagagaccatggagtctccctcggcccctccccacagatggtgcatcccctggcagaggctcctgctcacagcctcacttctaaccttctggaacccgcccaccactgccaagctcactattgaatccacgccgttcaatgtcgcagaggggaaggaggtgcttctacttgtccacaatctgccccagcatctttttggctacagctggtacaaaggtgaaagagtggatggcaaccgtcaaattataggatatgtaataggaactcaacaagctaccccagggcccgcatacagtggtcgagagataatataccccaatgcatccctgctgatccagaacatcatccagaatgacacaggattctacaccctacacgtcataaagtcagatcttgtgaatgaagaagcaactggccagttccgggtatacccagagccacccaaacccttcatcaccagcaacaactccaaccccgtggaggatgaggatgctgtagccttaacctgtgaacctgagattcagaacacaacctacctgtggtgggtaaataatcagagcctcccggtcagtcccaggctgcagctgtccaatgacaacaggaccctcactctactcagtgtcacaaggaatgatgtaggaccctatgagtgtggaatccagaacgaattaagtgttgaccacagcgacccagtcatcctgaatgtcctctatggcccagacgaccccaccatttccccctcatacacctattaccgtccaggggtgaacctcagcctctcctgccatgcagcctctaacccacctgcacagtattcttggctgattgatgggaacatccagcaacacacacaagagctctttatctccaacatcactgagaagaacagcggactctatacctgccaggccaataactcagccagtggccacagcaggactacagtcaagacaatcacagtctctgcggagctgcccaagccctccatctccagcaacaactccaaacccgtggaggacaaggatgctgtggccttcacctgtgaacctgaggctcagaacacaacctacctgtggtgggtaaatggtcagagcctcccagtcagtcccaggctgcagctgtccaatggcaacaggaccctcactctattcaatgtcacaagaaatgacgcaagagcctatgtatgtggaatccagaactcagtgagtgcaaaccgcagtgacccagtcaccctggatgtcctctatgggccggacacccccatcatttcccccccagactcgtcttacctttcgggagcgaacctcaacctctcctgccactcggcctctaacccatccccgcagtattcttggcgtatcaatgggataccgcagcaacacacacaagttctctttatcgccaaaatcacgccaaataataacgggacctatgcctgttttgtctctaacttggctactggccgcaataattccatagtcaagagcatcacagtctctgcatctggaacttctcctggtctctcagctggggccactgtcggcatcatgattggagtgctggttggggttgctctgatatagcagccctggtgtagtttcttcatttcaggaagactg

SEQ ID NO: 114404 - DNA, 2228 bp, Homo sapiens
  Payload ID: 2362
  Gene Symbol: CEACAM5
  Gene Name: carcinoembryonic antigen-related cell adhesion molecule 5
  ENST ID: ENST00000617332
  CDS Start-End: 84-2192
agacagtcacagcagccttgacaaaacgttcctggaactcaagctcttctccacagaggaggacagagcagacagcagagaccatggagtctccctcggcccctccccacagatggtgcatcccctggcagaggctcctgctcacagcctcacttctaaccttctggaacccgcccaccactgccaagctcactattgaatccacgccgttcaatgtcgcagaggggaaggaggtgcttctacttgtccacaatctgccccagcatctttttggctacagctggtacaaaggtgaaagagtggatggcaaccgtcaaattataggatatgtaataggaactcaacaagctaccccagggcccgcatacagtggtcgagagataatataccccaatgcatccctgctgatccagaacatcatccagaatgacacaggattctacaccctacacgtcataaagtcagatcttgtgaatgaagaagcaactggccagttccgggtatacccggagctgcccaagccctccatctccagcaacaactccaaacccgtggaggacaaggatgctgtggccttcacctgtgaacctgagactcaggacgcaacctacctgtggtgggtaaacaatcagagcctcccggtcagtcccaggctgcagctgtccaatggcaacaggaccctcactctattcaatgtcacaagaaatgacacagcaagctacaaatgtgaaacccagaacccagtgagtgccaggcgcagtgattcagtcatcctgaatgtcctctatggcccggatgcccccaccatttcccctctaaacacatcttacagatcaggggaaaatctgaacctctcctgccacgcagcctctaacccacctgcacagtactcttggtttgtcaatgggactttccagcaatccacccaagagctctttatccccaacatcactgtgaataatagtggatcctatacgtgccaagcccataactcagacactggcctcaataggaccacagtcacgacgatcacagtctatgcagagccacccaaacccttcatcaccagcaacaactccaaccccgtggaggatgaggatgctgtagccttaacctgtgaacctgagattcagaacacaacctacctgtggtgggtaaataatcagagcctcccggtcagtcccaggctgcagctgtccaatgacaacaggaccctcactctactcagtgtcacaaggaatgatgtaggaccctatgagtgtggaatccagaacgaattaagtgttgaccacagcgacccagtcatcctgaatgtcctctatggcccagacgaccccaccatttccccctcatacacctattaccgtccaggggtgaacctcagcctctcctgccatgcagcctctaacccacctgcacagtattcttggctgattgatgggaacatccagcaacacacacaagagctctttatctccaacatcactgagaagaacagcggactctatacctgccaggccaataactcagccagtggccacagcaggactacagtcaagacaatcacagtctctgcggagctgcccaagccctccatctccagcaacaactccaaacccgtggaggacaaggatgctgtggccttcacctgtgaacctgaggctcagaacacaacctacctgtggtgggtaaatggtcagagcctcccagtcagtcccaggctgcagctgtccaatggcaacaggaccctcactctattcaatgtcacaagaaatgacgcaagagcctatgtatgtggaatccagaactcagtgagtgcaaaccgcagtgacccagtcaccctggatgtcctctatgggccggacacccccatcatttcccccccagactcgtcttacctttcgggagcgaacctcaacctctcctgccactcggcctctaacccatccccgcagtattcttggcgtatcaatgggataccgcagcaacacacacaagttctctttatcgccaaaatcacgccaaataataacgggacctatgcctgttttgtctctaacttggctactggccgcaataattccatagtcaagagcatcacagtctctgcatctggaacttctcctggtctctcagctggggccactgtcggcatcatgattggagtgctggttggggttgctctgatatagcagccctggtgtagtttcttcatttcaggaagactg

SEQ ID NO: 114405 - DNA, 2700 bp, Homo sapiens
  Payload ID: 2363
  Gene Symbol: CEACAM6
  Gene Name: carcinoembryonic antigen-related cell adhesion molecule 6 (non-specific cross reacting antigen)
  Uniprot ID: P40199
  ENST ID: ENST00000199764
  CDS Start-End: 219-1253
aaaagagacagaaatgagaggggaggggatagaggattcctgaacagagaccgcacccatgacccacgtgaccctgggaaatgcttctatccctgagaggaggctcagcacagaaggaggaaggacagcagggccaacagtcacagcagccctgaccagagcattcctggagctcaagctcctctacaaagaggtggacagagaagacagcagagaccatgggacccccctcagcccctccctgcagattgcatgtcccctggaaggaggtcctgctcacagcctcacttctaaccttctggaacccacccaccactgccaagctcactattgaatccacgccgttcaatgtcgcagaggggaaggaggttcttctactcgcccacaacctgccccagaatcgtattggttacagctggtacaaaggcgaaagagtggatggcaacagtctaattgtaggatatgtaataggaactcaacaagctaccccagggcccgcatacagtggtcgagagacaatataccccaatgcatccctgctgatccagaacgtcacccagaatgacacaggattctataccctacaagtcataaagtcagatcttgtgaatgaagaagcaaccggacagttccatgtatacccggagctgcccaagccctccatctccagcaacaactccaaccccgtggaggacaaggatgctgtggccttcacctgtgaacctgaggttcagaacacaacctacctgtggtgggtaaatggtcagagcctcccggtcagtcccaggctgcagctgtccaatggcaacatgaccctcactctactcagcgtcaaaaggaacgatgcaggatcctatgaatgtgaaatacagaacccagcgagtgccaaccgcagtgacccagtcaccctgaatgtcctctatggcccagatgtccccaccatttccccctcaaaggccaattaccgtccaggggaaaatctgaacctctcctgccacgcagcctctaacccacctgcacagtactcttggtttatcaatgggacgttccagcaatccacacaagagctctttatccccaacatcactgtgaataatagcggatcctatatgtgccaagcccataactcagccactggcctcaataggaccacagtcacgatgatcacagtctctggaagtgctcctgtcctctcagctgtggccaccgtcggcatcacgattggagtgctggccagggtggctctgatatagcagccctggtgtattttcgatatttcaggaagactggcagattggaccagaccctgaattcttctagctcctccaatcccattttatcccatggaaccactaaaaacaaggtctgctctgctcctgaagccctatatgctggagatggacaactcaatgaaaatttaaagggaaaaccctcaggcctgaggtgtgtgccactcagagacttcacctaactagagacagtcaaactgcaaaccatggtgagaaattgacgacttcacactatggacagcttttcccaagatgtcaaaacaagactcctcatcatgataaggctcttacccccttttaatttgtccttgcttatgcctgcctctttcgcttggcaggatgatgctgtcattagtatttcacaagaagtagcttcagagggtaacttaacagagtgtcagatctatcttgtcaatcccaacgttttacataaaataagagatcctttagtgcacccagtgactgacattagcagcatctttaacacagccgtgtgttcaaatgtacagtggtccttttcagagttggacttctagactcacctgttctcactccctgttttaattcaacccagccatgcaatgccaaataatagaattgctccctaccagctgaacagggaggagtctgtgcagtttctgacacttgttgttgaacatggctaaatacaatgggtatcgctgagactaagttgtagaaattaacaaatgtgctgcttggttaaaatggctacactcatctgactcattctttattctattttagttggtttgtatcttgcctaaggtgcgtagtccaactcttggtattaccctcctaatagtcatactagtagtcatactccctggtgtagtgtattctctaaaagctttaaatgtctgcatgcagccagccatcaaatagtgaatggtctctctttggctggaattacaaaactcagagaaatgtgtcatcaggagaacatcataacccatgaaggataaaagccccaaatggtggtaactgataatagcactaatgctttaagatttggtcacactctcacctaggtgagcgcattgagccagtggtgctaaatgctacatactccaactgaaatgttaaggaagaagatagatccaattaaaaaaaattaaaaccaatttaaaaaaaaaaagaacacaggagattccagtctacttgagttagcataatacagaagtcccctctactttaacttttacaaaaaagtaacctgaactaatctgatgttaaccaatgtatttatttctgtggttctgtttccttgttccaatttgacaaaacccactgttcttgtattgtattgcccagggggagctatcactgtacttgtagagtggtgctgctttaattcataaatcacaaataaaagccaattagctctataact

SEQ ID NO: 114406 - DNA, 571 bp, Homo sapiens
  Payload ID: 2363
  Gene Symbol: CEACAM6
  Gene Name: carcinoembryonic antigen-related cell adhesion molecule 6 (non-specific cross reacting antigen)
  ENST ID: ENST00000595740
  CDS Start-End: 472-571
taatctgttacctaacagcaggaaagcatgatctcacctgttcttgccctcaagtaggaacactgccctgggactatactgcagaccaccaggctgagccatccccagaggtcaggagcttccaaccgggaacctttcatacactcttcaagcaacgtacagctccaccgacagtcacaataaaaattctaatatcttccctcctcctgttgctgatgtccatggtctctagcagcctgaatccagacaggatcttacgctgtcgcccaagcttggagtacaatggtgcaatcatagctcattacagctcaaactcctgggctcaagcagtcttcctgcctcagtcttccaagaggctcagcacagaaggaggaaggacagcagggccaacagtcacagcagccctgaccagagcattcctggagctcaagctcctctacaaagaggtggacagagaagacagcagagaccatgggacccccctcagcccctccctgcagattgcatgtcccctggaaggaggtcctgctcacagcctcacttctaaccttctggaacccacccaccactg

SEQ ID NO: 114407 - DNA, 2489 bp, Homo sapiens
  Payload ID: 2364
  Gene Symbol: CEACAM7
  Gene Name: carcinoembryonic antigen-related cell adhesion molecule 7
  Uniprot ID: Q14002
  ENST ID: ENST00000006724
  CDS Start-End: 203-1000
gaatgagaggggaggggacagaggactcctgagcagagaccccacccctggaccatgtgatcttggaaagtgctcctgccctgggaggaggctcagcacagaggtaggaaggacagcagagctgacagtcacagcagccctgacaagagagttcctggagcccaagctcttctccacagaggacaagcaggcagcagagaccatggggtccccttcagcctgtccatacagagtgtgcattccctggcaggggctcctgctcacagcctcgcttttaaccttctggaacctgccaaacagtgcccagaccaatattgatgtcgtgccgttcaatgtcgcagaagggaaggaggtccttctagtagtccataatgagtcccagaatctttatggctacaactggtacaaaggggaaagggtgcatgccaactatcgaattataggatatgtaaaaaatataagtcaagaaaatgccccagggcccgcacacaacggtcgagagacaatataccccaatggaaccctgctgatccagaacgtcacccacaatgacgcaggaatctataccctacacgttataaaagaaaatcttgtgaatgaagaagtaaccagacaattctacgtattctcggagccacccaagccctccatcaccagcaacaacttcaatccggtggagaacaaagatattgtggttttaacctgtcaacctgagactcagaacacaacctacctgtggtgggtaaacaatcagagcctcctggtcagtcccaggctgctgctctccactgacaacaggaccctcgttctactcagcgccacaaagaatgacataggaccctatgaatgtgaaatacagaacccagtgggtgccagccgcagtgacccagtcaccctgaatgtccgctatgagtcagtacaagcaagttcacctgacctctcagctgggaccgctgtcagcatcatgattggagtactggctgggatggctctgatatagcagccttggtgtagtttctgcatttcgggaagagtgtttttattatccacctgcagactggactggattcttctagctccttcaatcccattttctcctgtggcatcactaagtataagacctgctctcttcctgaagacctataagctggaggtggacaactcaatgtaaatttcaaggaaaaaccctcatgcctgagatgtgggccactcagagctaaccaaaatgttcaacaccataactagagacactcaaattgccaaccaggacaagaagttgatgacttcatgctgtggacagtttttcccaagatgtcccaagcctcatcgtgacgaggctcttatcccactccatttttccctgctcatgcctgcctctttaatttggtaagataatgctgtaactagaatttcacaatcagcgccttgtgcaggtaatttgacagagtgttggatgtgtcatgtcatcatgtcaaacccaaatatttgacctaagggatcctttattctgcccagtggctaactttaacaacatccctaatacaactgtttattcaaatgcacggtggtccctgttagagttagacctctagactcacctgttctcacgccctgttttaatttaacccagctatgggatgccagataacagaattgctgcctactagctgaacagggaggagtttgtgcagttgctgacacttcttgttgcacataaataaatacagtgggtactatagagactcagttgcaaaaattaacaaatatgctgcttgattaaaatgggtaggcttctcatgtggctcattctttaatctattctcttttatttggtttggttcatggggtctctgcctatggatcatacttcaaactcttggtgtgatcctcctgattgtcacaatattagttaccctggtgtgctgtattctctaaaacctttaaatgtttgcatgcagccattcgtcaaatgtcaaatattctctctttggctggaatgacaaaaactcaaataaatgtatgattaggaggacatcataacctatgaatgatggaagtccaaaatgatggtaactgacagtagtgttaatgccttatgtttagtcaaactctcatttaggtgacagcctggtgactccagaatggagccagtcatgctaaatgccatatactcacactgaaacatgaggaagcaggtagatcccagaacagacaaaattttcctaaaaacatgagagtccaggctgtctgagtcagcacagtaagaaagtcctttctgctttaactcttagaaaaaagtaatatgaagtattctgaaattaaccaatcagtttatttaaatcaatttatttatattcttctgttcctggattcccattttacaaaacccactgttctactgttgtattgcccagtaggagctatcactatattttgcagaatggaaactgccctgactcatgaatcacaaataaaagccaattgtatct

SEQ ID NO: 114408 - DNA, 1236 bp, Homo sapiens
  Payload ID: 2364
  Gene Symbol: CEACAM7
  Gene Name: carcinoembryonic antigen-related cell adhesion molecule 7
  Uniprot ID: Q14002
  ENST ID: ENST00000401731
  CDS Start-End: 106-903
acagaggtaggaaggacagcagagctgacagtcacagcagccctgacaagagagttcctggagcccaagctcttctccacagaggacaagcaggcagcagagaccatggggtccccttcagcctgtccatacagagtgtgcattccctggcaggggctcctgctcacagcctcgcttttaaccttctggaacctgccaaacagtgcccagaccaatattgatgtcgtgccgttcaatgtcgcagaagggaaggaggtccttctagtagtccataatgagtcccagaatctttatggctacaactggtacaaaggggaaagggtgcatgccaactatcgaattataggatatgtaaaaaatataagtcaagaaaatgccccagggcccgcacacaacggtcgagagacaatataccccaatggaaccctgctgatccagaacgtcacccacaatgacgcaggaatctataccctacacgttataaaagaaaatcttgtgaatgaagaagtaaccagacaattctacgtattctcggagccacccaagccctccatcaccagcaacaacttcaatccggtggagaacaaagatattgtggttttaacctgtcaacctgagactcagaacacaacctacctgtggtgggtaaacaatcagagcctcctggtcagtcccaggctgctgctctccactgacaacaggaccctcgttctactcagcgccacaaagaatgacataggaccctatgaatgtgaaatacagaacccagtgggtgccagccgcagtgacccagtcaccctgaatgtccgctatgagtcagtacaagcaagttcacctgacctctcagctgggaccgctgtcagcatcatgattggagtactggctgggatggctctgatatagcagccttggtgtagtttctgcatttcgggaagagtgactggactggattcttctagctccttcaatcccattttctcctgtggcatcactaagtataagacctgctctcttcctgaagacctataagctggaggtggacaactcaatgtaaatttcaaggaaaaaccctcatgcctgagatgtgggccactcagagctaaccaaaatgttcaacaccataactagagacactcaaattgccaaccaggacaagaagttgatgacttcatgctgtggacagtttttcccaagatgtcccaagcctcatcgtgacgaggctcttatcccactcca

SEQ ID NO: 114409 - DNA, 524 bp, Homo sapiens
  Payload ID: 2364
  Gene Symbol: CEACAM7
  Gene Name: carcinoembryonic antigen-related cell adhesion molecule 7
  ENST ID: ENST00000602225
  CDS Start-End: 3-521
ccatggggtccccttcagcctgtccatacagagtgtgcattccctggcaggggctcctgctcacagcctcgcttttaaccttctggaacctgccaaacagtgcccagaccaatattgatgtcgtgccgttcaatgtcgcagaagggaaggaggtccttctagtagtccataatgagtcccagaatctttatggctacaactggtacaaaggggaaagggtgcatgccaactatcgaattataggatatgtaaaaaatataagtcaagaaaatgccccagggcccgcacacaacggtcgagagacaatataccccaatggaaccctgctgatccagaacgtcacccacaatgacgcaggaatctataccctacacgttataaaagaaaatcttgtgaatgaagaagtaaccagacaattctacgtattctatgagtcagtacaagcaagttcacctgacctctcagctgggaccgctgtcagcatcatgattggagtactggctgggatggctctgatatagcag

SEQ ID NO: 114410 - DNA, 1581 bp, Homo sapiens
  Payload ID: 2364
  Gene Symbol: CEACAM7
  Gene Name: carcinoembryonic antigen-related cell adhesion molecule 7
  ENST ID: ENST00000625696
  CDS Start-End: 1-92
atgagtcagtacaagcaagttcacctgacctctcagctgggaccgctgtcagcatcatgattggagtactggctgggatggctctgatatagcagccttggtgtagtttctgcatttcgggaagagtgtttttattatccacctgcagactggactggattcttctagctccttcaatcccattttctcctgtggcatcactaagtataagacctgctctcttcctgaagacctataagctggaggtggacaactcaatgtaaatttcaaggaaaaaccctcatgcctgagatgtgggccactcagagctaaccaaaatgttcaacaccataactagagacactcaaattgccaaccaggacaagaagttgatgacttcatgctgtggacagtttttcccaagatgtcccaagcctcatcgtgacgaggctcttatcccactccatttttccctgctcatgcctgcctctttaatttggtaagataatgctgtaactagaatttcacaatcagcgccttgtgcaggtaatttgacagagtgttggatgtgtcatgtcatcatgtcaaacccaaatatttgacctaagggatcctttattctgcccagtggctaactttaacaacatccctaatacaactgtttattcaaatgcacggtggtccctgttagagttagacctctagactcacctgttctcacgccctgttttaatttaacccagctatgggatgccagataacagaattgctgcctactagctgaacagggaggagtttgtgcagttgctgacacttcttgttgcacataaataaatacagtgggtactatagagactcagttgcaaaaattaacaaatatgctgcttgattaaaatgggtaggcttctcatgtggctcattctttaatctattctcttttatttggtttggttcatggggtctctgcctatggatcatacttcaaactcttggtgtgatcctcctgattgtcacaatattagttaccctggtgtgctgtattctctaaaacctttaaatgtttgcatgcagccattcgtcaaatgtcaaatattctctctttggctggaatgacaaaaactcaaataaatgtatgattaggaggacatcataacctatgaatgatggaagtccaaaatgatggtaactgacagtagtgttaatgccttatgtttagtcaaactctcatttaggtgacagcctggtgactccagaatggagccagtcatgctaaatgccatatactcacactgaaacatgaggaagcaggtagatcccagaacagacaaaattttcctaaaaacatgagagtccaggctgtctgagtcagcacagtaagaaagtcctttctgctttaactcttagaaaaaagtaatatgaagtattctgaaattaaccaatcagtttatttaaatcaatttatttatattcttctgttcctggattcccattttacaaaacccactgttctactgttgtattgcccagtaggagctatcactatattttgcagaatggaaactgccctgactcatgaatcacaaataaaagccaattgtatct

SEQ ID NO: 114411 - DNA, 425 bp, Homo sapiens
  Payload ID: 2364
  Gene Symbol: CEACAM7
  Gene Name: carcinoembryonic antigen-related cell adhesion molecule 7
  ENST ID: ENST00000628153
  CDS Start-End: 1-92
atgagtcagtacaagcaagttcacctgacctctcagctgggaccgctgtcagcatcatgattggagtactggctgggatggctctgatatagcagccttggtgtagtttctgcatttcgggaagagtgactggactggattcttctagctccttcaatcccattttctcctgtggcatcactaagtataagacctgctctcttcctgaagacctataagctggaggtggacaactcaatgtaaatttcaaggaaaaaccctcatgcctgagatgtgggccactcagagctaaccaaaatgttcaacaccataactagagacactcaaattgccaaccaggacaagaagttgatgacttcatgctgtggacagtttttcccaagatgtcccaagcctcatcgtgacgaggctcttatcccactcca

SEQ ID NO: 114412 - DNA, 95 bp, Homo sapiens
  Payload ID: 2364
  Gene Symbol: CEACAM7
  Gene Name: carcinoembryonic antigen-related cell adhesion molecule 7
  ENST ID: ENST00000626565
  CDS Start-End: 1-92
atgagtcagtacaagcaagttcacctgacctctcagctgggaccgctgtcagcatcatgattggagtactggctgggatggctctgatatagcag

SEQ ID NO: 114413 - DNA, 2305 bp, Homo sapiens
  Payload ID: 2365
  Gene Symbol: CEACAM8
  Gene Name: carcinoembryonic antigen-related cell adhesion molecule 8
  Uniprot ID: P31997
  ENST ID: ENST00000244336
  CDS Start-End: 103-1152
agcacaaaaggaggaaggacagcacagctgacagccgtgctcagaaagtttctggatcccaggctcatctccacagaggagaacacgcaggcagcagagaccatggggcccatctcagccccttcctgcagatggcgcatcccctggcaggggctcctgctcacagcctcacttttcaccttctggaacccgcccaccactgctcagctcactattgaagctgtgccatccaatgctgcagaggggaaggaggttcttctacttgtccacaatctgccccaggaccctcgtggctacaactggtacaaaggggaaacagtggatgccaaccgtcgaattataggatatgtaatatcaaatcaacagattaccccagggcctgcatacagcaatcgagagacaatataccccaatgcatccctgctgatgcggaacgtcaccagaaatgacacaggatcctacaccctacaagtcataaagctaaatcttatgagtgaagaagtaactggccagttcagcgtacatccggagactcccaagccctccatctccagcaacaactccaaccccgtggaggacaaggatgctgtggccttcacctgtgaacctgagactcagaacacaacctacctgtggtgggtaaatggtcagagtctcccggtcagtcccaggctgcagctgtccaatggcaacaggaccctcactctactcagtgtcacaaggaatgacgtaggaccctatgaatgtgaaatacagaacccagcgagtgcaaacttcagtgacccagtcaccctgaatgtcctctatggcccagatgcccccaccatttccccttcagacacctattaccatgcaggggtaaatctcaacctctcctgccatgcggcctctaatccaccctcacagtattcttggtctgtcaatggcacattccagcaatacacacaaaagctctttatccccaacatcactacaaagaacagcggatcctatgcctgccacaccactaactcagccactggccgcaacaggaccacagtcaggatgatcacagtctctgatgctttagtacaaggaagttctcctggcctctcagctagagccactgtcagcatcatgattggagtactggccagggtggctctgatatagtagctctggtgtagtttctgcatttcaagaagactggcagacagttgtttttattcttcctcaaagcatttgcaatcagctaccattcaaaattgcttcttcttcaagatttatggaaaatactctgacgagtactcttgaacacaagttcctgataactttaagatcacgccactggactgtctatgaacttgcaaacaggctgatacctttgtgaagttgcccaccaaaacacagaaggaaaaaaacatgaatttcattgaactaaataataatgaggataatgtttttaagatttttttttttttttttttgagatggaatctcgctctgtcgcccaggctggagtgcagtggcacgatctcaactcactgcaagctccgcctcctgggttcacaccattctcctgcctcagcctcctgagtagctgggactacaggcgcctgccacaacgcccggctaattttttgtatttttagtagagacggggtttcactgtggtctcaatctcctgacttcatggtccgcctgcctcagcctcccaaagttctgggattacaggtgtgagccaccgcgcccagcccgtttttaagattttttatttgaaaaattgccaattctttaagtgttttctttttcagatttatgaatttctttatcttttaagctatctataccttactgcaatttggtaaagcagacttttgtgaacaaaaattataacatttacttttgctccctacctgactgccacagaactgggcaactattcatgagtattcatatgtttatggtaattcagttatttgcacaagttcagtgagaatctgctgtctttataatgggatatagtttaaaacattggttatattaccaaggctttgattgggatgttatatttgagaaaatacagagaatgatagattaacggagtgtctaatctatcgtgtcaaccccaaatttttacgtatgagatcctttagtccacccaatggctgacagtaacagcatctttaacacaactctttgttcaaatgtactatggtctcttttagagtcagactcctagactcacttgttctcactgtctgttttaatttaacccaggcatgcaatgctagataataaaattgctccctattggctgatcaga

SEQ ID NO: 114414 - DNA, 544 bp, Homo sapiens
  Payload ID: 2365
  Gene Symbol: CEACAM8
  Gene Name: carcinoembryonic antigen-related cell adhesion molecule 8
  ENST ID: ENST00000599005
  CDS Start-End: 228-383
agacagaaaataaagggaaaggagggacagggaggcaggactgagaggggaggggacagagaggtgtcctgggcacagaccccgcccatgagcctgagaagtgctcctgccccgggaagaggctcagcacaaaaggaggaaggacagcacagctgacagccgtgctcagaaagtttctggatcccaggctcatctccacagaggagaacacgcaggcagcagagaccatggggcccatctcagccccttcctgcagatggcgcatcccctggcaggggctcctgctcacagatgctttagtacaaggaagttctcctggcctctcagctagagccactgtcagcatcatgattggagtactggccagggtggctctgatatagtagctctggtgtagtttctgcatttcaagaagactggcaggtatgatggcctttcctcttgtcctgtttcctgcagggctgaccgccatgcttgggagagagacctgtatcccgggaatggatctcctcctcctcccaataaactcctgcttctcagcact

SEQ ID NO: 114415 - DNA, 1035 bp, Homo sapiens
  Payload ID: 2365
  Gene Symbol: CEACAM8
  Gene Name: carcinoembryonic antigen-related cell adhesion molecule 8
  ENST ID: ENST00000614151
  CDS Start-End: 1-1035
atggggcccctctcagcccctccctgcacacagcgcatcacctggaaggggctcctgctcacagcctcacttttcaccttctggaacccgcccaccactgctcagctcactattgaagctgtgccatccaatgctgcagaggggaaggaggttcttctacttgtccacaatctgccccaggaccctcgtggctacaactggtacaaaggggaaacagtggatgccaaccgtcgaattataggatatgtaatatcaaatcaacagattaccccagggcctgcatacagcaatcgagagacaatataccccaatgcatccctgctgatgcggaacgtcaccagaaatgacacaggatcctacaccctacaagtcataaagctaaatcttatgagtgaagaagtaactggccagttcagcgtacatccggagactcccaagccctccatctccagcaacaactccaaccccgtggaggacaaggatgctgtggccttcacctgtgaacctgagactcagaacacaacctacctgtggtgggtaaatggtcagagtctcccggtcagtcccaggctgcagctgtccaatggcaacaggaccctcactctactcagtgtcacaaggaatgacgtaggaccctatgaatgtgaaatacagaacccagcgagtgcaaacttcagtgacccagtcaccctgaatgtcctctatggcccagatgcccccaccatttccccttcagacacctattaccatgcaggggtaaatctcaacctctcctgccatgcggcctctaatccaccctcacagtattcttggtctgtcaatggcacattccagcaatacacacaaaagctctttatccccaacatcactacaaagaacagcggatcctatgcctgccacaccactaactcagccactggccgcaacaggaccacagtcaggatgatcacagtctctggaagttctcctggcctctcagctagagccactgtcagcatcatgattggagtactggccagggtggctctgatatag

SEQ ID NO: 114416 - DNA, 3958 bp, Homo sapiens
  Payload ID: 2366
  Gene Symbol: CRLS1
  Gene Name: cardiolipin synthase 1
  Uniprot ID: Q9UJA2
  ENST ID: ENST00000378863
  CDS Start-End: 158-1063
tgtataagtggagtgtgctggggtgtgtaaagtagtatggaggcagcggtagcccagtgtctgagtggttgccgggtctccatggagaagcggctcgccagtgtcccaggctgctgagctctcgccgcccgagaccccgcggcgcggccgcagggccatgctagccttgcgcgtggcgcgcggctcgtggggggccctgcgcggcgccgcttgggctccgggaacgcggccgagtaagcgacgcgcctgctgggccctgctgccgcccgtgccctgctgcttgggctgcctggccgaacgctggaggctgcgtccggccgctcttggcttgcggctgcccgggatcggccagcggaaccactgttcgggcgcggggaaggcggctcccaggccagcggccggagcgggcgccgctgccgaagccccgggcggccagtggggcccggcgagcacccccagcctgtatgaaaacccatggacaatcccgaatatgttgtcaatgacgagaattggcttggccccagttctgggctatttgattattgaagaagattttaatattgcactaggagtttttgctttagctggactaacagatttgttggatggatttattgctcgaaactgggccaatcaaagatcagctttgggaagtgctcttgatccacttgctgataaaatacttatcagtatcttatatgttagcttgacctatgcagatcttattccagttccacttacttacatgatcatttcgagagatgtaatgttgattgctgctgttttttatgtcagataccgaactcttccaacaccacgaacacttgccaagtatttcaatccttgctatgccactgctaggttaaaaccaacattcatcagcaaggtgaatacagcagtccagttaatcttggtggcagcttctttggcagctccagttttcaactatgctgacagcatttatcttcagatactatggtgttttacagctttcaccacagctgcatcagcttatagttactatcattatggccggaagactgttcaggtgataaaagactgatgaaagtcatccctcactgttagtaaggaagcagtatacatcaatgggaacagggcccatggaaatgtacaggagtttccctattttggtgttcagcttgaaaaaggacttgtcagaatcaactgtgtcatcaaaatttaagtaatgtgcattgaaaataaggttgatcatgggaatatgcagaatttccaatgtatttttaaatacaaataaaattgtaatttagaatttttaatcttaggtttcttgattaatttataagagatcaattattgtcagtcttttttgtatgttttttaaaaacatagtccagagcatgggcagaattgacacctctcttttaagtgaaatttggattgctcacaaagcactaggaaatgtcatggggttcaaatatatatcctacacaactgggcaatacatttttgtttgatttttaggtctgtgtatacattaacagttcatgtaattaatacctgatcatttgggataatgaaagtgaagttagttgtagatgaagtaaagttataaaagagattaaaaatgcggtaactttttaagataataatcatacagaaggtatgaagttcattttcggtagtcttccaacctctcaggtgcctaataatttatgtttgaggataacaggtaacaaagatagtcgagataggagaacgtgtctattagtctttgcatctaaaaggcagtgagttacgttcctgccttccactgtgtttctgacatagcaatgtttgtttgatattggaacctggattcatattttatgtaaataatatcaagctgtatatttttcaaaggttttttaaactttggagactctttcttttgttaagcagttaaaggaataaaagagctggaaaaaaaattgtaccttcaactcaggttgttccatataacatacgtattctctgctgttacgtaagttttccgattcacagagtccattcatgtacatcacttacacttaaattgtaaaaataattagtctgaccatctgactttaaaagactgttgctacacgtacatcatgtttaggagaatgtgggatatggggaaggggagaagaagacagtccagtggtgactagttgctgctgcttaacctatggcctattgctgcccattgtccctggttttaatccaagcctattatggaatactgcagtgagattatccattctcagcctgttgagctgcattaaattagaatgggaggctgtaagtaaaactcatgcctcttggccaggcattctgcaccagcgtgtccctctgtggcttgctggtcctggttgttctcagactggcagctgagctgcgcttggcttgaagcatactgaagcctgcagccagggacaccgccattgaatcagatggagggggatgaaaaagcagagaagggggcatgtggctggctattcttgctctctggagaacagcttcattgttaggagtagttaggctgaaagtggacttcccactgctgagccacccaagaggcacactgagcattagtgacgggtgagccacataagaataatgtttaaaaaagagaggacttgaagtagctatgcgaaaatttagaactttgcactttgttaacgcttatttatggtttagtgttgatgccatttggagtgacctatgggttggacccatatctttttattattaaggtctcaatctggctctggttaataaacgtttcccgcttcatcccttaggaaaatggtccaagtctcctcaggcttttggatactgaattgttataaaacacatcaattctgccagtttataaaacactggaattgtattagacatgtctgagtatgtacttgtttatagactcaaaacatgatgaaaattcatttcattgtcttcactgaatagacttaaccttgacagtaagcttaaagcattagtgtcatttaattacatgtctgaggaatttatgctaactagattttgggcttttgcagcgaattttagtcggggcctcattcctgagcccaagtgaccctttcacctcagcttcccaagtagctgggattacaggtgcacaccaactgtgctttgcagttttgtttgtgtgtgtgtgtgtgtgtgtgtgtgtgtgtgtgtgtgtgtgtattttgttttttttacaagcccacaacatcatagctttgcagtttttaaccaggagctggtggagatctttgaaatcatttaggccaattcttttagttacatttatgatgaaactagggatctaccttaaagttttgggaagctctttcaaaacttcagacacctagaaatatatatagtgcagttcagttttagtttctgcagcatggtttggaaacaaaagatacataggatttaaactcgatttgttttcttcttacagtagaagtaaatgctcttgtggcttgaatcgcatctcccaagaaagatacgttcacgttcaaacccccagtactgtacatgtgaccttatttggaaatagggtctttttagatgcagtcaagatagaattagatcatactggattacagtgggccccaataactaggtttttttgttaaaaaaaaaaaaaaaggaaatgtgaacagagagagaatgccgtgagatgatggagggatagattggaatgatgtctgcgagctaaggaatactgaggattgctgccaaccatccgaagctgggagaggagatggaacaactccctcggagcctccaagaggaaccaaccccactgatgctttgatttgggatttccggcctgaactgtaggaaaataaatttctgttcttttaagccatttttaccagtttgtggtaacttgttacagcagctgcaggaaattaataaatgccaatgttgaaaattaaaa

SEQ ID NO: 114417 - DNA, 994 bp, Homo sapiens
  Payload ID: 2366
  Gene Symbol: CRLS1
  Gene Name: cardiolipin synthase 1
  Uniprot ID: Q9UJA2
  ENST ID: ENST00000378868
  CDS Start-End: 151-759
agttgtacagcatgggttgaggtggccagatcctggcaggggtctcaactccactgatagctaaagcatgttggggtttgaatgctggatactttgaagttgccatatcctgactgaagtccttcccagaacggcagtagttggtcgagtatgccacagtatgaaaacccatggacaatcccgaatatgttgtcaatgacgagaattggcttggccccagttctgggctatttgattattgaagaagattttaatattgcactaggagtttttgctttagctggactaacagatttgttggatggatttattgctcgaaactgggccaatcaaagatcagctttgggaagtgctcttgatccacttgctgataaaatacttatcagtatcttatatgttagcttgacctatgcagatcttattccagttccacttacttacatgatcatttcgagagatgtaatgttgattgctgctgttttttatgtcagataccgaactcttccaacaccacgaacacttgccaagtatttcaatccttgctatgccactgctaggttaaaaccaacattcatcagcaaggtgaatacagcagtccagttaatcttggtggcagcttctttggcagctccagttttcaactatgctgacagcatttatcttcagatactatggtgttttacagctttcaccacagctgcatcagcttatagttactatcattatggccggaagactgttcaggtgataaaagactgatgaaagtcatccctcactgttagtaaggaagcagtatacatcaatgggaacagggcccatggaaatgtacaggagtttccctattttggtgttcagcttgaaaaaggacttgtcagaatcaactgtgtcatcaaaatttaagtaatgtgcattgaaaataaggttgatcatgggaatatgcagaatttccaatgtatttttaaatacaaataaaattgtaatttagaatttttaa

SEQ ID NO: 114418 - DNA, 3859 bp, Homo sapiens
  Payload ID: 2366
  Gene Symbol: CRLS1
  Gene Name: cardiolipin synthase 1
  ENST ID: ENST00000452938
  CDS Start-End: 155-772
ataagtggagtgtgctggggtgtgtaaagtagtatggaggcagcggtagcccagtgtctgagtggttgccgggtctccatggagaagcggctcgccagtgtcccaggctgctgagctctcgccgcccgagaccccgcggcgcggccgcagggccatgctagccttgcgcgtggcgcgcggctcgtggggggccctgcgcggcgccgcttgggctccgggaacgcggccgagtaagcgacgcgcctgctgggccctgctgccgcccgtgccctgctgcttgggctgcctggccgaacgctggaggctgcgtccggccgctcttggcttgcggctgcccgggatcggccagcggaaccactgttcgggcgcggggaaggcggctcccaggccagcggccggagcgggcgccgctgccgaagccccgggcggccagtggggcccggcgagcacccccagcctgtatgaaaacccatggacaatcccgaatatgttgtcaatgacgagaattggcttggccccagttctgggctatttgattattgaagaagattttaatattgcactaggagtttttgctttagctggactaacagatttgttggatggatttattgctcgaaactgggccaatcaaagatcagctttgggaagtgctcttgatccacttgctgataaaatacttatcagtatcttatatgttagcttgacctatgcagatcttattccagcgaacacttgccaagtatttcaatccttgctatgccactgctaggttaaaaccaacattcatcagcaaggtgaatacagcagtccagttaatcttggtggcagcttctttggcagctccagttttcaactatgctgacagcatttatcttcagatactatggtgttttacagctttcaccacagctgcatcagcttatagttactatcattatggccggaagactgttcaggtgataaaagactgatgaaagtcatccctcactgttagtaaggaagcagtatacatcaatgggaacagggcccatggaaatgtacaggagtttccctattttggtgttcagcttgaaaaaggacttgtcagaatcaactgtgtcatcaaaatttaagtaatgtgcattgaaaataaggttgatcatgggaatatgcagaatttccaatgtatttttaaatacaaataaaattgtaatttagaatttttaatcttaggtttcttgattaatttataagagatcaattattgtcagtcttttttgtatgttttttaaaaacatagtccagagcatgggcagaattgacacctctcttttaagtgaaatttggattgctcacaaagcactaggaaatgtcatggggttcaaatatatatcctacacaactgggcaatacatttttgtttgatttttaggtctgtgtatacattaacagttcatgtaattaatacctgatcatttgggataatgaaagtgaagttagttgtagatgaagtaaagttataaaagagattaaaaatgcggtaactttttaagataataatcatacagaaggtatgaagttcattttcggtagtcttccaacctctcaggtgcctaataatttatgtttgaggataacaggtaacaaagatagtcgagataggagaacgtgtctattagtctttgcatctaaaaggcagtgagttacgttcctgccttccactgtgtttctgacatagcaatgtttgtttgatattggaacctggattcatattttatgtaaataatatcaagctgtatatttttcaaaggttttttaaactttggagactctttcttttgttaagcagttaaaggaataaaagagctggaaaaaaaattgtaccttcaactcaggttgttccatataacatacgtattctctgctgttacgtaagttttccgattcacagagtccattcatgtacatcacttacacttaaattgtaaaaataattagtctgaccatctgactttaaaagactgttgctacacgtacatcatgtttaggagaatgtgggatatggggaaggggagaagaagacagtccagtggtgactagttgctgctgcttaacctatggcctattgctgcccattgtccctggttttaatccaagcctattatggaatactgcagtgagattatccattctcagcctgttgagctgcattaaattagaatgggaggctgtaagtaaaactcatgcctcttggccaggcattctgcaccagcgtgtccctctgtggcttgctggtcctggttgttctcagactggcagctgagctgcgcttggcttgaagcatactgaagcctgcagccagggacaccgccattgaatcagatggagggggatgaaaaagcagagaagggggcatgtggctggctattcttgctctctggagaacagcttcattgttaggagtagttaggctgaaagtggacttcccactgctgagccacccaagaggcacactgagcattagtgacgggtgagccacataagaataatgtttaaaaaagagaggacttgaagtagctatgcgaaaatttagaactttgcactttgttaacgcttatttatggtttagtgttgatgccatttggagtgacctatgggttggacccatatctttttattattaaggtctcaatctggctctggttaataaacgtttcccgcttcatcccttaggaaaatggtccaagtctcctcaggcttttggatactgaattgttataaaacacatcaattctgccagtttataaaacactggaattgtattagacatgtctgagtatgtacttgtttatagactcaaaacatgatgaaaattcatttcattgtcttcactgaatagacttaaccttgacagtaagcttaaagcattagtgtcatttaattacatgtctgaggaatttatgctaactagattttgggcttttgcagcgaattttagtcggggcctcattcctgagcccaagtgaccctttcacctcagcttcccaagtagctgggattacaggtgcacaccaactgtgctttgcagttttgtttgtgtgtgtgtgtgtgtgtgtgtgtgtgtgtgtgtgtgtgtgtattttgttttttttacaagcccacaacatcatagctttgcagtttttaaccaggagctggtggagatctttgaaatcatttaggccaattcttttagttacatttatgatgaaactagggatctaccttaaagttttgggaagctctttcaaaacttcagacacctagaaatatatatagtgcagttcagttttagtttctgcagcatggtttggaaacaaaagatacataggatttaaactcgatttgttttcttcttacagtagaagtaaatgctcttgtggcttgaatcgcatctcccaagaaagatacgttcacgttcaaacccccagtactgtacatgtgaccttatttggaaatagggtctttttagatgcagtcaagatagaattagatcatactggattacagtgggccccaataactaggtttttttgttaaaaaaaaaaaaaaaggaaatgtgaacagagagagaatgccgtgagatgatggagggatagattggaatgatgtctgcgagctaaggaatactgaggattgctgccaaccatccgaagctgggagaggagatggaacaactccctcggagcctccaagaggaaccaaccccactgatgctttgatttgggatttccggcctgaactgtaggaaaataaatttctgttcttttaagccatttttaccagtttgtggtaacttgttacagcagctgcaggaaattaataaatgccaatgttg

SEQ ID NO: 114419 - DNA, 12847 bp, Homo sapiens
  Payload ID: 2367
  Gene Symbol: CMYA5
  Gene Name: cardiomyopathy associated 5
  Uniprot ID: Q8N3K9
  ENST ID: ENST00000446378
  CDS Start-End: 32-12241
ctccggccccggcccaggcccgggagaggcgatggcgagccgcgatagcaaccacgctggcgagagctttctcggctccgacggggacgaggaggcgacccgggagctggagaccgaggaggagtcggagggcgaggaggacgagacggcggcggagtcggaggaggagccggactccaggttatcagaccaggatgaagagggaaagatcaagcaggagtatatcatatctgacccctccttttccatggtgacagtccaaagggaagatagtgggataacctgggaaaccaattcaagtagatcttctactccttgggcttcagaagaaagtcagacttctggtgtgtgtagtcgggaagggtcaactgtgaattctcctcctggaaatgtttcctttattgtggatgaagtgaaaaaggttcggaaaaggactcataagtcaaagcatggttcaccatcattacgccggaaaggcaacagaaaaagaaattcttttgaatcccaagatgttccaacaaacaaaaaaggcagtcctttaacttcagcaagccaggtactaaccacggagaaagagaagtcatatactggcatttatgataaagcaagaaaaaagaagaccacttcaaatacacctccgattactggggcaatatacaaagaacacaagccattagtgttaagaccagtctacataggaacagtacaatataaaattaagatgtttaattcggttaaagaagaattaattcctctacaattttatggaacattgccaaagggttatgtaattaaagaaatacattataggaaagggaaagatgcatccattagtctagagccagatttggacaatagtggttctaatacagtgtccaaaacacgcaaattagtagcccaaagcatagaggataaagtaaaagaggtttttccaccctggagaggcgcactctccaaaggatcagagtccctaaccttaatgttcagtcatgaagatcaaaagaaaatttatgctgattctcccctaaatgccacatctgcattggagcacacagttccctcttattcaagtagtggcagagcagaacaaggaatacagctcaggcattcacagtcagtgccacaacagccagaagatgaagcaaaaccacatgaagtggaacctccatctgtgacacccgacacacctgcaactatgttcctgagaacaacaaaggaagaatgtgagcttgcttcaccaggaactgcagcttcagagaatgactcttcagtctcaccatcatttgctaatgaggtaaagaaggaagatgtgtattctgctcaccattccatttctctggaggcagcgtcaccaggtctggcagcatctacccaggatggtttggacccagaccaagaacagccggacctgacttcaatagaaagggcagaaccagtctccgcaaaactgacccctacccatcccagtgtcaaaggagagaaggaggaaaacatgcttgagccatccatttctctttctgaacctctaatgttagaagaaccagagaaagaagaaatagaaacttccctacccatagctattacccctgaacctgaagattctaatttagtagaagaagagatcgtagaacttgattacccagaaagcccattggtttccgagaagcccttcccaccacatatgtcccctgaagtggagcacaaagaagaagagcttattctaccattattggcagcatcatctcctgaacatgttgctttgtctgaggaagaaagagaggaaattgcatctgtttctactggttctgcttttgtatcagagtattcagtaccacaggatttgaaccatgaattacaggagcaagaaggtgagccagttcccccatccaatgtagaagctatagctgaacatgcagttttgtcagaagaagagaatgaggaatttgaggcttattccccagctgcagcccctacatctgagagctctctctcaccatccacaactgagaagacttcagagaaccagtctccactgttttcaacagttacaccagaatacatggtcctatcaggagacgaggcctcagaaagtgggtgttacacaccagactccacatctgcttctgaatattcagttccatcactggcaacaaaagagtcactgaagaaaacaattgaccgtaagtccccgttaatattgaaaggtgtttctgagtacatgattccatcagaagagaaggaagacactggatcgtttactccagctgtggcccctgcttctgagccctctctctcaccatccacaaccgaaaagacttctgaatgccagtcaccactgccttctactgccacatcagaacacgtggtcccatcagaaggagaggacctaggaagtgaacgtttcacaccggattcaaagttgatctccaaatatgcagccccactcaatgcaacacaggaatctcaaaagaaaataatcaatgaggcatcccaattcaaaccaaaaggtatttctgagcacacagttctgtcagtagacggcaaggaggtcattggaccatcttccccagatttggttgttgcatctgaacactctttcccaccacacacaaccgagatgacttctgaatgccaggccccaccactttcagccaccccatctgaatatgttgttctatcagacgaagaggcagtcgagttggaacgatacacaccctcttctacatctgcttctgaattttcagtaccaccatatgcaacaccggaggcacaggaggaagaaattgtccatagatctctaaatctaaaaggtgcatcctcacccatgaatttatcagaagaagatcaagaagacattggacctttttctccagattctgcatttgtgtcagaattctcatttccaccgtatgcaacccaggaagcagagaaaagagaatttgagtgcgattctccaatatgtttaacatcaccatctgagcacactattttgtcagatgaagacactgaagaagcggaactgttctctccagactcagcatcacaagtttcaatccctccctttagaatctcagaaacagagaaaaatgaacttgagcctgattcactattaactgcagtgtctgcttcaggttattcctgcttttcagaagcagatgaggaagacattggatccacagctgctacacctgtatctgagcagttcagttcatcacagaagcaaaaagctgaaactttccctttgatgtctccgcttgaagacttaagtctgccgccttcaacagataaatcagagaaagcagaaattaagccagagattccaacaacctcaacatctgtatctgaatatctcattttggcacagaagcagaaaactcaagcatatttagagcctgagtctgaagacttgattccttcacatttaaccagtgaagtggagaagggagaaagggaggcaagttcatcagtagctgcaatacctgctgctttacctgcacaatcatctatagtaaaggaagaaaccaaacctgcatctccacattcagttttacctgattcagtccctgcaatcaagaaagaacaggaacccacagcagcactcactctaaaagctgcagatgaacagatggctttgtcaaaagtcagaaaggaagaaattgtgcctgattctcaagaagctacagcacatgtatcacaggatcaaaaaatggagcctcagcctccaaatgttccagagtctgagatgaaatattcagttttgcctgacatggtagatgagccaaagaagggtgtcaagcccaaattagttctaaatgtgacttctgaactagaacagagaaagttgtccaagaatgagcctgaagtaataaaaccatattcacctctaaaggaaacatctttatctggacctgaggctttatcagcagtgaaaatggagatgaaacatgattccaaaataacaactacacctatagtgcttcattcagcttcctcaggagtggaaaagcaagttgaacatggtccacctgcactagcattttcagctttgtcagaagaaattaaaaaagaaattgaacccagttcctcaacaactacagcatctgtaactaagcttgattcaaacttaaccagagcagtaaaagaagaaatcccaacagattcatctcttatcactcctgtagatcgtccagtcttaacaaaagtaggaaagggtgaattaggaagtggtttgccaccactggtaacatctgcagatgaacattcagttcttgcagaagaagacaaggtggcaattaaaggtgcttctcccattgaaacttcatccaaacatttagcttggtcagaagcagagaaggaaattaaatttgattcacttccaagtgtctcctctatagcagagcattctgttttgtcagaagtagaagccaaagaagttaaagctgggttgccagtaatcaaaacatcatcttctcagcattcagataaatctgaggaagcaagggtagaagacaaacaagatcttttattttctacagtctgtgactctgaacgtttggtttcatcacagaagaagagcttgatgtctacctcagaggtgttagagcctgaacatgagcttccactcagcctatggggtgagataaagaagaaagaaactgaacttccttcatcacaaaatgtgtcacctgcatccaaacatataatcccaaaaggcaaagatgaggaaacagcaagttcatctcctgagttggaaaatttagcatcaggtttagccccaacattactgctcctcagtgatgataagaacaaaccggcagtggaggtatcttctacagctcagggagacttcccatcagaaaaacaagatgttgctttggcagagctgtctttggaacctgagaagaaagacaagccacaccaaccgttggaattaccaaatgctgggtcagaattttctagtgatttaggtagacaaagtggatccataggtacaaaacaagcaaagtctcccataactgaaacagaggattctgttttagaaaaaggcccagctgagcttaggagcagagaaggaaaagaagaaaatagagagctttgtgcatcttctacgatgcctgcaatttcagagctttcatcattgcttagggaggaatctcagaatgaagaaattaaacctttctctcccaagatcatcagcctagagtcgaaagaaccacctgcctctgtagctgaaggaggcaacccagaagaatttcagccatttactttttctttaaaaggattatcagaggaggttagccatccagccgactttaaaaagggaggaaatcaagaaataggcccattaccaccaactggaaatttgaaggcacaagtcatgggagatattttagataagctaagtgaagaaacaggccacccaaattcatcccaggtactccagagtataacagaaccatcaaagattgctccttctgacctccttgtagaacaaaaaaagacagaaaaagcacttcattcagatcaaactgttaaattacctgatgtaagcacctcttctgaagataaacaagatctgggtattaagcagttttcacttatgagagagaatttgcctttggaacaatcaaaatcatttatgacaaccaagcctgcggatgtcaaagaaacaaaaatggaagaattctttatttctccaaaggatgaaaactggatgttgggaaagccagaaaatgtggctagtcaacacgaacagagaatagcaggatctgtgcagctggattcctctagcagcaatgagctgaggccagggcagctcaaggctgctgtgtccagtaaggaccatacatgtgaagtgagaaagcaggtcctgccgcattctgctgaagaatctcatttgtcatcacaagaagcagtatctgctcttgatacttccagtggtaatacagagaccttatcaagtaaaagttactcttctgaagaagtaaagctggctgaagaaccaaagtctttagtcctagctggaaatgtagagagaaacatagcagaggggaaggagattcattctttgatggagagtgaaagtttgctattggagaaagcaaacacagagctttcctggccttccaaagaagatagccaggaaaaaattaaactacctcctgaaagattcttccagaaaccagtgtctggcctatcagtggaacaggtgaagtcagaaacaatctcctcttctgtcaaaacagcccatttcccggcagaaggtgtggaacctgcattgggcaatgaaaaagaagcacacaggagcacacctccttttcctgaagagaagccattggaagaatcaaaaatggttcagtcaaaggttattgatgatgctgatgagggaaagaaaccatcacctgaagtaaaaatacccacacaaagaaaacccatctcctcaatccatgcaagagagcctcaatccccagagtcacctgaggtgacacaaaatccacctacacaaccaaaggtggctaagccggaccttcctgaggaaaagggaaagaaaggaatttcatctttcaaatcgtggatgtccagcttgttttttggatcgagcactccagataacaaagttgctgaacaagaagacttagaaacacagccaagtccatccgtagaaaaagcagtgactgtgatagatcctgaaggtacaattcccaccaattttaatgtagctgagaaaccagctgatcattcattatcagaggtaaaacttaaaactgctgatgaacccagaggtactttagtaaaatctggtgacggtcaaaacgttaaagaaaaatccatgattttatcaaatgtagaagatttacaacagccaaaattcatttctgaggtgtctagggaagattatggaaaaaaagaaatctcaggcgattcagaggaaatgaacataaactcagtagttacttctgctgatggtgagaaccttgaaattcaatcttattcactaatcggtgagaaattggttatggaagaagccaaaactattgttcctcctcatgttactgatagtaaaagagtccagaagccagcaatcgctcctccatctaaatggaatatttctatttttaaggaagagccaagaagtgatcaaaaacaaaaatcactcctttcatttgatgtagtagataaggtgccacaacagccaaaatcagcttcctccaactttgcaagtaaaaatatcacaaaggaatcagagaaaccagagtcaattattttgccagtagaagaatcaaaaggcagtttaattgatttcagtgaagacagactcaagaaagaaatgcaaaatcctacttccttgaaaatttctgaagaggaaacaaaactcaggtctgttagtccaactgagaagaaagataatttggaaaacagatcatataccttggcagaaaagaaggtgctggcagaaaaacaaaactctgtggccccattagagcttagagatagtaatgaaatagggaagacacaaattacacttggatctagatctactgaactgaaagaatcaaaagccgatgctatgccacagcacttctatcaaaatgaagactacaatgaaagacccaaaatcattgttggttctgaaaaggagaaaggtgaagaaaaagaaaatcaggtatatgtgctttcagaaggaaagaagcagcaggaacatcagccttattctgtgaatgtagccgagtctatgagtagagaatcagatatctctttaggtcattctttgggtgaaactcaatcattttcattagttaaagctacatcagttactgaaaaatcagaagccatgctcgcagaggctcacccagaaatcagagaagcaaaggcagtaggaacccaaccacatcctttagaagaaagtaaagttttggtggagaaaaccaagactttcctgccggtggctctttcttgtcgtgatgaaatagagaaccactctttatctcaggaaggaaatctagtattagaaaagtcaagcagagatatgccagatcacagtgaagaaaaagaacagttcagagagtcagagctatcgaaaggcggttcagtagatatcacaaaagaaactgtgaaacaaggatttcaagaaaaggcagtaggaacccaaccacgtcctttagaagaaagtaaagttttggtggagaaaactaagactttcctgccagtggttctttcttgtcatgatgaaatagagaaccactctttgtctcaggaaggaaatctagtgttagaaaagtcaagcagagatatgccagatcacagtgaagaaaaagaacagttcaaagagtcagagctatggaaaggtggttcagtagatatcacaaaagaaagtatgaaagaaggatttccatctaaagaatccgaaaggactttagctcgtccttttgatgaaactaagagctcagaaacaccgccatatttgctgtcacctgtaaaaccacaaactcttgcttcaggagcttctccagaaattaacgcagtgaagaaaaaagaaatgccacgatcagaattgactccagaaaggcatacagttcatactattcagacatctaaagatgacacatccgatgtgcctaaacaatctgttcttgtttcaaagcaccacttggaggctgcggaagatacccgtgtaaaggaaccactgtcttcagcaaaaagcaactatgctcaatttatatctaatacatcagcaagcaatgctgataaaatggtttctaataaagaaatgcccaaggaacctgaagacacatatgcaaaaggtgaagactttacagtgactagtaagccagccggactttcagaagatcagaagactgcctttagtatcatttctgaaggctgtgagatattgaatattcatgctccggcctttatttcttcaatcgatcaggaagaaagtgaacaaatgcaagataaattagaatatttggaagagaaagcctcatttaaaaccataccactccctgatgatagtgaaacagttgcttgtcataaaacattaaagagcaggttagaagatgaaaaagttaccccattgaaagaaaataaacaaaaggaaactcataagacaaaagaagagatatccacagattcagaaactgatttatcatttattcagcccacaattcccagtgaagaggattattttgaaaaatatactttgattgattataacatctccccagacccagaaaaacagaaagctccacagaaattaaatgttgaagagaaactctcaaaggaagttacagaagaaactatctctttcccagtaagttcagtggaaagtgcactagaacatgaatatgacttggtgaaattagatgaaagtttttatggaccagaaaagggccacaacatattatctcatccagagacccaaagccaaaactcagctgacaggaatgtttcaaaggacacaaagagagatgtggactcaaagtcaccggggatgcctttatttgaagcagaggaaggagttctatcacgaacccagatatttcctaccactattaaagtcattgatccagaatttctggaggagccacctgcacttgcatttttatataaggatctgtatgaagaagcagttggagagaaaaagaaggaagaggagacagcttctgaaggtgacagtgtgaattctgaggcatcatttcccagcagaaattctgacactgatgatggaacaggaatatattttgagaagtacatactcaaagatgacattctccatgacacatctctaactcaaaaggaccagggccaaggtctggaagaaaaacgagttggtaaggatgattcataccaaccgatagctgcagaaggggaaatttggggaaagtttggaactatttgcagggagaagagtctggaagaacagaaaggtgtttatggggaaggagaatcagtagaccatgtggagaccgttggtaacgtagcgatgcagaagaaagctcccatcacagaggacgtcagagtggctacccagaaaataagttatgcggttccatttgaagacacccatcatgttctggagcgtgcagatgaagcaggcagtcacggtaatgaagtcggaaatgcaagtccagaggtcaatctgaatgtcccagtacaagtgtccttcccggaggaagaatttgcatctggtgcaactcatgttcaagaaacatcactagaagaacctaaaatcctggtcccacctgagccaagtgaagagaggctccgtaatagccctgttcaggatgagtatgaatttacagaatccctgcataatgaagtggttcctcaagacatattatcagaagaactgtcttcagaatccacacctgaagatgtcttatctcaaggaaaggaatcctttgagcacatcagtgaaaatgaatttgcgagtgaggcagaacaaagtacacctgctgaacaaaaagagttgggcagcgagaggaaagaagaagaccaattatcatctgaggtagtaactgaaaaggcacaaaaagagctgaaaaagtcccagattgacacatactgttacacctgcaaatgtccaatttctgccactgacaaggtgtttggcacccacaaagaccatgaagtttcaacgcttgacacagctataagtgctgtaaaggttcaattagcagaatttctagaaaatttacaagaaaagtccttgaggattgaagcctttgttagtgagatagaatccttttttaataccattgaggaaaactgtagtaaaaatgagaaaaggctagaagaacagaatgaggaaatgatgaagaaggttttagcacagtatgatgagaaagcccagagctttgaggaagtgaagaagaagaagatggagttcctgcatgagcagatggtccactttctgcagagcatggacactgccaaagacaccctggagaccatcgtgagagaagcagaggagcttgatgaggccgtcttcctgacttcgtttgaggaaatcaatgaaaggttgctttctgcaatggagagcactgcttctttagagaaaatgcctgctgcgttttcccttttcgaacattatgatgacagctcggcaagaagtgaccagatgttaaaacaagtggctgttccacagcctcctagattagaacctcaggaaccaaattctgccaccagcacaacaattgcagtttactggagcatgaacaaggaagatgtcattgattcatttcaggtttactgcatggaggagccacaagatgatcaagaagtaaatgagttggtagaagaatacagactgacagtgaaagaaagctactgcatttttgaagatctggaacctgaccgatgctatcaagtgtgggtgatggctgtgaacttcactggatgtagcctgcccagtgaaagggccatctttaggacagcaccctccacccctgtgatccgcgctgaggactgtactgtgtgttggaacacagccactatccgatggcggcccaccaccccagaggccacggagacctacactctggagtactgcagacagcactctcctgagggagagggcctcagatctttctctggaatcaaaggactccagctgaaagttaacctccaacccaatgataactactttttctatgtgagggccatcaatgcatttgggacaagtgaacagagtgaagctgctctcatctccaccagaggaaccagatttctcttgttgagagaaacagctcatcctgctctacacatttcctcaagtgggacagtgatcagctttggtgagaggagacggctgacggaaatcccgtcagtgctgggtgaggagctgccttcctgtggccagcattactgggaaaccacagtcacagactgcccagcatatcgactcggcatctgctccagctcggctgtgcaggcaggtgccctaggacaaggggagacctcatggtacatgcactgctctgagccacagagatacacatttttctacagtggtattgtgagtgatgttcatgtgactgagcgtccagccagagtgggcatcctgctggactacaacaaccagagacttatcttcatcaacgcagagagcgagcagttgctcttcatcatcaggcacaggtttaatgagggtgtccaccctgcctttgccctggagaaacctggaaaatgtactttgcacctggggatagagcccccggattctgtaaggcacaagtgatccttggctttcagaatttgcaagaacagcgatttgaattttgggggggtctgctgttcattcctttaggtgctatacattattcaaaaagtctcccgcgcatttgcactaatgatggctgcatgcatagcaatcagcatgtgagcaaaatcgacaagaaaaccttgactttacagagcagtgtgtgagtaaacagaatgaaaacaacaacctccactctttagtttatataagtttgagttctttcctaaattaaaagatctacacttgagttgggaaccgaaagagaaaaatggacttccatctgttttactggtaaaggaaatcctctgatggacaggtcagagtgaaggaaggttgtgctggtaagacatctctgacgaagagccatggatgctttccacaaaatgtcacctcgctgcactaaaggatgatgaatcctaatcattaaaggaattgtttcagctgatttaaatttataatgaactcttttgtaataatgtatactgtagaacatgagtctctcctccctaaaattttaaatgtagaaaagtgctatatattagaaatttccattttgttaaataaatggttagagtctataaa

SEQ ID NO: 114420 - DNA, 1664 bp, Homo sapiens
  Payload ID: 2368
  Gene Symbol: CTF1
  Gene Name: cardiotrophin 1
  Uniprot ID: Q16619
  ENST ID: ENST00000279804
  CDS Start-End: 38-643
ggggcgtgaagggagccgggatcagccaggggccagcatgagccggagggagggaagtctggaagacccccagactgattcctcagtctcacttcttccccacttggaggccaagatccgtcagacacacagccttgcgcacctcctcaccaaatacgctgagcagctgctccaggaatatgtgcagctccagggagaccccttcgggctgcccagcttctcgccgccgcggctgccggtggccggcctgagcgccccggctccgagccacgcggggctgccagtgcacgagcggctgcggctggacgcggcggcgctggccgcgctgcccccgctgctggacgcagtgtgtcgccgccaggccgagctgaacccgcgcgcgccgcgcctgctgcgccgcctggaggacgcggcgcgccaggcccgggccctgggcgccgccgtggaggccttgctggccgcgctgggcgccgccaaccgcgggccccgggccgagccccccgccgccaccgcctcagccgcctccgccaccggggtcttccccgccaaggtgctggggctccgcgtttgcggcctctaccgcgagtggctgagccgcaccgagggcgacctgggccagctgctgcccgggggctcggcctgagcgccgcggggcagctcgccccgcctcctcccgctgggttccgtctctccttccgcttctttgtctttctctgccgctgtcggtgtctgtctgtctgctcttagctgtctccattgcctcggccttctttgctttttgtgggggagaggggaggggacgggcagggtctctgtcgcccaggctggggtgcagtggcgcgatcccagcactgcagcctcaacctcctgggctcaagccatccttccgcctcagcttccccagcagctgggactacaggcacgcgccaccacagccggctaattttttatttaattttttgtagagacgaggtttcgccatgttgcccaggctggtcttgaactccggggctcaagcgatcctcccgcttcagcctccctaagtgctgggattgcaggcgtgagccactttcccagcctctctttgctttgcctgccccgttctcttaactcttggaccctcctcgtctgcatggtaactccgtctgagtctaccattttcttgctctccctccttccttgggcctgcctcagttccctttggcctccccctttacccagctcttggggtgtctctgttttttccatccccacttcctgccttctcgtggccctgtgtgagcacatgtgtacatctcagccttatctcaaggaggtgacaccttctctccttgtccccatctggctgtctctctgtgcttccctggccaggggcgtgcctgctggtcctatggggggaaggctactctgcatctcagccaccttcctcaggctcactccacctacatccccagtctgccacaccccatccctttgggcctcagccctgtccctttgatgtcctcctttccttcagcccctctgccctgtccctgcacacctccactgcctcccagcagatctgtggagacaaaacaagcaacaccttaaaagagttttatttctgaaaataaattaattttttgtaaataaaatgtttaaaaataaaaaagaaactaaagtta

SEQ ID NO: 114421 - DNA, 1617 bp, Homo sapiens
  Payload ID: 2368
  Gene Symbol: CTF1
  Gene Name: cardiotrophin 1
  Uniprot ID: Q16619
  ENST ID: ENST00000395019
  CDS Start-End: 7-609
gccagcatgagccggagggagggaagtctggacccccagactgattcctcagtctcacttcttccccacttggaggccaagatccgtcagacacacagccttgcgcacctcctcaccaaatacgctgagcagctgctccaggaatatgtgcagctccagggagaccccttcgggctgcccagcttctcgccgccgcggctgccggtggccggcctgagcgccccggctccgagccacgcggggctgccagtgcacgagcggctgcggctggacgcggcggcgctggccgcgctgcccccgctgctggacgcagtgtgtcgccgccaggccgagctgaacccgcgcgcgccgcgcctgctgcgccgcctggaggacgcggcgcgccaggcccgggccctgggcgccgccgtggaggccttgctggccgcgctgggcgccgccaaccgcgggccccgggccgagccccccgccgccaccgcctcagccgcctccgccaccggggtcttccccgccaaggtgctggggctccgcgtttgcggcctctaccgcgagtggctgagccgcaccgagggcgacctgggccagctgctgcccgggggctcggcctgagcgccgcggggcagctcgccccgcctcctcccgctgggttccgtctctccttccgcttctttgtctttctctgccgctgtcggtgtctgtctgtctgctcttagctgtctccattgcctcggccttctttgctttttgtgggggagaggggaggggacgggcagggtctctgtcgcccaggctggggtgcagtggcgcgatcccagcactgcagcctcaacctcctgggctcaagccatccttccgcctcagcttccccagcagctgggactacaggcacgcgccaccacagccggctaattttttatttaattttttgtagagacgaggtttcgccatgttgcccaggctggtcttgaactccggggctcaagcgatcctcccgcttcagcctccctaagtgctgggattgcaggcgtgagccactttcccagcctctctttgctttgcctgccccgttctcttaactcttggaccctcctcgtctgcatggtaactccgtctgagtctaccattttcttgctctccctccttccttgggcctgcctcagttccctttggcctccccctttacccagctcttggggtgtctctgttttttccatccccacttcctgccttctcgtggccctgtgtgagcacatgtgtacatctcagccttatctcaaggaggtgacaccttctctccttgtccccatctggctgtctctctgtgcttccctggccaggggcgtgcctgctggtcctatggggggaaggctactctgcatctcagccaccttcctcaggctcactccacctacatccccagtctgccacaccccatccctttgggcctcagccctgtccctttgatgtcctcctttccttcagcccctctgccctgtccctgcacacctccactgcctcccagcagatctgtggagacaaaacaagcaacaccttaaaagagttttatttctgaaaataaattaattttttgtaaataaaatgtttaaaaataaaaaa

SEQ ID NO: 114422 - DNA, 1844 bp, Homo sapiens
  Payload ID: 2369
  Gene Symbol: CLCF1
  Gene Name: cardiotrophin-like cytokine factor 1
  Uniprot ID: Q9UBD9
  ENST ID: ENST00000312438
  CDS Start-End: 199-876
acacgtcagaaaaaaaaaaaaaaagtttgcagaatgtcccacaccgaaaaaaaaaaaaaatccgaaaccgagcgaaaaaaacctgcgagtgggcctggcggatgggattattaaagcttcgccggagccgcggctcgccctcccactccgccagcctccgggagaggagccgcacccggccggcccggccccagccccatggacctccgagcaggggactcgtgggggatgttagcgtgcctgtgcacggtgctctggcacctccctgcagtgccagctctcaatcgcacaggggacccagggcctggcccctccatccagaaaacctatgacctcacccgctacctggagcaccaactccgcagcttggctgggacctatctgaactacctgggcccccctttcaacgagccagacttcaaccctccccgcctgggggcagagactctgcccagggccactgttgacttggaggtgtggcgaagcctcaatgacaaactgcggctgacccagaactacgaggcctacagccaccttctgtgttacttgcgtggcctcaaccgtcaggctgccactgctgagctgcgccgcagcctggcccacttctgcaccagcctccagggcctgctgggcagcattgcgggcgtcatggcagctctgggctacccactgccccagccgctgcctgggactgaacccacttggactcctggccctgcccacagtgacttcctccagaagatggacgacttctggctgctgaaggagctgcagacctggctgtggcgctcggccaaggacttcaaccggctcaagaagaagatgcagcctccagcagctgcagtcaccctgcacctgggggctcatggcttctgacttctgaccttctcctcttcgctcccccttcaaaccctgctcccactttgtgagagccagccctgtatgccaacacctgttgagccaggagacagaagctgtgagcctctggccctttcctggaccggctgggcgtgtgatgcgatcagccctgtctcctccccacctcccaaaggtctaccgagctggggaggaggtacagtaggccctgtcctgtcctgtttctacaggaagtcatgctcgagggagtgtgaagtggttcaggttggtgcagaggcgctcatggcctcctgcttcttgcctaccacttggccagtgcccacccagcccctcaggtggcacatctggagggcaggggttgaggggccaccaccacacatgcctttctggggtgaagccctttggctgccccactctccttggatgggtgttgctcccttatccccaaatcactctatacatccaattcaggaaacaaacatggtggcaattctacacaaaaagagatgagattaacagtgcagggttggggtctgcattggaggtgccctataaaccagaagagaaaatactgaaagcacaggggcagggacagaccagaccagacccaggagtctccaaagcacagagtggcaaacaaaacccgagctgagcatcaggaccttgcctcgaattgtcttccagtattacggtgcctcttctctgccccctttcccagggtatctgtgggttgccaggctggggagggcaaccatagccacaccacaggatttcctgaaagtttacaatgcagtagcattttggggtgtagggtggcagctccccaaggccctgccccccagccccacccactcatgactctaagtgtgttgtattaatatttatttatttggagatgttatttattagatgatatttattgcagaatttctattcttgtattaacaaataaaatgcttgccccagaa

SEQ ID NO: 114423 - DNA, 967 bp, Homo sapiens
  Payload ID: 2369
  Gene Symbol: CLCF1
  Gene Name: cardiotrophin-like cytokine factor 1
  Uniprot ID: Q9UBD9
  ENST ID: ENST00000533438
  CDS Start-End: 146-793
acttgctcccaggccagctcgctggcatttgggagaatgtgtcattgcatttactcaagggggaggaggagggaaggttagagatgaggaggcagaggtagggtgggagcagggacctcgcacaggcagaggggactcgtgggggatgttagcgtgcctgtgcacggtgctctggcacctccctgcagtgccagctctcaatcgcacaggggacccagggcctggcccctccatccagaaaacctatgacctcacccgctacctggagcaccaactccgcagcttggctgggacctatctgaactacctgggcccccctttcaacgagccagacttcaaccctccccgcctgggggcagagactctgcccagggccactgttgacttggaggtgtggcgaagcctcaatgacaaactgcggctgacccagaactacgaggcctacagccaccttctgtgttacttgcgtggcctcaaccgtcaggctgccactgctgagctgcgccgcagcctggcccacttctgcaccagcctccagggcctgctgggcagcattgcgggcgtcatggcagctctgggctacccactgccccagccgctgcctgggactgaacccacttggactcctggccctgcccacagtgacttcctccagaagatggacgacttctggctgctgaaggagctgcagacctggctgtggcgctcggccaaggacttcaaccggctcaagaagaagatgcagcctccagcagctgcagtcaccctgcacctgggggctcatggcttctgacttctgaccttctcctcttcgctcccccttcaaaccctgctcccactttgtgagagccagccctgtatgccaacacctgttgagccaggagacagaagctgtgagcctctggccctttcctggaccggctgggcgtgtgatgcgatcagccctgtctcctccccacctcccaaa

SEQ ID NO: 114424 - DNA, 2763 bp, Homo sapiens
  Payload ID: 2370
  Gene Symbol: CRAT
  Gene Name: carnitine O-acetyltransferase
  Uniprot ID: P43155
  ENST ID: ENST00000318080
  CDS Start-End: 296-2176
atcgatgccccgtccccgccccacagccaacctcccgggcaccgttgcccgcccggggcccgctaccggcccaggccccgcctcgcgagtcctcctccccgggtgccttcccgcagcccgctcggcccagagggtgggcgcggggctgcctctaccggctggcggctgtaactcagcgaccttggcccgaaggctctagcaaggacccaccgaccccagccgcggcggcggcggcgcggactttgcccggtgtgtggggcggagcggactgcgtgtccgcggacgggcagcgaagatgttagccttcgctgccaggaccgtggtgaagcctctgggcttcctgaagcccttctccttgatgaaggcttccagccgcttcaaggcacaccaggatgcactgccacggctgcccgtgccccctctccagcagtccctggaccactacctgaaggcgctgcagcccatcgtgagtgaggaggagtgggcccacaccaagcagctggtggatgagtttcaggcctcaggaggtgtaggggagcgcctgcagaaggggctggagcgtcgggccaggaagacggagaactggctgtctgagtggtggctcaagaccgcctacctccagtaccgccagcctgtggtcatctactcgagcccaggcgtgatgctacccaagcaggacttcgtggacctgcagggtcagctccgatttgctgccaaactcattgagggtgtgttggatttcaaggtcatgattgacaacgagaccctgcccgtggagtacctgggggggaagccactgtgcatgaaccagtactatcagatcttgtcctcctgccgagtgccgggccccaagcaggacacagtcagcaacttcagcaagaccaagaagcctcccacgcacatcaccgtggtacacaactaccagttttttgagctggatgtgtaccacagtgacgggacacccctcactgcggatcagatctttgtgcagctggagaagatctggaactcatccctacagaccaacaaggagcctgtgggcatcctcacctccaaccaccgcaactcctgggccaaggcatacaacaccctcatcaaagacaaggtgaaccgggattccgtgcgctccatccagaagagcatcttcaccgtgtgcctagatgcaaccatgcccagggtctcagaagacgtgtaccgcagccacgtggcaggccagatgctgcatgggggcggcagcaggctcaacagcggcaaccgctggttcgacaagacgctgcagttcatcgtggcagaagatggctcctgtgggcttgtgtacgagcatgctgcagcggaggggccccctattgtcacccttctggactatgtcatcgagtacacgaagaaacccgagcttgtgcggtctcccctggtgcccctgcccatgcccaagaagctgcggttcaacatcacccccgagatcaagagcgacatcgagaaggccaagcagaacctcagcatcatgatccaggacctggatatcaccgtgatggtgttccaccattttggaaaagacttccccaagtcggagaagctaagcccagatgccttcatccagatggctttgcagctggcctactacaggatctacggacaggcatgtgccacctatgaaagtgcctccctgcgcatgtttcacctgggccgcaccgacaccatccgctcggcttccatggactcactcacctttgtcaaggccatggatgactccagcgtcacggagcaccagaaggtggagctgctgcggaaggccgtgcaggcccaccgaggctacaccgaccgggccatccgcggggaggcctttgatcgacacctgctgggcctgaagctgcaggccatcgaggacctggtgagcatgcccgacatcttcatggacacctcctacgccatcgccatgcacttccacctctccaccagccaggtccctgccaagacagactgtgtcatgttcttcgggcccgtggtccccgacggctacggtgtctgctataaccccatggaggcccacatcaacttctccctgtcggcctacaacagctgcgcggagaccaacgccgcccgcctggcgcattacctggagaaggcgctcctggacatgcgtgccctgctgcagagccacccccgggccaagctctgagcccctaggactcaggcctgccaatgccacagccaagcccaccctgggatgggccacccaccagggctcagctccttggttccctcttccttggttccctcttccctggtccccccaaatctactgagccacggaccgcatcctccagggggcctgcaggccccagccaagtgccttccgtgggtcatcccagcacctgccagggcccgacctggggctgagtgcagaggctgagcaggacgttaggcccgggcccctggcacgtcctccaccggtgcctcctctggggaagggaaccagccctccagagcaggagactggcaagagctctttgtctcaccagctcagccccggccactccctgccaactccatgaccaggccaccatctgtaccctgcttcccaaactcccaggacctggagacaggattgtctggggccgaggggccagggtgtgaggtttcacctccgttgcggctgtgctcctgtggataacattgctagcgagccgcctctggttccactcagcttggttcctgcccccgccctgctgtatgatattaatgtggaaggtcatcaataaaggg

SEQ ID NO: 114425 - DNA, 973 bp, Homo sapiens
  Payload ID: 2370
  Gene Symbol: CRAT
  Gene Name: carnitine O-acetyltransferase
  ENST ID: ENST00000393384
  CDS Start-End: 203-688
cctccccgggtgccttcccgcagcccgctcggcccagagggtgggcgcggggctgcctctaccggctggcggctgtaactcagcgaccttggcccgaaggctctagcaaggacccaccgaccccagccgcggcggcggcggcgcggactttgcccggtgtgtggggcggagcggactgcgtgtccgcggacgggcagcgaagatgttagccttcgctgccaggaccgtggtgaagcctctgggcttcctgaagcccttctccttgatgaaggcttccagccgcttcaaggcacaccaggatgcactgccacggctgcccgtgccccctctccagcagtccctggaccactacctgaaggcgctgcagcccatcgtgagtgaggaggagtgggcccacaccaagcagctggtggatgagtttcaggcctcaggaggtgtaggggagcgcctgcagaaggggctggagcgtcgggccaggaagacggagaactgggtgagtgagggcatcctcactgtgacctgctgctggctgcacatgcacagttctccagtgcccactgctctggcacggccgttcgtttgctgcccagagtttcgtgagcacatactctgtgtctggcacttggcagggtgctgggtgatcaagaaggacacagtcaccagctccttggagctaacattcaagtagggaggagagaaaggtaatgaacaggatacaggttgtggacaaggtttcatgttccaggacagaggcaggagtggggtgcacggcaggtacaaccagatagaagatgcccttgtgcttggtgggacagcctcaggcaggggatatgtgtcactcagtgaccgatcgcccaggttctgtatctgatctatgacacaggtgtacccagtttggcaaatatgtctacaccaatgtttggtgtgcttttctatttgcatctcatacttcaatacacagatttaaaaagtg

SEQ ID NO: 114426 - DNA, 595 bp, Homo sapiens
  Payload ID: 2370
  Gene Symbol: CRAT
  Gene Name: carnitine O-acetyltransferase
  ENST ID: ENST00000455830
  CDS Start-End: 302-595
ggtgggcgcggggctgcctctaccggctggcggctgtaactcagcgaccttggcccgaaggctctagcaaggacccaccgaccccagccgcggcggcggcggcgcggactttgcccggtgtgtggggcggagcggactgcgtgtccgcggacgggcagcgaagatgttagccttcgctgccaggaccgtgcccaggcaagtggctgcctctggctaggttctgctcactcactttgtagcacagttaggcttagagatccagccaaggcagacagacagggcccagaacctcagtcctgccatggaggaggacgggcagcagagagagaaggtgaagcctctgggcttcctgaagcccttctccttgatgaaggcttccagccgcttcaaggcacaccaggatgcactgccacggctgcccgtgccccctctccagcagtccctggaccactacctgaaggcgctgcagcccatcgtgagtgaggaggagtgggcccacaccaagcagctggtggatgagtttcaggcctcaggaggtgtaggggagcgcctgcagaaggggctggagcgtcgggccaggaagacggagaactgg

SEQ ID NO: 114427 - DNA, 800 bp, Homo sapiens
  Payload ID: 2370
  Gene Symbol: CRAT
  Gene Name: carnitine O-acetyltransferase
  ENST ID: ENST00000415948
  CDS Start-End: 1-95
accgatcccagggctgtggtgtaacctcagcggccaggcagtctctgtcctccagccaagttttccctcatcaaaacgatcttcgcagattctgacagcccaggcaagtggctgcctctggctaggttctgctcactcactttgtagcacagttaggcttagagatccagccaaggcagacagacagggcccagaacctcagtcctgccatggaggaggacgggcagcagagagagaaggtgaagcctctgggcttcctgaagcccttctccttgatgaaggcttccagccgcttcaaggcacaccaggatgcactgccacggctgcccgtgccccctctccagcagtccctggaccactacctgaaggcgctgcagcccatcgtgagtgaggaggagtgggcccacaccaagcagctggtggatgagtttcaggcctcaggaggtgtaggggagcgcctgcagaaggggctggagcgtcgggccaggaagacggagaactggctgtctgagtggtggctcaagaccgcctacctccagtaccgccagcctgtggtcatctactcgagcccaggcgtgatgctacccaagcaggacttcgtggacctgcagggtcagctccgatttgctgccaaactcattgagggtgtgttggatttcaaggtcatgattgacaacgagaccctgcccgtggagtacctgggggggaagccactgtgcatgaaccagtactatcagatcttgtcctcctgccgagtgccgggccccaagcaggacacagtcagcaacttcagcaagacc

SEQ ID NO: 114428 - DNA, 795 bp, Homo sapiens
  Payload ID: 2370
  Gene Symbol: CRAT
  Gene Name: carnitine O-acetyltransferase
  ENST ID: ENST00000455396
  CDS Start-End: 1-604
catgatccaggacctggatatcaccgtgatggtgttccaccattttggaaaagacttccccaagtcggagaagctaagcccagatgccttcatccagatggctttgcagctggcctactacaggatctacggacaggcatgtgccacctatgaaagtgcctccctgcgcatgtttcacctgggccgcaccgacaccatccgctcggcttccatggactcactcacctttgtcaaggccatggatgactccagcgtcacggagcaccagaaggtggagctgctgcggaaggccgtgcaggcccaccgaggctacaccgaccgggccatccgcggggaggcctttgatcgacacctgctgggcctgaagctgcaggccatcgaggacctggtccctgccaagacagactgtgtcatgttcttcgggcccgtggtccccgacggctacggtgtctgctataaccccatggaggcccacatcaacttctccctgtcggcctacaacagctgcgcggagaccaacgccgcccgcctggcgcattacctggagaaggcgctcctggacatgcgtgccctgctgcagagccacccccgggccaagctctgagcccctaggactcaggcctgccaatgccacagccaagcccaccctgggatgggccacccaccagggctcagctccttggttccctcttccttggttccctcttccctggtccccccaaatctactgagccacggaccgcatcctccagggggcctgcaggccccagccaagtgccttccgtgggtcatccc

SEQ ID NO: 114429 - DNA, 2253 bp, Homo sapiens
  Payload ID: 2370
  Gene Symbol: CRAT
  Gene Name: carnitine O-acetyltransferase
  ENST ID: ENST00000458362
  CDS Start-End: 274-396
acagccaacctcccgggcaccgttgcccgcccggggcccgctaccggcccaggccccgcctcgcgagtcctcctccccgggtgccttcccgcagcccgctcggcccagagggtgggcgcggggctgcctctaccggctggcggctgtaactcagcgaccttggcccgaaggctctagcaaggacccaccgaccccagccgcggcggcggcggcgcggactttgcccggtgtgtggggcggagcggactgcgtgtccgcggacgggcagcgaagatgttagccttcgctgccaggaccgtggaccgatcccagggctgtggtgtaacctcagcggccaggcagtctctgtcctccagccaagttttccctcatcaaaacgatcttcgcagattctgacaggtgaagcctctgggcttcctgaagcccttctccttgatgaaggcttccagccgcttcaaggcacaccaggatgcactgccacggctgcccgtgccccctctccagcagtccctggaccactacctgaaggcgctgcagcccatcgtgagtgaggaggagtgggcccacaccaagcagctggtggatgagtttcaggcctcaggaggtgtaggggagcgcctgcagaaggggctggagcgtcgggccaggaagacggagaactggctgtctgagtggtggctcaagaccgcctacctccagtaccgccagcctgtggtcatctactcgagcccaggcgtgatgctacccaagcaggacttcgtggacctgcagggtcagctccgatttgctgccaaactcattgagggtgtgttggatttcaaggtcatgattgacaacgagaccctgcccgtggagtacctgggggggaagccactgtgcatgaaccagtactatcagatcttgtcctcctgccgagtgccgggccccaagcaggacacagtcagcaacttcagcaagaccaagaagcctcccacgcacatcaccgtggtacacaactaccagttttttgagctggatgtgtaccacagtgacgggacacccctcactgcggatcagatctttgtgcagctggagaagatctggaactcatccctacagaccaacaaggagcctgtgggcatcctcacctccaaccaccgcaactcctgggccaaggcatacaacaccctcatcaaagacaaggtgaaccgggattccgtgcgctccatccagaagagcatcttcaccgtgtgcctagatgcaaccatgcccagggtctcagaagacgtgtaccgcagccacgtggcaggccagatgctgcatgggggcggcagcaggctcaacagcggcaaccgctggttcgacaagacgctgcagttcatcgtggcagaagatggctcctgtgggcttgtgtacgagcatgctgcagcggaggggccccctattgtcacccttctggactatgtcatcgagtacacgaagaaacccgagcttgtgcggtctcccctggtgcccctgcccatgcccaagaagctgcggttcaacatcacccccgagatcaagagcgacatcgagaaggccaagcagaacctcagcatcatgatccaggacctggatatcaccgtgatggtgttccaccattttggaaaagacttccccaagtcggagaagctaagcccagatgccttcatccagatggctttgcagctggcctactacaggatctacggacaggcatgtgccacctatgaaagtgcctccctgcgcatgtttcacctgggccgcaccgacaccatccgctcggcttccatggactcactcacctttgtcaaggccatggatgactccagcgtcacggagcaccagaaggtggagctgctgcggaaggccgtgcaggcccaccgaggctacaccgaccgggccatccgcggggaggcctttgatcgacacctgctgggcctgaagctgcaggccatcgaggacctggtgagcatgcccgacatcttcatggacacctcctacgccatcgccatgcacttccacctctccaccagccaggtccctgccaagacagactgtgtcatgttcttcgggcccgtggtccccgacggctacggtgtctgctataaccccatggaggcccacatcaacttctccctgtcggcctacaacagctgcgcggagaccaacgccgcccgcctggcgcattacctggagaaggcgctcctggacatgcgtgccctgctgcagagccacccccgggccaagctctga

SEQ ID NO: 114430 - DNA, 831 bp, Homo sapiens
  Payload ID: 2370
  Gene Symbol: CRAT
  Gene Name: carnitine O-acetyltransferase
  ENST ID: ENST00000441796
  CDS Start-End: 261-383
cgggcaccgttgcccgcccggggcccgctaccggcccaggccccgcctcgcgagtcctcctccccgggtgccttcccgcagcccgctcggcccagagggtgggcgcggggctgcctctaccggctggcggctgtaactcagcgaccttggcccgaaggctctagcaaggacccaccgaccccagccgcggcggcggcggcgcggactttgcccggtgtgtggggcggagcggactgcgtgtccgcggacgggcagcgaagatgttagccttcgctgccaggaccgtggaccgatcccagggctgtggtgtaacctcagcggccaggcagtctctgtcctccagccaagttttccctcatcaaaacgatcttcgcagattctgacagggtgggagaaaaggacgtggggacctccaagagggacagtcaccactctgctggctggctcctcttccagggtgaagcctctgggcttcctgaagcccttctccttgatgaaggcttccagccgcttcaaggcacaccaggatgcactgccacggctgcccgtgccccctctccagcagtccctggaccactacctgaaggcgctgcagcccatcgtgagtgaggaggagtgggcccacaccaagcagctggtggatgagtttcaggcctcaggaggtgtaggggagcgcctgcagaaggggctggagcgtcgggccaggaagacggagaactggctgtctgagtggtggctcaagaccgcctacctccagtaccgccagcctgtggtcatctactcgagcccaggcgtgatgctacccaagcaggacttcgtggacctgcaggg

SEQ ID NO: 114431 - DNA, 3175 bp, Homo sapiens
  Payload ID: 2371
  Gene Symbol: CROT
  Gene Name: carnitine O-octanoyltransferase
  Uniprot ID: Q9UKG9
  ENST ID: ENST00000331536
  CDS Start-End: 186-2024
gggagcgagccggtgctgctgcaggctgaggctgcggcagaggcggcgaggcgcgggcggtgaggacggacagtcaccgacttagtccagttccctgtgatctcaaaacaattgttgcagcaggctcctggcagtctcaagcagttcatcttcttggtgtactggtttcctattgtgattttatcatggaaaatcaattggctaaatcaactgaagaacgaacatttcagtaccaggattctcttccatcactgcctgttccttcacttgaagaatcattaaaaaaataccttgaatcagtgaaaccatttgcaaatcaagaagaatataagaaaactgaagaaatagttcaaaaatttcaaagtgggattggagaaaaattgcaccagaaattgcttgaaagagcaaaaggaaaaagaaattggctggaagagtggtggctgaatgttgcctatctggatgttcgtataccatcacaattgaatgtcaactttgcgggtcctgcagctcattttgaacactactggcctccaaaggaagggactcaattagaaagaggaagtataactctttggcataacttgaactactggcagctattaagaaaagaaaaagtgcctgttcataaagttggaaatactcctctagatatgaatcaattccgaatgctattttctacctgcaaggttccaggaattactagagactccattatgaattattttaggactgagagtgaagggcgttccccaaaccacattgtagtgctgtgtcgaggccgagcttttgtctttgatgtaatacatgaaggatgtttggtcaccccgccagagcttctcagacaactgacatatatccacaagaagtgccatagtgaacctgatggacctgggattgcagcattaactagtgaggagcgaactcgatgggctaaggcacgagaatatctgattggtcttgatccagagaacttggctttgttagaaaaaattcagagtagtttactggtatattccatggaggatagcagtccacatgtaacaccagaggattattctgagattattgcagccatccttattggagatccaacagtacgctggggtgacaaatcctataacttgatttccttttctaatggagtatttggctgtaattgtgatcatgctccttttgatgcaatgattatggtgaacatcagttattatgtggatgagaaaatttttcagaatgaaggaagatggaagggttcagagaaggtacgagatataccacttccagaagagctcattttcattgtggatgagaaagttttaaatgacatcaaccaagctaaagcccagtatctcagggaggcatctgatctacagattgcggcttatgcctttacatcttttggcaaaaagctaaccaagaacaagatgcttcacccggatacgtttattcagcttgcacttcagctggcctattacagacttcatggacaccctggttgttgctatgaaacagctatgacaagacatttttatcatggccgtacagagactatgcgatcatgcacagttgaagcagtgaggtggtgccagtccatgcaggatccttctgtcaatcttcgtgagcggcagcaaaagatgttacaagcttttgcaaagcataataaaatgatgaaagattgttcagctggaaaaggatttgatcgtcaccttttaggtctcttactcatagcaaaagaggaaggtcttcctgttccagaactctttacggacccacttttttccaaaagcggaggaggtggaaattttgttctctcaacaagtctggttggctatttacgagtccagggagtggtagttcccatggtacacaatggttatggatttttctaccatatcagagatgacaggtttgttgtggcctgttcagcctggaaatcctgtcccgagactgatgcggaaaagctagttcagctgactttttgtgcttttcatgatatgatacagctgatgaactctactcatctttagagatgaatcatctattaagcacttaccaaaacatatcattaaactgagtgctgggagtgagttggtaatatgagatgggaaggaatgttgacttgctaacattcctttaacaagttaagaaaacttgttaaatgtagaaattagtagaatcatgctctctaaatttattctgccatagaaggtagaaatatttttaagctcctctgatgcagcagcaatgcaaattatgacatagtgaatatagaactatgcagtatttaagcctcaacaatccaaatctacaaactttaacaatgcaagtcttactctaatttttaagtatttttgttggtacttacatgggttataaatcctctctctggacatcaatgtagagtccatctttcaagcactttaatttttttagctgccaaagggtatgaattacattattgtatgctaatttccctgaaatcaatgccttctatgttcaccacagggatacaagcctgttatgtttgatgggaaagaccactacaatctaatggtgatctaaaataacttttttgggctgggtgcagtggctcatgcctataatcttagcactttgggaggccaaggtaggaggattgcttgaagctaggagtttgagaccagcctgggcaacagggtaaggtcctgtctctacaagatcaaaaacttagccgggtatggtggtgcatgtgtgcctgtagtccaagctacttgaaggctgagacaggaggatcggttgagcccaggaggttgtggctgcagtgagctgtgatgtgcccttatgctatagcctgggcaagagcgtgagaccctgtctcaaagaagaaaaaaagagaaaaataactcttttgaacaaacagacaaattagctagtagtatggagatgtataccctctattacacacataaaaccgtaacaaaattcattgtggtgtattataattagttttgtgaatagaaaaataaagcacttatgtttaaatttgttacagtgacttttaaaggattaatgttgaatcacattgtcagaattttttcctcctcgctgttcaattttgtagtttttactctcaaaaaatgaaattctcaaaattatatagctttttgttttgtttgaataaatgattcattcctgtttg

SEQ ID NO: 114432 - DNA, 1213 bp, Homo sapiens
  Payload ID: 2371
  Gene Symbol: CROT
  Gene Name: carnitine O-octanoyltransferase
  Uniprot ID: Q9UKG9
  ENST ID: ENST00000412227
  CDS Start-End: 188-451
gggggagcgagccggtgctgctgcaggctgaggctgcggcagaggcggcgaggcgcgggcggtgaggacggacagtcaccgacttagtccagttccctgtgatctcaaaacaattgttgcagcaggctcctggcagtctcaagcagttcatcttcttggtgtactggtttcctattgtgattttatcatggaaaatcaattggctaaatcaactgaagaacgaacatttcagtaccaggattctcttccatcactgcctgttccttcacttgaagaatcattaaaaaaataccttgaatcagtgaaaccatttgcaaatcaagaagaatataagaaaactgaagaaatagttcaaaaatttcaaagtgggattggagaaaaattgcaccagaaattgcttgaaagagcaaaaggaaaaagaaattgggtatttgttgttataattgaataatgatgatgtttaaagaatgataaataaaaagtgcatagtttttatttttaaattattgctgtaaaaatttttacagttattattgttattttcataatccaaaagaaggaatgaatcacttaactttgggagttttcagtgggtggattcgggaacttgttaaaatgcagatttgctgggataagtgattctgattcacatggctggaatgaggcccagagattcttattttaacaatcacttcatgtggtttggctgcaggtaatctgtagaccatgctgaaggaaaacattttgtccaggtgactagcttgaaaaatcagaaacactaaaatagacatgtcacataggtggcatagaaatattttcgtagtacaatggagaaagggaatcattaaaaatcagagtggagaatggttatgtatattgtatatttcagttagataaattgaggaagctagtataataattattgaaggtctcaataattttccacaaaattctttaacttcttcagctcaaccatttctgtacttctctactatgaatcagaggatgaggttgtataattcaaaagcattgccttagtctagaaataattattgtacctatcatttagttttagaaataaaaagcaagctgattttttttgatgaaccatttatatctgtgatggaataataaaatttcacacttccggattcctttgttctcaattttgagccttgagttgttttaattaaagaggggtaaaggtaaagaa

SEQ ID NO: 114433 - DNA, 1993 bp, Homo sapiens
  Payload ID: 2371
  Gene Symbol: CROT
  Gene Name: carnitine O-octanoyltransferase
  ENST ID: ENST00000442291
  CDS Start-End: 118-1842
cacagtcaccgacttagtccagttccctgtgatctcaaaacaattgttgcagcaggctcctggcagtctcaagcagttcatcttcttggtgtactggtttcctattgtgattttatcatggaaaatcaattggctaaatcaactgaagaacgaacatttcagtaccaggattctcttccatcactgcctgttccttcacttgaagaatcattaaaaaaataccttgaatcagtgaaaccatttgcaaatcaagaagaatataagaaaactgaagaaatagttcaaaaatttcaaagtgggattggagaaaaattgcaccagaaattgcttgaaagagcaaaaggaaaaagaaattggctggaagagtggtggctgaatgttgcctatctggatgttcgtataccatcacaattgaatgtcaactttgcgggtcctgcagctcattttgaacactactggcctccaaaggaagggactcaattagaaagaggaagtataactctttggcataacttgaactactggcagctattaagaaaagaaaaagtgcctgttcataaagttggaaatactcctctagatatgaatcaattccgaatgctattttctacctgcaaggttccaggaattactagagactccattatgaattattttaggactgagagtgaagggcgttccccaaaccacattgtagtgctgtgtcgaggccgagcttttgtctttgatgtaatacatgaaggatgtttggtcaccccgccagagcttctcagacaactgacatatatccacaagaagtgccatagtgaacctgatggacctgggattgcagcattaactagtgaggagcgaactcgatgggctaaggcacgagaatatctgattggtcttgatccagagaacttggctttgttagaaaaaattcagagtagtttactggtatattccatggaggatagcagtccacatgtaacaccagaggattattctgagattattgcagccatccttattggagatccaacagtacgctggggtgacaaatcctataacttgatttccttttctaatggagtatttggctgtaattgtgatcatgctccttttgatgcaatgattatggtgaacatcagttattatgtggatgagaaaatttttcagaatgaaggaagatggaagggttcagagaaggtacgagatataccacttccagaagagctcattttcattgtggatgagaaagttttaaatgacatcaaccaagctaaagcccagtatctcagggaggcatctgatctacagattgcggcttatgcctttacatcttttggcaaaaagctaaccaagaacaagatgcttcacccggatacgtttattcagcttgcacttcagctggcctattacagacttcatggacaccctggttgttgctatgaaacagctatgacaagacatttttatcatggccgtacagagactatgcgatcatgcacagttgaagcagtgaggtggtgccagtccatgcaggatccttctgtcaatcttcgtgagcggcagcaaaagatgttacaagcttttgcaaagcataataaaatgatgaaagattgttcagctggaaaaggatttgatcgtcaccttttaggtctcttactcatagcaaaagaggaaggtcttcctgttccagaactctttacggacccacttttttccaaaagcggaggaggtggaaattttgttctctcaacaagtctggttggctatttacgagtccagggagtggtagttcccatggtacacaatggttatggatttttctaccatatcagagatgacaggtgctagtcatctaatgaatgaggtgtttcttagcattatctacagatatggctttaccttcaattgtgtcaggttacatttacctaatgtcagcaagacttcacatttcatgtatgaatatccagatgaaataaagtcctggttgtattcaccatca

SEQ ID NO: 114434 - DNA, 2959 bp, Homo sapiens
  Payload ID: 2371
  Gene Symbol: CROT
  Gene Name: carnitine O-octanoyltransferase
  Uniprot ID: Q9UKG9
  ENST ID: ENST00000419147
  CDS Start-End: 200-2122
tttgaggcccaagggggagcgagccggtgctgctgcaggctgaggctgcggcagaggcggcgaggcgcgggcggtgaggacggacagtcaccgacttagtccagttccctgtgatctcaaaacaattgttgcagcaggctcctggcagtctcaagcagttcatcttcttggtgtactggtttcctattgtgattttatcatggaaaatcaattggctaaatcaactgaagaacgaacatttcagtaccaggattctcttccatcactgcctgttccttcacttgaagaatcattaaaaaaataccttgaatcagtcaccagaacatgctaccagataaggggtcttgatccagatgctaagagagggttcttggatctcacgcgggaaggaattcaagtgaaaccatttgcaaatcaagaagaatataagaaaactgaagaaatagttcaaaaatttcaaagtgggattggagaaaaattgcaccagaaattgcttgaaagagcaaaaggaaaaagaaattggctggaagagtggtggctgaatgttgcctatctggatgttcgtataccatcacaattgaatgtcaactttgcgggtcctgcagctcattttgaacactactggcctccaaaggaagggactcaattagaaagaggaagtataactctttggcataacttgaactactggcagctattaagaaaagaaaaagtgcctgttcataaagttggaaatactcctctagatatgaatcaattccgaatgctattttctacctgcaaggttccaggaattactagagactccattatgaattattttaggactgagagtgaagggcgttccccaaaccacattgtagtgctgtgtcgaggccgagcttttgtctttgatgtaatacatgaaggatgtttggtcaccccgccagagcttctcagacaactgacatatatccacaagaagtgccatagtgaacctgatggacctgggattgcagcattaactagtgaggagcgaactcgatgggctaaggcacgagaatatctgattggtcttgatccagagaacttggctttgttagaaaaaattcagagtagtttactggtatattccatggaggatagcagtccacatgtaacaccagaggattattctgagattattgcagccatccttattggagatccaacagtacgctggggtgacaaatcctataacttgatttccttttctaatggagtatttggctgtaattgtgatcatgctccttttgatgcaatgattatggtgaacatcagttattatgtggatgagaaaatttttcagaatgaaggaagatggaagggttcagagaaggtacgagatataccacttccagaagagctcattttcattgtggatgagaaagttttaaatgacatcaaccaagctaaagcccagtatctcagggaggcatctgatctacagattgcggcttatgcctttacatcttttggcaaaaagctaaccaagaacaagatgcttcacccggatacgtttattcagcttgcacttcagctggcctattacagacttcatggacaccctggttgttgctatgaaacagctatgacaagacatttttatcatggccgtacagagactatgcgatcatgcacagttgaagcagtgaggtggtgccagtccatgcaggatccttctgtcaatcttcgtgagcggcagcaaaagatgttacaagcttttgcaaagcataataaaatgatgaaagattgttcagctggaaaaggatttgatcgtcaccttttaggtctcttactcatagcaaaagaggaaggtcttcctgttccagaactctttacggacccacttttttccaaaagcggaggaggtggaaattttgttctctcaacaagtctggttggctatttacgagtccagggagtggtagttcccatggtacacaatggttatggatttttctaccatatcagagatgacaggtttgttgtggcctgttcagcctggaaatcctgtcccgagactgatgcggaaaagctagttcagctgactttttgtgcttttcatgatatgatacagctgatgaactctactcatctttagagatgaatcatctattaagcacttaccaaaacatatcattaaactgagtgctgggagtgagttggtaatatgagatgggaaggaatgttgacttgctaacattcctttaacaagttaagaaaacttgttaaatgtagaaattagtagaatcatgctctctaaatttattctgccatagaaggtagaaatatttttaagctcctctgatgcagcagcaatgcaaattatgacatagtgaatatagaactatgcagtatttaagcctcaacaatccaaatctacaaactttaacaatgcaagtcttactctaatttttaagtatttttgttggtacttacatgggttataaatcctctctctggacatcaatgtagagtccatctttcaagcactttaatttttttagctgccaaagggtatgaattacattattgtatgctaatttccctgaaatcaatgccttctatgttcaccacagggatacaagcctgttatgtttgatgggaaagaccactacaatctaatggtgatctaaaataacttttttgggctgggtgcagtggctcatgcctataatcttagcactttgggaggccaaggtaggaggattgcttgaagctaggagtttgagaccagcctgggcaacagggtaaggtcctgtctctacaagatcaaaaacttagccgggtatggtggtgcatgtgtgcctgtagtccaagctacttgaaggctgagacaggaggatcggttgagcccaggaggttgtggctgcagtgagctgtgatgtgcccttatgctatagcctgggcaagagcgtgagaccctgtctcaaagaag

SEQ ID NO: 114435 - DNA, 5232 bp, Homo sapiens
  Payload ID: 2372
  Gene Symbol: CPT1A
  Gene Name: carnitine palmitoyltransferase 1A (liver)
  Uniprot ID: P50416
  ENST ID: ENST00000265641
  CDS Start-End: 156-2477
aatccgctgctgccggcgtcgggtgcgctcggcctcgcccgcggccctccttccccggctcccgctcgccgctcgttcactccaccgccgccgccgccgccgccgctgccgctgccgctgccgcacctccgtagctgactcggtactctctgaagatggcagaagctcaccaagctgtggcctttcagttcacggtcactccggacgggattgacctgcggctgagccatgaagctcttagacaaatctatctctctggacttcattcctggaaaaagaagttcatcagattcaagaacggcatcatcactggcgtgtacccggcaagcccctccagttggcttatcgtggtggtgggcgtgatgacaacgatgtacgccaagatcgacccctcgttaggaataattgcaaaaatcaatcggactctggaaacggccaactgcatgtccagccagacgaagaacgtggtcagcggcgtgctgtttggcaccggcctgtgggtggccctcatcgtcaccatgcgctactccctgaaagtgctgctctcctaccacgggtggatgttcactgagcacggcaagatgagtcgtgccaccaagatctggatgggtatggtcaagatcttttcaggccgaaaacccatgttgtacagcttccagacatcgctgcctcgcctgccggtcccggctgtcaaagacactgtgaacaggtatctacagtcggtgaggcctcttatgaaggaagaagacttcaaacggatgacagcacttgctcaagattttgctgtcggtcttggaccaagattacagtggtatttgaagttaaaatcctggtgggctacaaattacgtgagcgactggtgggaggagtacatctacctccgaggacgagggccgctcatggtgaacagcaactattatgccatggatctgctgtatatccttccaactcacattcaggcagcaagagccggcaacgccatccatgccatcctgctttacaggcgcaaactggaccgggaggaaatcaaaccaattcgtcttttgggatccacgattccactctgctccgctcagtgggagcggatgtttaatacttcccggatcccaggagaggagacagacaccatccagcacatgagagacagcaagcacatcgtcgtgtaccatcgaggacgctacttcaaggtctggctctaccatgatgggcggctgctgaagccccgggagatggagcagcagatgcagaggatcctggacaatacctcggagcctcagcccggggaggccaggctggcagccctcaccgcaggagacagagttccctgggccaggtgtcgtcaggcctattttggacgtgggaaaaataagcagtctcttgatgctgtggagaaagcagcgttctttgtgacgttagatgaaactgaagaaggatacagaagtgaagacccggatacgtcaatggacagctacgccaaatctctactacacggccgatgttacgacaggtggtttgacaagtcgttcacgtttgttgtcttcaaaaacgggaagatgggcctcaacgctgaacactcctgggcagatgcgccgatcgtggcccacctttgggagtacgtcatgtccattgacagcctccagctgggctatgcggaggatgggcactgcaaaggcgacatcaatccgaacattccgtaccccaccaggctgcagtgggacatcccgggggaatgtcaagaggttatagagacctccctgaacaccgcaaatcttctggcaaacgacgtggatttccattccttcccattcgtagcctttggtaaaggaatcatcaagaaatgtcgcacgagcccagacgcctttgtgcagctggccctccagctggcgcactacaaggacatgggcaagttttgcctcacatacgaggcctccatgacccggctcttccgagaggggaggacggagaccgtgcgctcctgcaccactgagtcatgcgacttcgtgcgggccatggtggacccggcccagacggtggaacagaggctgaagttgttcaagttggcgtctgagaagcatcagcatatgtatcgcctcgccatgaccggctctgggatcgatcgtcacctcttctgcctttacgtggtgtctaaatatctcgctgtggagtcccctttccttaaggaagttttatctgagccttggagattatcaacaagccagacccctcagcagcaagtggagctgtttgacttggagaataacccagagtacgtgtccagcggagggggctttggaccggttgctgatgacggctatggtgtgtcgtacatccttgtgggagagaacctcatcaatttccacatttcttccaagttctcttgccctgagacggattctcatcgctttggaaggcacctgaaagaagcaatgactgacatcatcactttgtttggtctcagttctaattccaaaaagtaattccactggagctgctgggaaggaaaacgagctcttctgatgcaaaccaaatgaaaaataggcattaatcctgaccttagctcgggatgaaacactgctcttaaaaaaactcagttttccttccagaaaatgtgggtgtttttttttcctagaacagtatctctcccctgtgaagcataaccccactacttccagacttgccctcccttgggggacatctgataaagtctcccctgatgtctccgcatcggcttggatttattaagggatgcaaatcttgttgagttaatgaaggaattagtagggttgtggcttcacacacagtggaatggaaatggtgtgctttctcagtggcaaccgaaggcctagtgcttaagggcatttagcatcatccaagcagggtaaacttttgttttgttaaaagaaaaatgtgttattcaagttggtgtccccagttgtagctaacacatctggaatgcactaaccaaaatgctgtgctttggagacctgcttttgtcaccgtgggtaaccgttcccgtctggtccagtagcctgtgtttgcctctccacatttgaagcaagcaggatgcaaggtcttcagttttactgaccttgtatgtcttcaagtcttcacaacccagtgccttaaaaatgaaaggccctaaatgtaagggagatggagagaaagatttattttgtagagtctttgggtggaattgtgggtatactgttcccttcacaattgactgagtatggataaccgtacataagcatttgctacaccccaccagccccctccccctcagaaacaccagttccttcccaagggcagctgtgccagactcccctcccgggactgccttcttgtcatcataagcaacaaaagaaataacaggcacatgtcataaaaggggagcaagggccgtgatggtcagataattcactcaagaataaaacatgacacgtgcctcaggaggatctctttcccaaagtgacagcaaggagggcagggcatcggccaccaagcggggactagcaagtgaggaaggggagggcagcccaccgtggtgaggagagagtggctccacgaccccaagggatggccttctcctcccacccggtgaggggaaagactcaccagagggtgatggagacagtatgccggctcaccttggtgaccagccaagatgtctcaagtgacagtgctaggtgttcacccagcctgtccttcagataggagtgccttcacgaaagcgtctcatggaccacaaagcaattatgcactgagtcatcttcagtatttaatgcaaaaatgaagcatcatggaatgaaattcccactgtctgtcatgacaagcttagctgtccattgttttaaattgtgtatttatttttttgaccacttggttctagttgggcctgactccttcagagtgctgcaccccgatagtacaacagcgatggctgaactgttggagtcgatggaaggtgcttgccggagaacacgtgcctttttttttttttttttttttgagatggagtttcactcttgttgcccaggctggagtgcagtggtgcaatctcggctcactgcagcatctgccttgcaggttcaagcgattctcctgtctcagcctcccaagtagctgggattacacgcccaacaccatgccctgctaatttttgtatttttagtagagacggggtttcatcatattggtcaggctggtctcgaactcctgacctcaggtgatccacctgcctcagcctcccaaagtgctgggattacaggcatgagccaccatgcgcggcccacatgcatgttttatgtatgtatacttcatgatgtaaaaatcccacctttatgggccaaagattttttttctcctgaaagcaagaaaaaatgaaaacaaaagacaaaaaaaaaaaaaaaagcgtccaggcgcggtggctcatgcgtgtaatcccagcactttgggaggccaaggcgggcggatcacgaggtcaggagatggagaccatcctggctaacacggtgaaaccccgtctctactaaaaattcaaaaaatgagccgggcgtggtggcgggcgcctgtagtcccagctactcaggaggctgaggcaggagaatggcgtgaacccgggaggcggagcttgcagtgagccgagatcgctccactgcactccagcctgggcgacagagcgagactccgtctaaaaaaaaaagcaaaaacaaaccaacaacaaaagcccctgactgtccgtcaagcaggcagcggggatgtagctctctctgccctgggcaagaatagcacttcccgttaaaagccagcagccggcgtcagtccctatcagagccagctagatcatgcactgttgaccactgagcaatctgtgttacactagagttcacagggcattttgagtgtagacgtgagtgcttaaacatatttgggtttctctctcaggttttaaatgtttcaaatgtaattgttgctcatcagtgcagttatcaatgcaattttatattccttgaggggagaaagaggggtcttattgtacatgtccaaggggggtgataagagtattatctgtttaatttaattggaacaaaccattgtcttaacgcagccatggtttgaatttgttatcttgggctgaccggtgcatgtaaatacagtatgctctttggatgtaaatcttagaaatgcagtgtgaatgtaggttatcattaataaaacattaaccccagtcta

SEQ ID NO: 114436 - DNA, 2635 bp, Homo sapiens
  Payload ID: 2372
  Gene Symbol: CPT1A
  Gene Name: carnitine palmitoyltransferase 1A (liver)
  Uniprot ID: P50416
  ENST ID: ENST00000376618
  CDS Start-End: 171-2441
ggacccgcctcagccaatccgctgctgccggcgtcgggtgcgctcggcctcgcccgcggccctccttccccggctcccgctcgccgctcgttcactccaccgccgccgccgccgccgccgctgccgctgccgctgccgcacctccgtagctgactcggtactctctgaagatggcagaagctcaccaagctgtggcctttcagttcacggtcactccggacgggattgacctgcggctgagccatgaagctcttagacaaatctatctctctggacttcattcctggaaaaagaagttcatcagattcaagaacggcatcatcactggcgtgtacccggcaagcccctccagttggcttatcgtggtggtgggcgtgatgacaacgatgtacgccaagatcgacccctcgttaggaataattgcaaaaatcaatcggactctggaaacggccaactgcatgtccagccagacgaagaacgtggtcagcggcgtgctgtttggcaccggcctgtgggtggccctcatcgtcaccatgcgctactccctgaaagtgctgctctcctaccacgggtggatgttcactgagcacggcaagatgagtcgtgccaccaagatctggatgggtatggtcaagatcttttcaggccgaaaacccatgttgtacagcttccagacatcgctgcctcgcctgccggtcccggctgtcaaagacactgtgaacaggtatctacagtcggtgaggcctcttatgaaggaagaagacttcaaacggatgacagcacttgctcaagattttgctgtcggtcttggaccaagattacagtggtatttgaagttaaaatcctggtgggctacaaattacgtgagcgactggtgggaggagtacatctacctccgaggacgagggccgctcatggtgaacagcaactattatgccatggatctgctgtatatccttccaactcacattcaggcagcaagagccggcaacgccatccatgccatcctgctttacaggcgcaaactggaccgggaggaaatcaaaccaattcgtcttttgggatccacgattccactctgctccgctcagtgggagcggatgtttaatacttcccggatcccaggagaggagacagacaccatccagcacatgagagacagcaagcacatcgtcgtgtaccatcgaggacgctacttcaaggtctggctctaccatgatgggcggctgctgaagccccgggagatggagcagcagatgcagaggatcctggacaatacctcggagcctcagcccggggaggccaggctggcagccctcaccgcaggagacagagttccctgggccaggtgtcgtcaggcctattttggacgtgggaaaaataagcagtctcttgatgctgtggagaaagcagcgttctttgtgacgttagatgaaactgaagaaggatacagaagtgaagacccggatacgtcaatggacagctacgccaaatctctactacacggccgatgttacgacaggtggtttgacaagtcgttcacgtttgttgtcttcaaaaacgggaagatgggcctcaacgctgaacactcctgggcagatgcgccgatcgtggcccacctttgggagtacgtcatgtccattgacagcctccagctgggctatgcggaggatgggcactgcaaaggcgacatcaatccgaacattccgtaccccaccaggctgcagtgggacatcccgggggaatgtcaagaggttatagagacctccctgaacaccgcaaatcttctggcaaacgacgtggatttccattccttcccattcgtagcctttggtaaaggaatcatcaagaaatgtcgcacgagcccagacgcctttgtgcagctggccctccagctggcgcactacaaggacatgggcaagttttgcctcacatacgaggcctccatgacccggctcttccgagaggggaggacggagaccgtgcgctcctgcaccactgagtcatgcgacttcgtgcgggccatggtggacccggcccagacggtggaacagaggctgaagttgttcaagttggcgtctgagaagcatcagcatatgtatcgcctcgccatgaccggctctgggatcgatcgtcacctcttctgcctttacgtggtgtctaaatatctcgctgtggagtcccctttccttaaggaagttttatctgagccttggagattatcaacaagccagacccctcagcagcaagtggagctgtttgacttggagaataacccagagtacgtgtccagcggagggggctttggaccggttgctgatgacggctatggtgtgtcgtacatccttgtgggagagaacctcatcaatttccacatttcttccaagttctcttgccctgagacggggattataagtcaaggaccaagttcagatacttgagacaaagtggaaagtctcagcatatggaaacaaggccttggaggagaccatggacatcaccaagttcatgtgctgggctggaaagaaaagcctgttgattttcacttgctgtgcatttattcatccattccattgcctcaatgctgagaacagtgcctgacacataaaagatgctcaataaatatgttaaaagt

SEQ ID NO: 114437 - DNA, 2496 bp, Homo sapiens
  Payload ID: 2372
  Gene Symbol: CPT1A
  Gene Name: carnitine palmitoyltransferase 1A (liver)
  Uniprot ID: P50416
  ENST ID: ENST00000540367
  CDS Start-End: 30-2300
ctccttctccttccaggtactctctgaagatggcagaagctcaccaagctgtggcctttcagttcacggtcactccggacgggattgacctgcggctgagccatgaagctcttagacaaatctatctctctggacttcattcctggaaaaagaagttcatcagattcaagaacggcatcatcactggcgtgtacccggcaagcccctccagttggcttatcgtggtggtgggcgtgatgacaacgatgtacgccaagatcgacccctcgttaggaataattgcaaaaatcaatcggactctggaaacggccaactgcatgtccagccagacgaagaacgtggtcagcggcgtgctgtttggcaccggcctgtgggtggccctcatcgtcaccatgcgctactccctgaaagtgctgctctcctaccacgggtggatgttcactgagcacggcaagatgagtcgtgccaccaagatctggatgggtatggtcaagatcttttcaggccgaaaacccatgttgtacagcttccagacatcgctgcctcgcctgccggtcccggctgtcaaagacactgtgaacaggtatctacagtcggtgaggcctcttatgaaggaagaagacttcaaacggatgacagcacttgctcaagattttgctgtcggtcttggaccaagattacagtggtatttgaagttaaaatcctggtgggctacaaattacgtgagcgactggtgggaggagtacatctacctccgaggacgagggccgctcatggtgaacagcaactattatgccatggatctgctgtatatccttccaactcacattcaggcagcaagagccggcaacgccatccatgccatcctgctttacaggcgcaaactggaccgggaggaaatcaaaccaattcgtcttttgggatccacgattccactctgctccgctcagtgggagcggatgtttaatacttcccggatcccaggagaggagacagacaccatccagcacatgagagacagcaagcacatcgtcgtgtaccatcgaggacgctacttcaaggtctggctctaccatgatgggcggctgctgaagccccgggagatggagcagcagatgcagaggatcctggacaatacctcggagcctcagcccggggaggccaggctggcagccctcaccgcaggagacagagttccctgggccaggtgtcgtcaggcctattttggacgtgggaaaaataagcagtctcttgatgctgtggagaaagcagcgttctttgtgacgttagatgaaactgaagaaggatacagaagtgaagacccggatacgtcaatggacagctacgccaaatctctactacacggccgatgttacgacaggtggtttgacaagtcgttcacgtttgttgtcttcaaaaacgggaagatgggcctcaacgctgaacactcctgggcagatgcgccgatcgtggcccacctttgggagtacgtcatgtccattgacagcctccagctgggctatgcggaggatgggcactgcaaaggcgacatcaatccgaacattccgtaccccaccaggctgcagtgggacatcccgggggaatgtcaagaggttatagagacctccctgaacaccgcaaatcttctggcaaacgacgtggatttccattccttcccattcgtagcctttggtaaaggaatcatcaagaaatgtcgcacgagcccagacgcctttgtgcagctggccctccagctggcgcactacaaggacatgggcaagttttgcctcacatacgaggcctccatgacccggctcttccgagaggggaggacggagaccgtgcgctcctgcaccactgagtcatgcgacttcgtgcgggccatggtggacccggcccagacggtggaacagaggctgaagttgttcaagttggcgtctgagaagcatcagcatatgtatcgcctcgccatgaccggctctgggatcgatcgtcacctcttctgcctttacgtggtgtctaaatatctcgctgtggagtcccctttccttaaggaagttttatctgagccttggagattatcaacaagccagacccctcagcagcaagtggagctgtttgacttggagaataacccagagtacgtgtccagcggagggggctttggaccggttgctgatgacggctatggtgtgtcgtacatccttgtgggagagaacctcatcaatttccacatttcttccaagttctcttgccctgagacggggattataagtcaaggaccaagttcagatacttgagacaaagtggaaagtctcagcatatggaaacaaggccttggaggagaccatggacatcaccaagttcatgtgctgggctggaaagaaaagcctgttgattttcacttgctgtgcatttattcatccattccattgcctcaatgctgagaacagtgcctgacacataaaagatgctcaataaatatgttaaaagtaa

SEQ ID NO: 114438 - DNA, 2382 bp, Homo sapiens
  Payload ID: 2372
  Gene Symbol: CPT1A
  Gene Name: carnitine palmitoyltransferase 1A (liver)
  Uniprot ID: P50416
  ENST ID: ENST00000539743
  CDS Start-End: 30-2351
ctccttctccttccaggtactctctgaagatggcagaagctcaccaagctgtggcctttcagttcacggtcactccggacgggattgacctgcggctgagccatgaagctcttagacaaatctatctctctggacttcattcctggaaaaagaagttcatcagattcaagaacggcatcatcactggcgtgtacccggcaagcccctccagttggcttatcgtggtggtgggcgtgatgacaacgatgtacgccaagatcgacccctcgttaggaataattgcaaaaatcaatcggactctggaaacggccaactgcatgtccagccagacgaagaacgtggtcagcggcgtgctgtttggcaccggcctgtgggtggccctcatcgtcaccatgcgctactccctgaaagtgctgctctcctaccacgggtggatgttcactgagcacggcaagatgagtcgtgccaccaagatctggatgggtatggtcaagatcttttcaggccgaaaacccatgttgtacagcttccagacatcgctgcctcgcctgccggtcccggctgtcaaagacactgtgaacaggtatctacagtcggtgaggcctcttatgaaggaagaagacttcaaacggatgacagcacttgctcaagattttgctgtcggtcttggaccaagattacagtggtatttgaagttaaaatcctggtgggctacaaattacgtgagcgactggtgggaggagtacatctacctccgaggacgagggccgctcatggtgaacagcaactattatgccatggatctgctgtatatccttccaactcacattcaggcagcaagagccggcaacgccatccatgccatcctgctttacaggcgcaaactggaccgggaggaaatcaaaccaattcgtcttttgggatccacgattccactctgctccgctcagtgggagcggatgtttaatacttcccggatcccaggagaggagacagacaccatccagcacatgagagacagcaagcacatcgtcgtgtaccatcgaggacgctacttcaaggtctggctctaccatgatgggcggctgctgaagccccgggagatggagcagcagatgcagaggatcctggacaatacctcggagcctcagcccggggaggccaggctggcagccctcaccgcaggagacagagttccctgggccaggtgtcgtcaggcctattttggacgtgggaaaaataagcagtctcttgatgctgtggagaaagcagcgttctttgtgacgttagatgaaactgaagaaggatacagaagtgaagacccggatacgtcaatggacagctacgccaaatctctactacacggccgatgttacgacaggtggtttgacaagtcgttcacgtttgttgtcttcaaaaacgggaagatgggcctcaacgctgaacactcctgggcagatgcgccgatcgtggcccacctttgggagtacgtcatgtccattgacagcctccagctgggctatgcggaggatgggcactgcaaaggcgacatcaatccgaacattccgtaccccaccaggctgcagtgggacatcccgggggaatgtcaagaggttatagagacctccctgaacaccgcaaatcttctggcaaacgacgtggatttccattccttcccattcgtagcctttggtaaaggaatcatcaagaaatgtcgcacgagcccagacgcctttgtgcagctggccctccagctggcgcactacaaggacatgggcaagttttgcctcacatacgaggcctccatgacccggctcttccgagaggggaggacggagaccgtgcgctcctgcaccactgagtcatgcgacttcgtgcgggccatggtggacccggcccagacggtggaacagaggctgaagttgttcaagttggcgtctgagaagcatcagcatatgtatcgcctcgccatgaccggctctgggatcgatcgtcacctcttctgcctttacgtggtgtctaaatatctcgctgtggagtcccctttccttaaggaagttttatctgagccttggagattatcaacaagccagacccctcagcagcaagtggagctgtttgacttggagaataacccagagtacgtgtccagcggagggggctttggaccggttgctgatgacggctatggtgtgtcgtacatccttgtgggagagaacctcatcaatttccacatttcttccaagttctcttgccctgagacggattctcatcgctttggaaggcacctgaaagaagcaatgactgacatcatcactttgtttggtctcagttctaattccaaaaagtaattccactggagctgctgggaaggaaaacgag

SEQ ID NO: 114439 - DNA, 617 bp, Homo sapiens
  Payload ID: 2372
  Gene Symbol: CPT1A
  Gene Name: carnitine palmitoyltransferase 1A (liver)
  ENST ID: ENST00000538994
  CDS Start-End: 103-339
ccaagattacagtggtatttgaagttaaaatcctggtgggctacaaattacgtgagcgactggtgggaggagtacatctacctccgaggacgagggccgctcatggtgaacagcaactattatgccatggatctgctgtatatccttccaactcacattcaggcagcaagagccggcaacgccatccatgccatcctgctttacaggcgcaaactggaccgggaggaaatcaaaccaattcgtcttttgggatccacgattccactctgctccgctcagtgggagcggatgtttaatacttcccggatcccaggagaggagacagacgatctgccttgatcagctgtcactgtgcatccccactgagcagtgcttaagaggacttgataaatattcgtggagtgaacgtacttcatcacatttctgtgatgtttaagcttactgaggagcttaaattactctgttttagtagtttttacggaatggcttggtttcgtaattttccactttctttctcagaacatttctcgggttctcagaaacaattatcggaatgtttctcagcatattttctaagttgccctattgtcattaattaataaaaagttactatacgg

SEQ ID NO: 114440 - DNA, 499 bp, Homo sapiens
  Payload ID: 2372
  Gene Symbol: CPT1A
  Gene Name: carnitine palmitoyltransferase 1A (liver)
  ENST ID: ENST00000569129
  CDS Start-End: 147-499
agacgcgccctgggctcttgagcgcggtgcctgcgtttctggctcgttggatgcagcatctgtcatcagaagcactgagcaccgagctgtccccacagctgggcaccgcagggctcgaccttcccacggagaggtactctctgaagatggcagaagctcaccaagctgtggcctttcagttcacggtcactccggacgggattgacctgcggctgagccatgaagctcttagacaaatctatctctctggacttcattcctggaaaaagaagttcatcagattcaagaacggcatcatcactggcgtgtacccggcaagcccctccagttggcttatcgtggtggtgggcgtgatgacaacgatgtacgccaagatcgacccctcgttaggaataattgcaaaaatcaatcggactctggaaacggccaactgcatgtccagccagacgaagaacgtggtcagcggcgtgctgtttggcaccggcctgtgggtggccct

SEQ ID NO: 114441 - DNA, 559 bp, Homo sapiens
  Payload ID: 2372
  Gene Symbol: CPT1A
  Gene Name: carnitine palmitoyltransferase 1A (liver)
  ENST ID: ENST00000561996
  CDS Start-End: 280-559
gagaaagattactctagtttcagaggcagacatggagacgtttttggccccagggaactgaggctcaggcccggagctccccgggaggcctcgttctctgcttctttattaatagactcagctacgcagccgcgggagccgcagacccgggcaggagagctgcagcgtggtcggcgggaggggaataaggcctccccagtgcggctgcagttgcaggccggcgcgggctcgttgcagctgccgagagcccggccaccatggcacaggtactctctgaagatggcagaagctcaccaagctgtggcctttcagttcacggtcactccggacgggattgacctgcggctgagccatgaagctcttagacaaatctatctctctggacttcattcctggaaaaagaagttcatcagattcaagaacggcatcatcactggcgtgtacccggcaagcccctccagttggcttatcgtggtggtgggcgtgatgacaacgatgtacgccaagatcgacccctcgttaggaataattgcaaaaatcaatcggactctggaaacgg

SEQ ID NO: 114442 - DNA, 511 bp, Homo sapiens
  Payload ID: 2372
  Gene Symbol: CPT1A
  Gene Name: carnitine palmitoyltransferase 1A (liver)
  ENST ID: ENST00000565318
  CDS Start-End: 108-511
gagacggggtttcgccatgttgcccaggctggtcttgagttcctggactcaagcgatcctcccacgtcagcctcccaaagtgctgggattacaggtactctctgaagatggcagaagctcaccaagctgtggcctttcagttcacggtcactccggacgggattgacctgcggctgagccatgaagctcttagacaaatctatctctctggacttcattcctggaaaaagaagttcatcagattcaagaacggcatcatcactggcgtgtacccggcaagcccctccagttggcttatcgtggtggtgggcgtgatgacaacgatgtacgccaagatcgacccctcgttaggaataattgcaaaaatcaatcggactctggaaacggccaactgcatgtccagccagacgaagaacgtggtcagcggcgtgctgtttggcaccggcctgtgggtggccctcatcgtcaccatgcgctactccctgaaagtgctgctctcctaccacgggtg

SEQ ID NO: 114443 - DNA, 2592 bp, Homo sapiens
  Payload ID: 2373
  Gene Symbol: CPT1B
  Gene Name: carnitine palmitoyltransferase 1B (muscle)
  Uniprot ID: Q92523
  ENST ID: ENST00000312108
  CDS Start-End: 52-2370
gccccacgcacggacaggagtgaacccgagctgtgccgaccaacccccaggatggcggaagctcaccaggccgtggccttccagttcacggtgaccccagacggggtcgacttccggctcagtcgggaggccctgaaacacgtctacctgtctgggatcaactcctggaagaaacgcctgatccgcatcaagaatggcatcctcaggggcgtgtaccctggcagccccaccagctggctggtcgtcatcatggcaacagtgggttcctccttctgcaacgtggacatctccttggggctggtcagttgcatccagagatgcctccctcaggggtgtggcccctaccagaccccgcagacccgggcacttctcagcatggccatcttctccacgggcgtctgggtgacgggcatcttcttcttccgccaaaccctgaagctgcttctctgctaccatgggtggatgtttgagatgcatggcaagaccagcaacttgaccaggatctgggctatgtgtatccgccttctatccagccggcaccctatgctctacagcttccagacatctctgcccaagcttcctgtgcccagggtgtcagccacaattcagcggtacctagagtctgtgcgccccttgttggatgatgaggaatattaccgcatggagttgctggccaaagaattccaggacaagactgcccccaggctgcagaaatacctggtgctcaagtcatggtgggcaagtaactatgtgagtgactggtgggaagagtacatctaccttcgaggcaggagccctctcatggtgaacagcaactattatgtcatggaccttgtgctcatcaagaatacagacgtgcaggcagcccgcctgggaaacatcatccacgccatgatcatgtatcgccgtaaactggaccgtgaagaaatcaagcctgtgatggcactgggcatagtgcctatgtgctcctaccagatggagaggatgttcaacaccactcggatcccgggcaaggacacagatgtgctacagcacctctcagacagccggcacgtggctgtctaccacaagggacgcttcttcaagctgtggctctatgagggcgcccgtctgctcaagcctcaggatctggagatgcagttccagaggatcctggacgacccctccccacctcagcctggggaggagaagctggcagccctcactgcaggaggaagggtggagtgggcgcaggcacgccaggccttctttagctctggaaagaataaggctgccttggaggccatcgagcgtgccgctttcttcgtggccctggatgaggaatcctactcctatgaccccgaagatgaggccagcctcagcctctatggcaaggccctgctacatggcaactgctacaacaggtggtttgacaaatccttcactctcatttccttcaagaatggccagttgggtctcaatgcagagcatgcgtgggcagatgctcccatcattgggcacctctgggagtttgtcctgggcacagacagcttccacctgggctacacggagaccgggcactgcctgggcaaaccgaaccctgcgctcgcacctcctacacggctgcagtgggacattccaaaacagtgccaggcggtcatcgagagttcctaccaggtggccaaggcgttggcagacgacgtggagttgtactgcttccagttcctgccctttggcaaaggcctcatcaagaagtgccggaccagccctgatgcctttgtgcagatcgcgctgcagctggctcacttccgggacaggggtaagttctgcctgacctatgaggcctcaatgaccagaatgttccgggagggacggactgagactgtgcgttcctgtaccagcgagtccacagcctttgtgcaggccatgatggaggggtcccacacaaaagcagacctgcgagatctcttccagaaggctgctaagaagcaccagaatatgtaccgcctggccatgaccggggcagggatcgacaggcacctcttctgcctttacttggtctccaagtacctaggagtcagctctcctttccttgctgaggtgctctcggaaccctggcgtctctccaccagccagatcccccaatcccagatccgcatgttcgacccagagcagcaccccaatcacctgggcgctggaggtggctttggccctgtagcagatgatggctatggagtttcctacatgattgcaggcgagaacacgatcttcttccacatctccagcaagttctcaagctcagagacgaacgcccagcgctttggaaaccacatccgcaaagccctgctggacattgctgatcttttccaagttcccaaggcctacagctgaagcccttaggtacctgtgttttgtttgggaactcggaggccctccccctcccccagctcagaccacagaggtggcaagagaagggctgaagctggaagactgttcatgagggacttgtgtgacctgctttgaaatgtgtgactctgctgagtgacgtaggctctgagatagctgtccacgcccacgtgtttgcttggaataaatacttgcctcagaaccttc

SEQ ID NO: 114444 - DNA, 2319 bp, Homo sapiens
  Payload ID: 2373
  Gene Symbol: CPT1B
  Gene Name: carnitine palmitoyltransferase 1B (muscle)
  Uniprot ID: Q92523
  ENST ID: ENST00000360719
  CDS Start-End: 1-2319
atggcggaagctcaccaggccgtggccttccagttcacggtgaccccagacggggtcgacttccggctcagtcgggaggccctgaaacacgtctacctgtctgggatcaactcctggaagaaacgcctgatccgcatcaagaatggcatcctcaggggcgtgtaccctggcagccccaccagctggctggtcgtcatcatggcaacagtgggttcctccttctgcaacgtggacatctccttggggctggtcagttgcatccagagatgcctccctcaggggtgtggcccctaccagaccccgcagacccgggcacttctcagcatggccatcttctccacgggcgtctgggtgacgggcatcttcttcttccgccaaaccctgaagctgcttctctgctaccatgggtggatgtttgagatgcatggcaagaccagcaacttgaccaggatctgggctatgtgtatccgccttctatccagccggcaccctatgctctacagcttccagacatctctgcccaagcttcctgtgcccagggtgtcagccacaattcagcggtacctagagtctgtgcgccccttgttggatgatgaggaatattaccgcatggagttgctggccaaagaattccaggacaagactgcccccaggctgcagaaatacctggtgctcaagtcatggtgggcaagtaactatgtgagtgactggtgggaagagtacatctaccttcgaggcaggagccctctcatggtgaacagcaactattatgtcatggaccttgtgctcatcaagaatacagacgtgcaggcagcccgcctgggaaacatcatccacgccatgatcatgtatcgccgtaaactggaccgtgaagaaatcaagcctgtgatggcactgggcatagtgcctatgtgctcctaccagatggagaggatgttcaacaccactcggatcccgggcaaggacacagatgtgctacagcacctctcagacagccggcacgtggctgtctaccacaagggacgcttcttcaagctgtggctctatgagggcgcccgtctgctcaagcctcaggatctggagatgcagttccagaggatcctggacgacccctccccacctcagcctggggaggagaagctggcagccctcactgcaggaggaagggtggagtgggcgcaggcacgccaggccttctttagctctggaaagaataaggctgccttggaggccatcgagcgtgccgctttcttcgtggccctggatgaggaatcctactcctatgaccccgaagatgaggccagcctcagcctctatggcaaggccctgctacatggcaactgctacaacaggtggtttgacaaatccttcactctcatttccttcaagaatggccagttgggtctcaatgcagagcatgcgtgggcagatgctcccatcattgggcacctctgggagtttgtcctgggcacagacagcttccacctgggctacacggagaccgggcactgcctgggcaaaccgaaccctgcgctcgcacctcctacacggctgcagtgggacattccaaaacagtgccaggcggtcatcgagagttcctaccaggtggccaaggcgttggcagacgacgtggagttgtactgcttccagttcctgccctttggcaaaggcctcatcaagaagtgccggaccagccctgatgcctttgtgcagatcgcgctgcagctggctcacttccgggacaggggtaagttctgcctgacctatgaggcctcaatgaccagaatgttccgggagggacggactgagactgtgcgttcctgtaccagcgagtccacagcctttgtgcaggccatgatggaggggtcccacacaaaagcagacctgcgagatctcttccagaaggctgctaagaagcaccagaatatgtaccgcctggccatgaccggggcagggatcgacaggcacctcttctgcctttacttggtctccaagtacctaggagtcagctctcctttccttgctgaggtgctctcggaaccctggcgtctctccaccagccagatcccccaatcccagatccgcatgttcgacccagagcagcaccccaatcacctgggcgctggaggtggctttggccctgtagcagatgatggctatggagtttcctacatgattgcaggcgagaacacgatcttcttccacatctccagcaagttctcaagctcagagacgaacgcccagcgctttggaaaccacatccgcaaagccctgctggacattgctgatcttttccaagttcccaaggcctacagctga

SEQ ID NO: 114445 - DNA, 2662 bp, Homo sapiens
  Payload ID: 2373
  Gene Symbol: CPT1B
  Gene Name: carnitine palmitoyltransferase 1B (muscle)
  Uniprot ID: Q92523
  ENST ID: ENST00000395650
  CDS Start-End: 90-2408
aggcctgaaggacgtggggacacgggccagagtggctggccccacgcacggacaggagtgaacccgagctgtgccgaccaacccccaggatggcggaagctcaccaggccgtggccttccagttcacggtgaccccagacggggtcgacttccggctcagtcgggaggccctgaaacacgtctacctgtctgggatcaactcctggaagaaacgcctgatccgcatcaagaatggcatcctcaggggcgtgtaccctggcagccccaccagctggctggtcgtcatcatggcaacagtgggttcctccttctgcaacgtggacatctccttggggctggtcagttgcatccagagatgcctccctcaggggtgtggcccctaccagaccccgcagacccgggcacttctcagcatggccatcttctccacgggcgtctgggtgacgggcatcttcttcttccgccaaaccctgaagctgcttctctgctaccatgggtggatgtttgagatgcatggcaagaccagcaacttgaccaggatctgggctatgtgtatccgccttctatccagccggcaccctatgctctacagcttccagacatctctgcccaagcttcctgtgcccagggtgtcagccacaattcagcggtacctagagtctgtgcgccccttgttggatgatgaggaatattaccgcatggagttgctggccaaagaattccaggacaagactgcccccaggctgcagaaatacctggtgctcaagtcatggtgggcaagtaactatgtgagtgactggtgggaagagtacatctaccttcgaggcaggagccctctcatggtgaacagcaactattatgtcatggaccttgtgctcatcaagaatacagacgtgcaggcagcccgcctgggaaacatcatccacgccatgatcatgtatcgccgtaaactggaccgtgaagaaatcaagcctgtgatggcactgggcatagtgcctatgtgctcctaccagatggagaggatgttcaacaccactcggatcccgggcaaggacacagatgtgctacagcacctctcagacagccggcacgtggctgtctaccacaagggacgcttcttcaagctgtggctctatgagggcgcccgtctgctcaagcctcaggatctggagatgcagttccagaggatcctggacgacccctccccacctcagcctggggaggagaagctggcagccctcactgcaggaggaagggtggagtgggcgcaggcacgccaggccttctttagctctggaaagaataaggctgccttggaggccatcgagcgtgccgctttcttcgtggccctggatgaggaatcctactcctatgaccccgaagatgaggccagcctcagcctctatggcaaggccctgctacatggcaactgctacaacaggtggtttgacaaatccttcactctcatttccttcaagaatggccagttgggtctcaatgcagagcatgcgtgggcagatgctcccatcattgggcacctctgggagtttgtcctgggcacagacagcttccacctgggctacacggagaccgggcactgcctgggcaaaccgaaccctgcgctcgcacctcctacacggctgcagtgggacattccaaaacagtgccaggcggtcatcgagagttcctaccaggtggccaaggcgttggcagacgacgtggagttgtactgcttccagttcctgccctttggcaaaggcctcatcaagaagtgccggaccagccctgatgcctttgtgcagatcgcgctgcagctggctcacttccgggacaggggtaagttctgcctgacctatgaggcctcaatgaccagaatgttccgggagggacggactgagactgtgcgttcctgtaccagcgagtccacagcctttgtgcaggccatgatggaggggtcccacacaaaagcagacctgcgagatctcttccagaaggctgctaagaagcaccagaatatgtaccgcctggccatgaccggggcagggatcgacaggcacctcttctgcctttacttggtctccaagtacctaggagtcagctctcctttccttgctgaggtgctctcggaaccctggcgtctctccaccagccagatcccccaatcccagatccgcatgttcgacccagagcagcaccccaatcacctgggcgctggaggtggctttggccctgtagcagatgatggctatggagtttcctacatgattgcaggcgagaacacgatcttcttccacatctccagcaagttctcaagctcagagacgaacgcccagcgctttggaaaccacatccgcaaagccctgctggacattgctgatcttttccaagttcccaaggcctacagctgaaggttggagaaatgccagctgccctttcgtccccacactgtggaggaagggacctgtggcagctcacaggcatgaggggtggccgtgcacaggtgcccaggctccaaggacagctccggcagcaggtcctcgctgggcagatgctgctccctgagggcccaggtggtggaggtggggttggagcaggaagggaattttgatttttttttttcttgatagatactaataaaaataaggctgtgtaattttctctc

SEQ ID NO: 114446 - DNA, 2647 bp, Homo sapiens
  Payload ID: 2373
  Gene Symbol: CPT1B
  Gene Name: carnitine palmitoyltransferase 1B (muscle)
  Uniprot ID: Q92523
  ENST ID: ENST00000405237
  CDS Start-End: 106-2424
gtcgcggactggctgggggcgtctcggcgcggctggcggcggggccggcctaagcgcgcccgcgcacccatctgcccccgtcctaggtgccgaccaacccccaggatggcggaagctcaccaggccgtggccttccagttcacggtgaccccagacggggtcgacttccggctcagtcgggaggccctgaaacacgtctacctgtctgggatcaactcctggaagaaacgcctgatccgcatcaagaatggcatcctcaggggcgtgtaccctggcagccccaccagctggctggtcgtcatcatggcaacagtgggttcctccttctgcaacgtggacatctccttggggctggtcagttgcatccagagatgcctccctcaggggtgtggcccctaccagaccccgcagacccgggcacttctcagcatggccatcttctccacgggcgtctgggtgacgggcatcttcttcttccgccaaaccctgaagctgcttctctgctaccatgggtggatgtttgagatgcatggcaagaccagcaacttgaccaggatctgggctatgtgtatccgccttctatccagccggcaccctatgctctacagcttccagacatctctgcccaagcttcctgtgcccagggtgtcagccacaattcagcggtacctagagtctgtgcgccccttgttggatgatgaggaatattaccgcatggagttgctggccaaagaattccaggacaagactgcccccaggctgcagaaatacctggtgctcaagtcatggtgggcaagtaactatgtgagtgactggtgggaagagtacatctaccttcgaggcaggagccctctcatggtgaacagcaactattatgtcatggaccttgtgctcatcaagaatacagacgtgcaggcagcccgcctgggaaacatcatccacgccatgatcatgtatcgccgtaaactggaccgtgaagaaatcaagcctgtgatggcactgggcatagtgcctatgtgctcctaccagatggagaggatgttcaacaccactcggatcccgggcaaggacacagatgtgctacagcacctctcagacagccggcacgtggctgtctaccacaagggacgcttcttcaagctgtggctctatgagggcgcccgtctgctcaagcctcaggatctggagatgcagttccagaggatcctggacgacccctccccacctcagcctggggaggagaagctggcagccctcactgcaggaggaagggtggagtgggcgcaggcacgccaggccttctttagctctggaaagaataaggctgccttggaggccatcgagcgtgccgctttcttcgtggccctggatgaggaatcctactcctatgaccccgaagatgaggccagcctcagcctctatggcaaggccctgctacatggcaactgctacaacaggtggtttgacaaatccttcactctcatttccttcaagaatggccagttgggtctcaatgcagagcatgcgtgggcagatgctcccatcattgggcacctctgggagtttgtcctgggcacagacagcttccacctgggctacacggagaccgggcactgcctgggcaaaccgaaccctgcgctcgcacctcctacacggctgcagtgggacattccaaaacagtgccaggcggtcatcgagagttcctaccaggtggccaaggcgttggcagacgacgtggagttgtactgcttccagttcctgccctttggcaaaggcctcatcaagaagtgccggaccagccctgatgcctttgtgcagatcgcgctgcagctggctcacttccgggacaggggtaagttctgcctgacctatgaggcctcaatgaccagaatgttccgggagggacggactgagactgtgcgttcctgtaccagcgagtccacagcctttgtgcaggccatgatggaggggtcccacacaaaagcagacctgcgagatctcttccagaaggctgctaagaagcaccagaatatgtaccgcctggccatgaccggggcagggatcgacaggcacctcttctgcctttacttggtctccaagtacctaggagtcagctctcctttccttgctgaggtgctctcggaaccctggcgtctctccaccagccagatcccccaatcccagatccgcatgttcgacccagagcagcaccccaatcacctgggcgctggaggtggctttggccctgtagcagatgatggctatggagtttcctacatgattgcaggcgagaacacgatcttcttccacatctccagcaagttctcaagctcagagacgaacgcccagcgctttggaaaccacatccgcaaagccctgctggacattgctgatcttttccaagttcccaaggcctacagctgaagcccttaggtacctgtgttttgtttgggaactcggaggccctccccctcccccagctcagaccacagaggtggcaagagaagggctgaagctggaagactgttcatgagggacttgtgtgacctgctttgaaatgtgtgactctgctgagtgacgtaggctctgagatagctgtccacgcccacgtgtttgcttggaataaatacttgcctcagaaccttca

SEQ ID NO: 114447 - DNA, 719 bp, Homo sapiens
  Payload ID: 2373
  Gene Symbol: CPT1B
  Gene Name: carnitine palmitoyltransferase 1B (muscle)
  ENST ID: ENST00000423069
  CDS Start-End: 1-279
ctcatggtgaacagcaactattatgtcatggaccttgtgctcatcaagaatacagacgtgcaggcagcccgcctgggaaacatcatccacgccatgatcatgtatcgccgtaaactggaccgtgaagaaatcaagcctgtgatggcactgggcatagtgcctatgtgctcctaccagatggagaggatgttcaacaccactcggatcccgggcaaggacacaggattgttggtgttgcgtgagagagagtggaagcacccagcacagggcctggtttaggacacacggatcccatccagggggcaggaaggcccaggcagaggccgagcaaaacaggatgtgctacagcacctctcagacagccggcacgtggctgtctaccacaagggacgcttcttcaagctgtggctctatgagggcgcccgtctgctcaagcctcaggatctggagatgcagttccagaggatcctggacgacccctccccacctcagcctggggaggagaagctggcagccctcactgcaggaggaagggtggagtgggcgcaggcacgccaggccttctttagctctggaaagaataaggctgccttggaggccatcgagcgtgccgctttcttcgtggccctggatgaggaatcctactcctatgaccccgaagatgaggccagcctcagcctctatggcaaggccctgctacatggcaactgctacaacag

SEQ ID NO: 114448 - DNA, 558 bp, Homo sapiens
  Payload ID: 2373
  Gene Symbol: CPT1B
  Gene Name: carnitine palmitoyltransferase 1B (muscle)
  ENST ID: ENST00000417176
  CDS Start-End: 183-558
acttccaggggcgcctctctcccctgcccgcgccctcgctgacgccccccaactccaggctgcccttcgccgtccttggggctcctggagctttcaaggcccaaatcccctgcaccacagtggctgtgcccacccggaaggctggcgcgaggatttggcggcggtgccgaccaacccccaggatggcggaagctcaccaggccgtggccttccagttcacggtgaccccagacggggtcgacttccggctcagtcgggaggccctgaaacacgtctacctgtctgggatcaactcctggaagaaacgcctgatccgcatcaagaatggcatcctcaggggcgtgtaccctggcagccccaccagctggctggtcgtcatcatggcaacagtgggttcctccttctgcaacgtggacatctccttggggctggtcagttgcatccagagatgcctccctcaggggtgtggcccctaccagaccccgcagacccgggcacttctcagcatggccatcttctccacgggcgtctgggtgacgggcatcttcttcttccgcc

SEQ ID NO: 114449 - DNA, 2217 bp, Homo sapiens
  Payload ID: 2373
  Gene Symbol: CPT1B
  Gene Name: carnitine palmitoyltransferase 1B (muscle)
  Uniprot ID: Q92523
  ENST ID: ENST00000457250
  CDS Start-End: 1-2217
atggcggaagctcaccaggccgtggccttccagttcacggtgaccccagacggggtcgacttccggctcagtcgggaggccctgaaacacgtctacctgtctgggatcaactcctggaagaaacgcctgatccgcatcaagaatggcatcctcaggggcgtgtaccctggcagccccaccagctggctggtcgtcatcatggcaacagtgggttcctccttctgcaacgtggacatctccttggggctggtcagttgcatccagagatgcctccctcaggggtgtggcccctaccagaccccgcagacccgggcacttctcagcatggccatcttctccacgggcgtctgggtgacgggcatcttcttcttccgccaaaccctgaagctgcttctctgctaccatgggtggatgtttgagatgcatggcaagaccagcaacttgaccaggatctgggcttacctagagtctgtgcgccccttgttggatgatgaggaatattaccgcatggagttgctggccaaagaattccaggacaagactgcccccaggctgcagaaatacctggtgctcaagtcatggtgggcaagtaactatgtgagtgactggtgggaagagtacatctaccttcgaggcaggagccctctcatggtgaacagcaactattatgtcatggaccttgtgctcatcaagaatacagacgtgcaggcagcccgcctgggaaacatcatccacgccatgatcatgtatcgccgtaaactggaccgtgaagaaatcaagcctgtgatggcactgggcatagtgcctatgtgctcctaccagatggagaggatgttcaacaccactcggatcccgggcaaggacacagatgtgctacagcacctctcagacagccggcacgtggctgtctaccacaagggacgcttcttcaagctgtggctctatgagggcgcccgtctgctcaagcctcaggatctggagatgcagttccagaggatcctggacgacccctccccacctcagcctggggaggagaagctggcagccctcactgcaggaggaagggtggagtgggcgcaggcacgccaggccttctttagctctggaaagaataaggctgccttggaggccatcgagcgtgccgctttcttcgtggccctggatgaggaatcctactcctatgaccccgaagatgaggccagcctcagcctctatggcaaggccctgctacatggcaactgctacaacaggtggtttgacaaatccttcactctcatttccttcaagaatggccagttgggtctcaatgcagagcatgcgtgggcagatgctcccatcattgggcacctctgggagtttgtcctgggcacagacagcttccacctgggctacacggagaccgggcactgcctgggcaaaccgaaccctgcgctcgcacctcctacacggctgcagtgggacattccaaaacagtgccaggcggtcatcgagagttcctaccaggtggccaaggcgttggcagacgacgtggagttgtactgcttccagttcctgccctttggcaaaggcctcatcaagaagtgccggaccagccctgatgcctttgtgcagatcgcgctgcagctggctcacttccgggacaggggtaagttctgcctgacctatgaggcctcaatgaccagaatgttccgggagggacggactgagactgtgcgttcctgtaccagcgagtccacagcctttgtgcaggccatgatggaggggtcccacacaaaagcagacctgcgagatctcttccagaaggctgctaagaagcaccagaatatgtaccgcctggccatgaccggggcagggatcgacaggcacctcttctgcctttacttggtctccaagtacctaggagtcagctctcctttccttgctgaggtgctctcggaaccctggcgtctctccaccagccagatcccccaatcccagatccgcatgttcgacccagagcagcaccccaatcacctgggcgctggaggtggctttggccctgtagcagatgatggctatggagtttcctacatgattgcaggcgagaacacgatcttcttccacatctccagcaagttctcaagctcagagacgaacgcccagcgctttggaaaccacatccgcaaagccctgctggacattgctgatcttttccaagttcccaaggcctacagctga

SEQ ID NO: 114450 - DNA, 2783 bp, Homo sapiens
  Payload ID: 2374
  Gene Symbol: CPT1C
  Gene Name: carnitine palmitoyltransferase 1C
  Uniprot ID: Q8TCG5
  ENST ID: ENST00000323446
  CDS Start-End: 246-2657
ggacctgaatacccggctagggacacgagagagaggaatcggggtttctgggtgacggtgatctcggggtgggcaggactccaaaggcccgtcgacccggtggtggactccttgcactgggattggacatatgcaagcgggagatttggggccggcgctcaaaatcggggggcgggggtggactcgggtttggaccccaggatccgatcagcggacccttgattcaacgtgggctccagcgtgacatggctgaagcgcaccaggccgtgggcttccgaccctcgctgacctcggacggggctgaagtggaactcagtgcccctgtgctgcaggagatctacctctctggcctgcgctcctggaaaaggcatctctcacgtttctggaatgactttctcaccggtgtgtttcctgccagccccctcagttggcttttcctcttcagtgccatccagcttgcctggttcctccagctggatccttccttaggactgatggagaagatcaaagagttgctgcctgactggggtggacaacaccacgggctccggggggtcctggcagccgcgctgtttgcctcgtgtttgtggggagccctgatcttcacactgcacgtggccctgaggctgcttctgtcctaccacggctggcttcttgagccccacggagccatgtcctcccccaccaagacctggctggccctggtccgcatcttctctggccgccacccgatgctgttcagttaccagcgctccctgccacgccagcccgtgccctctgtgcaggacaccgtgcgcaagtacctggagtcggtccggcccatcctctccgacgaggacttcgactggaccgcggtcctggcgcaggaattcctgaggctgcaggcgtcgctgctgcagtggtacctgcggctcaagtcctggtgggcgtccaattatgtcagtgactggtgggaggaatttgtgtacctgcgctcccgaaatccgctgatggtgaacagcaactattacatgatggacttcctgtatgtcacacccacgcctctgcaggcagctcgcgctgggaatgccgtccatgccctcctcctgtaccgccaccgcctgaaccgccaggagatacccccgactttgctgatgggaatgcgccccttatgctctgcccagtacgagaagatcttcaacaccacgcggattccaggggtccaaaaagactacatccgccacctccatgacagccaacacgtggctgtcttccaccggggccgattcttccgcatggggacccactcccgaaacagcctgctttccccgagagccctggagcagcagtttcagagaatcctggatgatccctcaccggcctgcccccacgaggaacatctggcagctctgacagctgctcccaggggcacgtgggcccaggtgcggacatccctgaagacccaggcagcggaggccctggaggcggtggaaggggccgctttctttgtgtcactggatgctgagcccgcggggctcaccagggaggacccggcagcgtcgttggatgcctacgcccatgctctgctggccggccggggccatgatcgctggtttgacaaatccttcaccctaatcgtcttctctaacgggaagctgggcctcagcgtggagcactcctgggccgactgccccatctcaggacacatgtgggagttcactctggctacagaatgctttcagctgggctactcaacagacggccactgcaaggggcacccggaccccacactaccccagccccagcggctgcaatgggaccttccagaccagatccactcctccatctctctagccctgaggggagccaagatcttgtctgaaaatgtcgactgccatgtcgttccattctccctatttggcaagagcttcatccgacgctgccacctctcttcagacagcttcatccagatcgccttgcaactggcccacttccgggacaggggtcaattctgcctgacttatgagtcggccatgactcgcttattcctggaaggccggacggagacggtgcggtcttgcacgagggaggcctgcaactttgtcagggccatggaggacaaagagaagacggacccacagtgcctcgccctgttccgcgtggcagtggacaagcaccaggctctgctgaaggcagccatgagcgggcagggagttgaccgccacctgtttgcgctgtacatcgtgtcccgattcctccacctgcagtcgcccttcctgacccaggtccattcggagcagtggcagctgtccaccagccagatccctgttcagcaaatgcatctgtttgacgtccacaattacccggactatgtttcctcaggcggtggattcgggcctgctgatgaccatggttatggtgtttcttatatcttcatgggggatggcatgatcaccttccacatctccagcaaaaaatcaagcacaaaaacggattcccacaggctggggcagcacattgaggacgcactgctggatgtggcctccctgttccaggcgggacagcattttaagcgccggttcagagggtcagggaaggagaactccaggcacaggtgtggatttctctcccgccagactggggcctccaaggcctcaatgacatccaccgacttctgactccttccagcaggcagctggcctctccaaggaataagggtgaaattgccacagctggctgacacaggacaggggcaactggtttggcaaccccacatccaggccaataaagatgtgtgagctggg

SEQ ID NO: 114451 - DNA, 2910 bp, Homo sapiens
  Payload ID: 2374
  Gene Symbol: CPT1C
  Gene Name: carnitine palmitoyltransferase 1C
  Uniprot ID: Q8TCG5
  ENST ID: ENST00000392518
  CDS Start-End: 373-2784
gaatacccggctagggacacgagagagaggaatcggggtttctgggtgacggtgatctcggggtgggcaggactccaaaggcccgtcgacccggtggtggactccttgcactgggattggacatatgcaagcgggagatttggggccggcgctcaaaatcggggggcgggggtggactcgggtttggaccccaggatccgatcagcggacccttgattcaacgtgaggtcccgaattgacgtccttccctcaaaacctccgggtctacaaaccaggaccctcaagacccttcaggtgcttagagaaggatgagctaggttatgtagtcctgggtcggcgcaaaaaggcagctgaaagcggctccagcgtgacatggctgaagcgcaccaggccgtgggcttccgaccctcgctgacctcggacggggctgaagtggaactcagtgcccctgtgctgcaggagatctacctctctggcctgcgctcctggaaaaggcatctctcacgtttctggaatgactttctcaccggtgtgtttcctgccagccccctcagttggcttttcctcttcagtgccatccagcttgcctggttcctccagctggatccttccttaggactgatggagaagatcaaagagttgctgcctgactggggtggacaacaccacgggctccggggggtcctggcagccgcgctgtttgcctcgtgtttgtggggagccctgatcttcacactgcacgtggccctgaggctgcttctgtcctaccacggctggcttcttgagccccacggagccatgtcctcccccaccaagacctggctggccctggtccgcatcttctctggccgccacccgatgctgttcagttaccagcgctccctgccacgccagcccgtgccctctgtgcaggacaccgtgcgcaagtacctggagtcggtccggcccatcctctccgacgaggacttcgactggaccgcggtcctggcgcaggaattcctgaggctgcaggcgtcgctgctgcagtggtacctgcggctcaagtcctggtgggcgtccaattatgtcagtgactggtgggaggaatttgtgtacctgcgctcccgaaatccgctgatggtgaacagcaactattacatgatggacttcctgtatgtcacacccacgcctctgcaggcagctcgcgctgggaatgccgtccatgccctcctcctgtaccgccaccgcctgaaccgccaggagatacccccgactttgctgatgggaatgcgccccttatgctctgcccagtacgagaagatcttcaacaccacgcggattccaggggtccaaaaagactacatccgccacctccatgacagccaacacgtggctgtcttccaccggggccgattcttccgcatggggacccactcccgaaacagcctgctttccccgagagccctggagcagcagtttcagagaatcctggatgatccctcaccggcctgcccccacgaggaacatctggcagctctgacagctgctcccaggggcacgtgggcccaggtgcggacatccctgaagacccaggcagcggaggccctggaggcggtggaaggggccgctttctttgtgtcactggatgctgagcccgcggggctcaccagggaggacccggcagcgtcgttggatgcctacgcccatgctctgctggccggccggggccatgatcgctggtttgacaaatccttcaccctaatcgtcttctctaacgggaagctgggcctcagcgtggagcactcctgggccgactgccccatctcaggacacatgtgggagttcactctggctacagaatgctttcagctgggctactcaacagacggccactgcaaggggcacccggaccccacactaccccagccccagcggctgcaatgggaccttccagaccagatccactcctccatctctctagccctgaggggagccaagatcttgtctgaaaatgtcgactgccatgtcgttccattctccctatttggcaagagcttcatccgacgctgccacctctcttcagacagcttcatccagatcgccttgcaactggcccacttccgggacaggggtcaattctgcctgacttatgagtcggccatgactcgcttattcctggaaggccggacggagacggtgcggtcttgcacgagggaggcctgcaactttgtcagggccatggaggacaaagagaagacggacccacagtgcctcgccctgttccgcgtggcagtggacaagcaccaggctctgctgaaggcagccatgagcgggcagggagttgaccgccacctgtttgcgctgtacatcgtgtcccgattcctccacctgcagtcgcccttcctgacccaggtccattcggagcagtggcagctgtccaccagccagatccctgttcagcaaatgcatctgtttgacgtccacaattacccggactatgtttcctcaggcggtggattcgggcctgctgatgaccatggttatggtgtttcttatatcttcatgggggatggcatgatcaccttccacatctccagcaaaaaatcaagcacaaaaacggattcccacaggctggggcagcacattgaggacgcactgctggatgtggcctccctgttccaggcgggacagcattttaagcgccggttcagagggtcagggaaggagaactccaggcacaggtgtggatttctctcccgccagactggggcctccaaggcctcaatgacatccaccgacttctgactccttccagcaggcagctggcctctccaaggaataagggtgaaattgccacagctggctgacacaggacaggggcaactggtttggcaaccccacatccaggccaataaagatgtgtgagctggg

SEQ ID NO: 114452 - DNA, 2785 bp, Homo sapiens
  Payload ID: 2374
  Gene Symbol: CPT1C
  Gene Name: carnitine palmitoyltransferase 1C
  Uniprot ID: Q8TCG5
  ENST ID: ENST00000405931
  CDS Start-End: 281-2659
ggaatcggggtttctgggtgacggtgatctcggggtgggcaggactccaaaggcccgtcgacccggtggtggactccttgcactgggattggacatatgcaagcgggagatttggggccggcgctcaaaatcggggggcgggggtggactcgggtttggaccccaggatccgatcagcggacccttgattcaacgtgaggtcccgaattgacgtccttccctcaaaacctccgggtctacaaaccaggaccctcaagacccttcagggctccagcgtgacatggctgaagcgcaccaggccgtgggcttccgaccctcgctgacctcggacggggctgaagtggaactcagtgcccctgtgctgcaggagatctacctctctggcctgcgctcctggaaaaggcatctctcacgtttctggaatgactttctcaccggtgtgtttcctgccagccccctcagttggcttttcctcttcagtgccatccagcttgcctggttcctccagctggatccttccttaggactgatggagaagatcaaagagttgctgcctgactggggtggacaacaccacgggctccggggggtcctggcagccgcgctgtttgcctcgtgtttgtggggagccctgatcttcacactgcacgtggccctgaggctgcttctgtcctaccacggctggcttcttgagccccacggagccatgtcctcccccaccaagacctggctggccctggtccgcatcttctctggccgccacccgatgctgttcagttaccagcgctccctgccacgccagcccgtgccctctgtgcaggacaccgtgcgcaagtacctggagtcggtccggcccatcctctccgacgaggacttcgactggaccgcggtcctggcgcaggaattcctgaggctgcaggcgtcgctgctgcagtggtacctgcggctcaagtcctggtgggcgtccaattatgtcagtgactggtgggaggaatttgtgtacctgcgctcccgaaatccgctgatggtgaacagcaactattacatgatggcagctcgcgctgggaatgccgtccatgccctcctcctgtaccgccaccgcctgaaccgccaggagatacccccgactttgctgatgggaatgcgccccttatgctctgcccagtacgagaagatcttcaacaccacgcggattccaggggtccaaaaagactacatccgccacctccatgacagccaacacgtggctgtcttccaccggggccgattcttccgcatggggacccactcccgaaacagcctgctttccccgagagccctggagcagcagtttcagagaatcctggatgatccctcaccggcctgcccccacgaggaacatctggcagctctgacagctgctcccaggggcacgtgggcccaggtgcggacatccctgaagacccaggcagcggaggccctggaggcggtggaaggggccgctttctttgtgtcactggatgctgagcccgcggggctcaccagggaggacccggcagcgtcgttggatgcctacgcccatgctctgctggccggccggggccatgatcgctggtttgacaaatccttcaccctaatcgtcttctctaacgggaagctgggcctcagcgtggagcactcctgggccgactgccccatctcaggacacatgtgggagttcactctggctacagaatgctttcagctgggctactcaacagacggccactgcaaggggcacccggaccccacactaccccagccccagcggctgcaatgggaccttccagaccagatccactcctccatctctctagccctgaggggagccaagatcttgtctgaaaatgtcgactgccatgtcgttccattctccctatttggcaagagcttcatccgacgctgccacctctcttcagacagcttcatccagatcgccttgcaactggcccacttccgggacaggggtcaattctgcctgacttatgagtcggccatgactcgcttattcctggaaggccggacggagacggtgcggtcttgcacgagggaggcctgcaactttgtcagggccatggaggacaaagagaagacggacccacagtgcctcgccctgttccgcgtggcagtggacaagcaccaggctctgctgaaggcagccatgagcgggcagggagttgaccgccacctgtttgcgctgtacatcgtgtcccgattcctccacctgcagtcgcccttcctgacccaggtccattcggagcagtggcagctgtccaccagccagatccctgttcagcaaatgcatctgtttgacgtccacaattacccggactatgtttcctcaggcggtggattcgggcctgctgatgaccatggttatggtgtttcttatatcttcatgggggatggcatgatcaccttccacatctccagcaaaaaatcaagcacaaaaacggattcccacaggctggggcagcacattgaggacgcactgctggatgtggcctccctgttccaggcgggacagcattttaagcgccggttcagagggtcagggaaggagaactccaggcacaggtgtggatttctctcccgccagactggggcctccaaggcctcaatgacatccaccgacttctgactccttccagcaggcagctggcctctccaaggaataagggtgaaattgccacagctggctgacacaggacaggggcaactggtttggcaaccccacatccaggccaataaagatgtgtgagctggg

SEQ ID NO: 114453 - DNA, 1059 bp, Homo sapiens
  Payload ID: 2374
  Gene Symbol: CPT1C
  Gene Name: carnitine palmitoyltransferase 1C
  ENST ID: ENST00000598396
  CDS Start-End: 289-1059
gagagagaggaatcggggtttctgggtgacggtgatctcggggtgggcaggactccaaaggcccgtcgacccggtggtggactccttgcactgggattggacatatgcaagcgggagatttggggccggcgctcaaaatcggggggcgggggtggactcgggtttggaccccaggatccgatcagcggacccttgattcaacgtgaggtcccgaattgacgtccttccctcaaaacctccgggtctacaaaccaggaccctcaagacccttcagggctccagcgtgacatggctgaagcgcaccaggccgtgggcttccgaccctcgctgacctcggacggggctgaagtggaactcagtgcccctgtgctgcaggagatctacctctctggcctgcgctcctggaaaaggcatctctcacgtttctggaatgactttctcaccggtgtgtttcctgccagccccctcagttggcttttcctcttcagtgccatccagcttgcctggttcctccagctggatccttccttaggactgatggagaagatcaaagagttgctgcctgactggggtggacaacaccacgggctccggggggtcctggcagccgcgctgtttgcctcgtgtttgtggggagccctgatcttcacactgcacgtggccctgaggctgcttctgtcctaccacggctggcttcttgagccccacggagccatgtcctcccccaccaagacctggctggccctggtccgcatcttctctggccgccacccgatgctgttcagttaccagcgctccctgccacgccagcccgtgccctctgtgcaggacaccgtgcgcaagtacctggagtcggtccggcccatcctctccgacgaggacttcgactggaccgcggtcctggcgcaggaattcctgaggctgcaggcgtcgctgctgcagtggtacctgcggctcaagtcctggtgggcgtccaattatgtcagtgactggtgggaggaatttgtgtacctgcgctcccgaaatccgctgatggtgaacagcaactattacatgatg

SEQ ID NO: 114454 - DNA, 620 bp, Homo sapiens
  Payload ID: 2374
  Gene Symbol: CPT1C
  Gene Name: carnitine palmitoyltransferase 1C
  ENST ID: ENST00000596922
  CDS Start-End: 208-414
tcggggtttctgggtgacggtgatctcggggtgggcaggactccaaaggcccgtcgacccggtggtggactccttgcactgggattggacatatgcaagcgggagatttggggccggcgctcaaaatcggggggcgggggtggactcgggtttggaccccaggatccgatcagcggacccttgattcaacgtgggctccagcgtgacatggctgaagcgcaccaggccgtgggcttccgaccctcgctgacctcggacggggctgaagtggaactcagtgcccctgtgctgcaggagatctacctctctggcctgcgctcctggaaaaggcatctctcacgtttctggggtcttacttactttgttacccaggctggagtgcagtgtcaccatcacagctcacttcatccctgaactcctgggctcaagcgatcctcctgcttcagccttccaagtagctgggactaagaatgactttctcaccggtgtgtttcctgccagccccctcagttggcttttcctcttcagtgccatccagcttgcctggttcctccagctggatccttccttaggactgatggagaagatcaaagagttgctgcctgactggggtggacaac

SEQ ID NO: 114455 - DNA, 503 bp, Homo sapiens
  Payload ID: 2374
  Gene Symbol: CPT1C
  Gene Name: carnitine palmitoyltransferase 1C
  ENST ID: ENST00000594038
  CDS Start-End: 184-390
aggagactaagagacaatgagctgagtgaggagcccaggaacccgggttccgaacagctgcgtagaatgcgagcggccaaatggtggagaatctggccggaggtcccgaattgacgtccttccctcaaaacctccgggtctacaaaccaggaccctcaagacccttcagggctccagcgtgacatggctgaagcgcaccaggccgtgggcttccgaccctcgctgacctcggacggggctgaagtggaactcagtgcccctgtgctgcaggagatctacctctctggcctgcgctcctggaaaaggcatctctcacgtttctggggtcttacttactttgttacccaggctggagtgcagtgtcaccatcacagctcacttcatccctgaactcctgggctcaagcgatcctcctgcttcagccttccaagtagctgggactaagaatgactttctcaccggtgtgtttcctgccagccccctcagttggcttttcctcttca

SEQ ID NO: 114456 - DNA, 754 bp, Homo sapiens
  Payload ID: 2374
  Gene Symbol: CPT1C
  Gene Name: carnitine palmitoyltransferase 1C
  ENST ID: ENST00000594587
  CDS Start-End: 222-754
ccctcgccttggcatgaaaagcggcaatggggtggacagcgtcaatgtctaacaggtgtttgtttcatatgggtctaaaactaatgcttttctcaagaccccgcaactcagcctggaccagtttccctcctccacccacccccgaatcttgagaatcctgtactggggggagggcactgcccccgcaccatgttcttgggagagcagggctccagcgtgacatggctgaagcgcaccaggccgtgggcttccgaccctcgctgacctcggacggggctgaagtggaactcagtgcccctgtgctgcaggagatctacctctctggcctgcgctcctggaaaaggcatctctcacgtttctggaatgactttctcaccggtgtgtttcctgccagccccctcagttggcttttcctcttcagtgccatccagcttgcctggttcctccagctggatccttccttaggactgatggagaagatcaaagagttgctgcctgactggggtggacaacaccacgggctccggggggtcctggcagccgcgctgtttgcctcgtgtttgtggggagccctgatcttcacactgcacgtggccctgaggctgcttctgtcctaccacggctggcttcttgagccccacggagccatgtcctcccccaccaagacctggctggccctggtccgcatcttctctggccgccacccgatgctgttcagttaccagcgctccctgccacgccagcccgtgccctc

SEQ ID NO: 114457 - DNA, 310 bp, Homo sapiens
  Payload ID: 2374
  Gene Symbol: CPT1C
  Gene Name: carnitine palmitoyltransferase 1C
  ENST ID: ENST00000597099
  CDS Start-End: 1-246
gtttcttatatcttcatgggggatggcatgatcaccttccacatctccagcaaaaaatcaagcacaaaaacggattcccacaggctggggcagcacattgaggacgcactgctggatgtggcctccctgttccaggcgggacagcattttaagcgccggttcagagggtcagggaaggagaactccaggcacagcaggcagctggcctctccaaggaataagggtgaaattgccacagctggctgacacaggacaggggcaactggtttggcaaccccacatccaggccaataaagatgtgtgagctggg

SEQ ID NO: 114458 - DNA, 586 bp, Homo sapiens
  Payload ID: 2374
  Gene Symbol: CPT1C
  Gene Name: carnitine palmitoyltransferase 1C
  ENST ID: ENST00000595969
  CDS Start-End: 197-586
aatggggtggacagcgtcaatgtctaacaggtgtttgtttcatatgggtctaaaactaatgcttttctcaagaccccgcaactcagcctggaccagtttccctcctccacccacccccgaatcttgagaatcctgtactggggggagggcactgcccccgcaccatgttcttgggagagcagggctccagcgtgacatggctgaagcgcaccaggccgtgggcttccgaccctcgctgacctcggacggggctgaagtggaactcagtgcccctgtgctgcaggagatctacctctctggcctgcgctcctggaaaaggcatctctcacgtttctggaatgactttctcaccggtgtgtttcctgccagccccctcagttggcttttcctcttcagtgccatccagcttgcctggttcctccagctggatccttccttaggactgatggagaagatcaaagagttgctgcctgactggccctggtccgcatcttctctggccgccacccgatgctgttcagttaccagcgctccctgccacgccagcccgtgccctctgtgcaggacaccgtgcgcaagtacctgg

SEQ ID NO: 114459 - DNA, 1137 bp, Homo sapiens
  Payload ID: 2374
  Gene Symbol: CPT1C
  Gene Name: carnitine palmitoyltransferase 1C
  ENST ID: ENST00000595031
  CDS Start-End: 1-1011
ctggcagctctgacagctgctcccaggggcacgtgggcccaggtgcggacatccctgaagacccaggcagcggaggccctggaggcggtggaaggggccgctttctttgtgtcactggatgctgagcccgcggggctcaccagggaggacccggcagcgtcgttggatgcctacgcccatgctctgctggccggccggggccatgatcgctggtttgacaaatccttcaccctaatcgtcttctctaacgggaagctgggcctcagcgtggagcactcctgggccgactgccccatctcaggacacatgtgggagttcactctggctacagaatgctttcagctgggctactcaacagacggccactgcaaggggcacccggaccccacactaccccagccccagcggctgcaatgggaccttccagaccagatccactcctccatctctctagccctgaggggagccaagatcttgtctgaaaatgtcgactgccatgtcgttccattctccctatttggcaagagcttcatccgacgctgccacctctcttcagacagcttcatccagatcgccttgcaactggcccacttccgggacaggggtcaattctgcctgacttatgagtcggccatgactcgcttattcctggaaggccggacggagacggtgcggtcttgcacgagggaggcctgcaactttgtcagggccatggaggacaaagagaagacggctgatgaccatggttatggtgtttcttatatcttcatgggggatggcatgatcaccttccacatctccagcaaaaaatcaagcacaaaaacggattcccacaggctggggcagcacattgaggacgcactgctggatgtggcctccctgttccaggcgggacagcattttaagcgccggttcagagggtcagggaaggagaactccaggcacaggtgtggatttctctcccgccagactggggcctccaaggcctcaatgacatccaccgacttctgactccttccagcaggcagctggcctctccaaggaataagggtgaaattgccacagctggctgacacaggacaggggcaactggtttggcaaccccacatccaggccaataaagatgtgtgagctggg

SEQ ID NO: 114460 - DNA, 2679 bp, Homo sapiens
  Payload ID: 2374
  Gene Symbol: CPT1C
  Gene Name: carnitine palmitoyltransferase 1C
  ENST ID: ENST00000598259
  CDS Start-End: 354-560
acctgaatacccggctagggacacgagagagaggaatcggggtttctgggtgacggtgatctcggggtgggcaggactccaaaggcccgtcgacccggtggtggactccttgcactgggattggacatatgcaagcgggagatttggggccggcgctcaaaatcggggggcgggggtggactcgggtttggaccccaggatccgatcagcggacccttgattcaacgtgaccccgcaactcagcctggaccagtttccctcctccacccacccccgaatcttgagaatcctgtactggggggagggcactgcccccgcaccatgttcttgggagagcagggctccagcgtgacatggctgaagcgcaccaggccgtgggcttccgaccctcgctgacctcggacggggctgaagtggaactcagtgcccctgtgctgcaggagatctacctctctggcctgcgctcctggaaaaggcatctctcacgtttctggggtcttacttactttgttacccaggctggagtgcagtgtcaccatcacagctcacttcatccctgaactcctgggctcaagcgatcctcctgcttcagccttccaagtagctgggactaagaatgactttctcaccggtgtgtttcctgccagccccctcagttggcttttcctcttcagtgccatccagcttgcctggttcctccagctggatccttccttaggactgatggagaagatcaaagagttgctgcctgactggggtggacaacaccacgggctccggggggtcctggcagccgcgctgtttgcctcgtgtttgtggggagccctgatcttcacactgcacgtggccctgaggctgcttctgtcctaccacggctggcttcttgagccccacggagccatgtcctcccccaccaagacctggctggccctggtccgcatcttctctggccgccacccgatgctgttcagttaccagcgctccctgccacgccagcccgtgccctctgtgcaggacaccgtgcgcaagtacctggagtcggtccggcccatcctctccgacgaggacttcgactggaccgcggtcctggcgcaggaattcctgaggctgcaggcgtcgctgctgcagtggtacctgcggctcaagtcctggtgggcgtccaattatgtcagtgactggtgggaggaatttgtgtacctgcgctcccgaaatccgctgatggtgaacagcaactattacatgatggacttcctgtatgtcacacccacgcctctgcaggcagctcgcgctgggaatgccgtccatgccctcctcctgtaccgccaccgcctgaaccgccaggagatacccccgactttgctgatgggaatgcgccccttatgctctgcccagtacgagaagatcttcaacaccacgcggattccaggggtccaaaaagactacatccgccacctccatgacagccaacacgtggctgtcttccaccggggccgattcttccgcatggggacccactcccgaaacagcctgctttccccgagagccctggagcagcagtttcagagaatcctggatgatccctcaccggcctgcccccacgaggaacatctggcagctctgacagctgctcccaggggcacgtgggcccaggtgcggacatccctgaagacccaggcagcggaggccctggaggcggtggaaggggccgctttctttgtgtcactggatgctgagcccgcggggctcaccagggaggacccggcagcgtcgttggatgcctacgcccatgctctgctggccggccggggccatgatcgctggtttgacaaatccttcaccctaatcgtcttctctaacgggaagctgggcctcagcgtggagcactcctgggccgactgccccatctcaggacacatgtgggagttcactctggctacagaatgctttcagctgggctactcaacagacggccactgcaaggggcacccggaccccacactaccccagccccagcggctgcaatgggaccttccagaccagatccactcctccatctctctagccctgaggggagccaagatcttgtctgaaaatgtcgactgccatgtcgttccattctccctatttggcaagagcttcatccgacgctgccacctctcttcagacagcttcatccagatcgccttgcaactggcccacttccgggacaggggtcaattctgcctgacttatgagtcggccatgactcgcttattcctggaaggccggacggagacggtgcggtcttgcacgagggaggcctgcaactttgtcagggccatggaggacaaagagaagacggacccacagtgcctcgccctgttccgcgtggcagtggacaagcaccaggctctgctgaaggcagccatgagcgggcagggagttgaccgccacctgtttgcgctgtacatcgtgtcccgattcctccacctgcagtcgcccttcctgacccaggtccattcggagcagtggcagctgtccaccagccagatccctgttcagcaaatgcatctgtttgacgtccacaattacccggactatgtttcctcaggcggtggattcgggcctgctgatgaccatggttatggtgtttcttatatcttcatgggggatggcatgatcaccttccacatctccagc

SEQ ID NO: 114461 - DNA, 599 bp, Homo sapiens
  Payload ID: 2374
  Gene Symbol: CPT1C
  Gene Name: carnitine palmitoyltransferase 1C
  ENST ID: ENST00000602019
  CDS Start-End: 313-599
gtttctgggtgacggtgatctcggggtgggcaggactccaaaggcccgtcgacccggtggtggactccttgcactgggattggacatatgcaagcgggagatttggggccggcgctcaaaatcggggggcgggggtggactcgggtttggaccccaggatccgatcagcggacccttgattcaacgtgaccccgcaactcagcctggaccagtttccctcctccacccacccccgaatcttgagaatcctgtactggggggagggcactgcccccgcaccatgttcttgggagagcagggctccagcgtgacatggctgaagcgcaccaggccgtgggcttccgaccctcgctgacctcggacggggctgaagtggaactcagtgcccctgtgctgcaggagatctacctctctggcctgcgctcctggaaaaggcatctctcacgtttctggaatgactttctcaccggtgtgtttcctgccagccccctcagttggcttttcctcttcagtgccatccagcttgcctggttcctccagctggatccttccttaggactgatggagaagatcaaagagttgctgcctgactggggtgg

SEQ ID NO: 114462 - DNA, 2767 bp, Homo sapiens
  Payload ID: 2374
  Gene Symbol: CPT1C
  Gene Name: carnitine palmitoyltransferase 1C
  Uniprot ID: Q8TCG5
  ENST ID: ENST00000598293
  CDS Start-End: 289-2700
gagagagaggaatcggggtttctgggtgacggtgatctcggggtgggcaggactccaaaggcccgtcgacccggtggtggactccttgcactgggattggacatatgcaagcgggagatttggggccggcgctcaaaatcggggggcgggggtggactcgggtttggaccccaggatccgatcagcggacccttgattcaacgtgaggtcccgaattgacgtccttccctcaaaacctccgggtctacaaaccaggaccctcaagacccttcagggctccagcgtgacatggctgaagcgcaccaggccgtgggcttccgaccctcgctgacctcggacggggctgaagtggaactcagtgcccctgtgctgcaggagatctacctctctggcctgcgctcctggaaaaggcatctctcacgtttctggaatgactttctcaccggtgtgtttcctgccagccccctcagttggcttttcctcttcagtgccatccagcttgcctggttcctccagctggatccttccttaggactgatggagaagatcaaagagttgctgcctgactggggtggacaacaccacgggctccggggggtcctggcagccgcgctgtttgcctcgtgtttgtggggagccctgatcttcacactgcacgtggccctgaggctgcttctgtcctaccacggctggcttcttgagccccacggagccatgtcctcccccaccaagacctggctggccctggtccgcatcttctctggccgccacccgatgctgttcagttaccagcgctccctgccacgccagcccgtgccctctgtgcaggacaccgtgcgcaagtacctggagtcggtccggcccatcctctccgacgaggacttcgactggaccgcggtcctggcgcaggaattcctgaggctgcaggcgtcgctgctgcagtggtacctgcggctcaagtcctggtgggcgtccaattatgtcagtgactggtgggaggaatttgtgtacctgcgctcccgaaatccgctgatggtgaacagcaactattacatgatggacttcctgtatgtcacacccacgcctctgcaggcagctcgcgctgggaatgccgtccatgccctcctcctgtaccgccaccgcctgaaccgccaggagatacccccgactttgctgatgggaatgcgccccttatgctctgcccagtacgagaagatcttcaacaccacgcggattccaggggtccaaaaagactacatccgccacctccatgacagccaacacgtggctgtcttccaccggggccgattcttccgcatggggacccactcccgaaacagcctgctttccccgagagccctggagcagcagtttcagagaatcctggatgatccctcaccggcctgcccccacgaggaacatctggcagctctgacagctgctcccaggggcacgtgggcccaggtgcggacatccctgaagacccaggcagcggaggccctggaggcggtggaaggggccgctttctttgtgtcactggatgctgagcccgcggggctcaccagggaggacccggcagcgtcgttggatgcctacgcccatgctctgctggccggccggggccatgatcgctggtttgacaaatccttcaccctaatcgtcttctctaacgggaagctgggcctcagcgtggagcactcctgggccgactgccccatctcaggacacatgtgggagttcactctggctacagaatgctttcagctgggctactcaacagacggccactgcaaggggcacccggaccccacactaccccagccccagcggctgcaatgggaccttccagaccagatccactcctccatctctctagccctgaggggagccaagatcttgtctgaaaatgtcgactgccatgtcgttccattctccctatttggcaagagcttcatccgacgctgccacctctcttcagacagcttcatccagatcgccttgcaactggcccacttccgggacaggggtcaattctgcctgacttatgagtcggccatgactcgcttattcctggaaggccggacggagacggtgcggtcttgcacgagggaggcctgcaactttgtcagggccatggaggacaaagagaagacggacccacagtgcctcgccctgttccgcgtggcagtggacaagcaccaggctctgctgaaggcagccatgagcgggcagggagttgaccgccacctgtttgcgctgtacatcgtgtcccgattcctccacctgcagtcgcccttcctgacccaggtccattcggagcagtggcagctgtccaccagccagatccctgttcagcaaatgcatctgtttgacgtccacaattacccggactatgtttcctcaggcggtggattcgggcctgctgatgaccatggttatggtgtttcttatatcttcatgggggatggcatgatcaccttccacatctccagcaaaaaatcaagcacaaaaacggattcccacaggctggggcagcacattgaggacgcactgctggatgtggcctccctgttccaggcgggacagcattttaagcgccggttcagagggtcagggaaggagaactccaggcacaggtgtggatttctctcccgccagactggggcctccaaggcctcaatgacatccaccgacttctgactccttccagcaggcagctggcctctccaaggaataagggtgaaattgccacagctggctgacacag

SEQ ID NO: 114463 - DNA, 830 bp, Homo sapiens
  Payload ID: 2374
  Gene Symbol: CPT1C
  Gene Name: carnitine palmitoyltransferase 1C
  ENST ID: ENST00000595568
  CDS Start-End: 42-260
ggggtggacagcgtcaatgtctaacagggctccagcgtgacatggctgaagcgcaccaggccgtgggcttccgaccctcgctgacctcggacggggctgaagtggaactcagtgcccctgtgctgcaggagatctacctctctggcctgcgctcctggaaaaggcatctctcacgtttctggtgccatccagcttgcctggttcctccagctggatccttccttaggactgatggagaagatcaaagagttgctgcctgactggccctggtccgcatcttctctggccgccacccgatgctgttcagttaccagcgctccctgccacgccagcccgtgccctctgtgcaggacaccgtgcgcaagtacctggagtcggtccggcccatcctctccgacgaggacttcgactggaccgcggtcctggcgcaggaattcctgaggctgcaggcgtcgctgctgcagtggtacctgcggctcaagtcctggtgggcgtccaattatgtcagtgactggtgggaggaatttgtgtacctgcgctcccgaaatccgctgatggtgaacagcaactattacatgatggacttcctgtatgtcacacccacgcctctgcaggcagctcgcgctgggaatgccgtccatgccctcctcctgtaccgccaccgcctgaaccgccaggagatacccccgactttgctgatgggaatgcgccccttatgctctgcccagtacgagaagatcttcaacaccacgcggattccaggggtccaaaaagactacatccgccacctccatgacagccaacacgtggctgtcttccaccggggccga

SEQ ID NO: 114464 - DNA, 3094 bp, Homo sapiens
  Payload ID: 2375
  Gene Symbol: CPT2
  Gene Name: carnitine palmitoyltransferase 2
  Uniprot ID: P23786
  ENST ID: ENST00000371486
  CDS Start-End: 516-2492
ctcatatctagaattttgggaggtactttgaatcattacgatctatctacttcttaggtgaggaaatagaggtttaaaatttagtccacagtctcgcaaggatggagcctggatcaaattttgggttatcagattccaatcacgtttcttagcttttcttttttttttccaactccagtttctgtcttgctccaaaaaaggggaaggagcggctgcggcgctcggtttcccgcctcctagggaagggaagggagacgagcagcgcggaggctggggcccccttccgggcggggcctactagtgggcggggcctgtcagtgagcggcccctgcccggaaggagccagtccggggcggagccgatggccttacaggggccggaagtggcctgcgggcggagaagtgcctcaggagtcctgacgcagtgtcttgggcgctaacggcggcggcggccttgtgtttagactccagaactccccacttgccgcgttctcgccgccgcaggctcccgggacgatggtgccccgcctgctgctgcgcgcctggccccggggccccgcggttggtccgggagcccccagtcggcccctcagcgccggctccgggcccggccagtacctgcagcgcagcatcgtgcccaccatgcactaccaggacagcctgcccaggctgcctattcccaaacttgaagacaccattaggagatacctcagtgcacagaagcctctcttgaatgatggccagttcaggaaaacagaacaattttgcaagagttttgaaaatgggattggaaaagaactgcatgagcagctggttgctctggacaaacagaataaacatacaagctacatttcgggaccctggtttgatatgtacctatctgctcgagactccgttgttctgaactttaatccatttatggctttcaatcctgacccaaaatctgagtataatgaccagctcacccgggcaaccaacatgactgtttctgccatccggtttctgaagacactccgggctggccttctggagccagaagtgttccacttgaaccctgcaaaaagtgacactatcaccttcaagagactcatacgctttgtgccttcctctctgtcctggtatggggcctacctggtcaatgcgtatcccctggatatgtcccagtattttcggcttttcaactcaactcgtttacccaaacccagtcgggatgaactcttcactgatgacaaggccagacacctcctggtcctaaggaaaggaaatttttatatctttgatgtcctggatcaagatgggaacattgtgagcccctcggaaatccaggcacatctgaagtacattctctcagacagcagccccgcccccgagtttcccctggcatacctgaccagtgagaaccgagacatctgggcagagctcaggcagaagctgatgagtagtggcaatgaggagagcctgaggaaagtggactcggcagtgttctgtctctgcctagatgacttccccattaaggaccttgtccacttgtcccacaatatgctgcatggggatggcacaaaccgctggtttgataaatcctttaacctcattatcgccaaggatggctctactgccgtccactttgagcactcttggggtgatggtgtggcagtgctcagattttttaatgaagtatttaaagacagcactcagacccctgccgtcactccacagagccagccagctaccactgactctactgtcacggtgcagaaactcaacttcgagctgactgatgccttaaagactggcatcacagctgctaaggaaaagtttgatgccaccatgaaaaccctcactattgactgcgtccagtttcagagaggaggcaaagaattcctgaagaagcaaaagctgagccctgacgcagttgcccagctggcattccagatggccttcctgcggcagtacgggcagacagtggccacctacgagtcctgtagcactgccgcattcaagcacggccgcactgagaccatccgcccggcctccgtctatacaaagaggtgctctgaggcctttgtcagggagccctccaggcacagtgctggtgagcttcagcagatgatggttgagtgctccaagtaccatggccagctgaccaaagaagcagcaatgggccagggctttgaccgacacttgtttgctctgcggcatctggcagcagccaaagggatcatcttgcctgagctctacctggaccctgcatacgggcagataaaccacaatgtcctgtccacgagcacactgagcagcccagcagtgaaccttgggggctttgcccctgtggtctctgatggctttggtgttgggtatgctgttcatgacaactggataggctgcaatgtctcttcctacccaggccgcaatgcccgggagtttctccaatgtgtggagaaggccttagaagacatgtttgatgccttagaaggcaaatccatcaaaagttaacttctgggcagatgaaaagctaccatcacttcctcatcatgaaaactgggaggccgggcatggtggctcatgcctgtaatcccagcattttgagaggctgaggcgggtggatcacttgaggtcaggagtttgagaccaacctggccaacatggtgaaaccttgtctctactaaaaatacaaaaattagctgggtgtggtggcatgtgcctataatcccagctacttgggaggttgaagcagaattgcttgaacccaggaggtggaggttgcagtgagctgagatcacaccactgcactccggcctgggcgacagagcgagactgtctcaaaaaaacaaaaaagaaaaaaaaactggggcctgtgtagccagtgggtgctattctgtgaaactaatcataagctgcctaggcagccagctacaggcttgagctttaaattcatggttttaaagctaaacgtaatttccacttgggactagatcacaactgaagataacaagagatttaagttttaagggcatttaatcaggaggaaaggtttggaaaactaactcaggtgtatttattgtttaagcagaaataaagtttaatttttgcttgaa

SEQ ID NO: 114465 - DNA, 2215 bp, Homo sapiens
  Payload ID: 2376
  Gene Symbol: CNDP1
  Gene Name: carnosine dipeptidase 1 (metallopeptidase M20 family)
  Uniprot ID: Q96KN2
  ENST ID: ENST00000358821
  CDS Start-End: 229-1752
gcattgtctcttcctctgcagttgagctgaatgaatacctccgaagccgctttgttctccagatgtgaatagctccactataccagcctcgtcttccttccgggggacaacgtgggtcagggcacagagagatatttaatgtcaccctcttggggctttcatgggactccctctgccacattttttggaggttgggaaagttgctagaggcttcagaactccagcctaatggatcccaaactcgggagaatggctgcgtccctgctggctgtgctgctgctgctgctggagcgcggcatgttctcctcaccctccccgcccccggcgctgttagagaaagtcttccagtacattgacctccatcaggatgaatttgtgcagacgctgaaggagtgggtggccatcgagagcgactctgtccagcctgtgcctcgcttcagacaagagctcttcagaatgatggccgtggctgcggacacgctgcagcgcctgggggcccgtgtggcctcggtggacatgggtcctcagcagctgcccgatggtcagagtcttccaatacctcccgtcatcctggccgaactggggagcgatcccacgaaaggcaccgtgtgcttctacggccacttggacgtgcagcctgctgaccggggcgatgggtggctcacggacccctatgtgctgacggaggtagacgggaaactttatggacgaggagcgaccgacaacaaaggccctgtcttggcttggatcaatgctgtgagcgccttcagagccctggagcaagatcttcctgtgaatatcaaattcatcattgaggggatggaagaggctggctctgttgccctggaggaacttgtggaaaaagaaaaggaccgattcttctctggtgtggactacattgtaatttcagataacctgtggatcagccaaaggaagccagcaatcacttacggaacccgggggaacagctacttcatggtggaggtgaaatgcagagaccaggattttcactcaggaacctttggtggcatccttcatgaaccaatggctgatctggttgctcttctcggtagcctggtagactcgtctggtcatatcctggtccctggaatctatgatgaagtggttcctcttacagaagaggaaataaatacatacaaagccatccatctagacctagaagaataccggaatagcagccgggttgagaaatttctgttcgatactaaggaggagattctaatgcacctctggaggtacccatctctttctattcatgggatcgagggcgcgtttgatgagcctggaactaaaacagtcatacctggccgagttataggaaaattttcaatccgtctagtccctcacatgaatgtgtctgcggtggaaaaacaggtgacacgacatcttgaagatgtgttctccaaaagaaatagttccaacaagatggttgtttccatgactctaggactacacccgtggattgcaaatattgatgacacccagtatctcgcagcaaaaagagcgatcagaacagtgtttggaacagaaccagatatgatccgggatggatccaccattccaattgccaaaatgttccaggagatcgtccacaagagcgtggtgctaattccgctgggagctgttgatgatggagaacattcgcagaatgagaaaatcaacaggtggaactacatagagggaaccaaattatttgctgcctttttcttagagatggcccagctccattaatcacaagaaccttctagtctgatctgatccactgacagattcacctcccccacatccctagacagggatggaatgtaaatatccagagaatttgggtctagtatagtacattttcccttccatttaaaatgtcttgggatatctggatcagtaataaaatatttcaaaggcacagatgttggaaatggtttaaggtcccccactgcacaccttcctcaagtcatagctgcttgcagcaacttgatttccccaagtcctgtgcaatagccccaggattggattccttcaaaccttttagcatatctccaaccttgcaatttgattggcataatcactccagtttgctttctaggtcctcaagtgctcgtgacacataatcattccatccaatgatcgcctttgctttaccactctttccttttatcttattaataaaaatgttggtctccaccactgactacaa

SEQ ID NO: 114466 - DNA, 4111 bp, Homo sapiens
  Payload ID: 2376
  Gene Symbol: CNDP1
  Gene Name: carnosine dipeptidase 1 (metallopeptidase M20 family)
  ENST ID: ENST00000582365
  CDS Start-End: 67-1461
gggactccctctgccacattttttggaggttgggaaagttgctagaggcttcagaactccagcctaatggatcccaaactcgggagaatgacgctgaaggagtgggtggccatcgagagcgactctgtccagcctgtgcctcgcttcagacaagagctcttcagaatgatggccgtggctgcggacacgctgcagcgcctgggggcccgtgtggcctcggtggacatgggtcctcagcagctgcccgatggtcagagtcttccaatacctcccgtcatcctggccgaactggggagcgatcccacgaaaggcaccgtgtgcttctacggccacttggacgtgcagcctgctgaccggggcgatgggtggctcacggacccctatgtgctgacggaggtagacgggaaactttatggacgaggagcgaccgacaacaaaggccctgtcttggcttggatcaatgctgtgagcgccttcagagccctggagcaagatcttcctgtgaatatcaaattcatcattgaggggatggaagaggctggctctgttgccctggaggaacttgtggaaaaagaaaaggaccgattcttctctggtgtggactacattgtaatttcagataacctgtggatcagccaaaggaagccagcaatcacttacggaacccgggggaacagctacttcatggtggaggtgaaatgcagagaccaggattttcactcaggaacctttggtggcatccttcatgaaccaatggctgatctggttgctcttctcggtagcctggtagactcgtctggtcatatcctggtccctggaatctatgatgaagtggttcctcttacagaagaggaaataaatacatacaaagccatccatctagacctagaagaataccggaatagcagccgggttgagaaatttctgttcgatactaaggaggagattctaatgcacctctggaggtacccatctctttctattcatgggatcgagggcgcgtttgatgagcctggaactaaaacagtcatacctggccgagttataggaaaattttcaatccgtctagtccctcacatgaatgtgtctgcggtggaaaaacaggtgacacgacatcttgaagatgtgttctccaaaagaaatagttccaacaagatggttgtttccatgactctaggactacacccgtggattgcaaatattgatgacacccagtatctcgcagcaaaaagagcgatcagaacagtgtttggaacagaaccagatatgatccgggatggatccaccattccaattgccaaaatgttccaggagatcgtccacaagagcgtggtgctaattccgctgggagctgttgatgatggagaacattcgcagaatgagaaaatcaacaggtggaactacatagagggaaccaaattatttgctgcctttttcttagagatggcccagctccattaatcacaagaaccttctagtctgatctgatccactgacagattcacctcccccacatccctagacagggatggaatgtaaatatccagagaatttgggtctagtatagtacattttcccttccatttaaaatgtcttgggatatctggatcagtaataaaatatttcaaaggcacagatgttggaaatggtttaaggtcccccactgcacaccttcctcaagtcatagctgcttgcagcaacttgatttccccaagtcctgtgcaatagccccaggattggattccttcaaaccttttagcatatctccaaccttgcaatttgattggcataatcactccagtttgctttctaggtcctcaagtgctcgtgacacataatcattccatccaatgatcgcctttgctttaccactctttccttttatcttattaataaaaatgttggtctccaccactgactacaatgatttccccatggattcattttcagaggagttactaaggcatggtactatattaacctcttgcctccccttcatttattttttcccacttcttgaaaagttccgaagctgaaatgatcaatattcatacccatatgccatttgggagtccttgtgcaaagatgagtatttttttttttattccaagcttctttacctttcctgagatcgatgccaccttgtcagcttctctgcctcccgttccttcttcctgtcccatcagaaaaggcccactctctctctatccaacatctgtgcacaggttgcaccagagcagaatttatcctgatagaatttctctcaccccattgaagttttactcaatgacaacatctaaattgctcaaagcttttaatagcatcagttttagatagagaactaatcaaccctgacatcagtaacacacgctaaatttaaagccatcagctaatgctgcattcattaatcattttagttaaccatcatgtttggcttgattggatttgacggtgtaaacaacaaaaaaagacagtcatttttctacagttgagtgtatataaacaaaatcaatctttatgaatttattatttaaatcacattaatggagaatcatttaggggcttattaaaatttttttctattatgactccaaataaaaacaaagcagagggccaggcgcggtggctcatgcccataatcccagcactttcggaggccgaggtgggcggatcacctgaggtcgggagttcgagatcagcctggctaacatggtgaaaccctgtctctactgaatatacaaaattaactgggcatggtggtgcatgcctgtagtcccagctactcgggaggctgaggcaggagaatcgcttgaacccaggaggcggaagttgcagtgaactgggatcatgccactgcactccagcctgggcgacagagtgagactccgtctccaaaaaaaaaaaaaaaaaaaaaaaaagcagaacacatttgcgttcaacttttttccatcactctgttggttcttgagatgtcagtgtcagtttaaaaacgtgctgtaccacctttaaaaggactggagcaggcaggcagtgattcagttcaccttgactctagtcatagaagtggacccaactgagagctcaacctagttgtgggcatttgtgaaggattccagttagtgttttctttggaagcaggaggcttcaagccatcacatctccaattctatagaatatcaagtcatcgttaaagaacagcagcaggtgtttgatattttgtgctattaagtgtagtttgcgctcatctaattatgcagagtttcgtggtgtttctcgattttgttgaacctacctgatgcatttggcactgtagataaggactaacagtaagagagatttagagtcttcatgttagtccattaacataagtttattataaaatacactgtaagcatttctggctaatgtaccatcagatttaagaagttacccaacaatatgtattcgctgatcttcattcctgctgaatctgagaccagcagtgtctcaattattacgttgctgccaggagagaaggggaggagaatgaatagttatggaagttgtagaatctaggatattccaaccctggattgccagagttcagagtccatgtttttctgtcacccagggtcacgactggtctccccagctcttccctcctgtttttccacccaattctaagccctgtggtgatccagaccctaccctgacgtgggagtcagaaaggagtatcttccaagctccttgtactcaaagggataaaagaaagctactcagttgttattcagatatattaaccagccatatggaggcaaaaaagggagaaatttaaatatttgttttttaacattttaatgatgaaatatatgcacttggacaaaaatgatcacccagtaaagttgggcgtacattgtggcatgcccatcagggggactttgttgtattggaggagggcaatgtatctggctttgttagtagacgtagcgcattaaagcgtaactattgtgataagtttaggggttaggaatatcatttgagtttggtagatgcttttctggaaaacaatgaggctgggaatgtttctggctttatgttgtattcataaaaataaaatgtactggcttggaaa

SEQ ID NO: 114467 - DNA, 551 bp, Homo sapiens
  Payload ID: 2376
  Gene Symbol: CNDP1
  Gene Name: carnosine dipeptidase 1 (metallopeptidase M20 family)
  ENST ID: ENST00000584316
  CDS Start-End: 1-115
tgctgaccggggcgatgggtggctcacggacccctatgtgctgacggagggaaactttatggacgaggagcgaccgacaacaaaggccctgtcttggcttggatcaatgctgtgagcgccttcagagccctggagcaagatcttcctgtgaatatcaaattcatcattgaggggatggaagaggctggctctgttgccctggaggaacttgtggaaaaagaaaaggaccgattcttctctggtgtggactacattgtaatttcagataacctgtggatcagccaaaggaagccagcaatcacttacggaacccgggggaacagctacttcatggtggaggtgaaatgcagagaccaggattttcactcaggaacctttggtggcatccttcatgaaccaatggctgatctggttgctcttctcggcccaggtgttttcagccacacctttgacaaggtgaacactaaagcagggcggactccagctgcgtgatcctggtgaccaactcctttctctgacagtcacttcttggatggagttgctgccaatgg

SEQ ID NO: 114468 - DNA, 1012 bp, Homo sapiens
  Payload ID: 2377
  Gene Symbol: CARNMT1
  Gene Name: carnosine N-methyltransferase 1
  ENST ID: ENST00000376830
  CDS Start-End: 183-644
ggagccctgaagacctggcggagcccagcgcggatggaggcctgagggtggcgggggcggagcgcgccgcgagctgggggcatgtccgcggcgggcgccgtctagaggaaggccaagcagccgccaccacgctgtcggtcgcggagagacgcaagcgagccaggccgagggccgcggcggcgatgcagcgacggcgtcgccctccgccgcccacctcccggctgcccgagggctgcgggggaggaggcggtggcagcgaggaggtggaagtgcagttttccgccgggcgttggggctcggccgcggcggtttcggcggcagcggcggcggccacgcgcagcaccgaggaggaggaggagaggcttgagcgtgagcacttctggaagatcattaatgccttccgctactacggcaccagtatgcatgagcgggtgaaccgaacagaaagacagtttcgatcacttccagctaaccaacagaaactacttcctcagtttcttcttcacttggacaagatccggaaatgcattgatcataatcaagaaatactactgaccattgtgaatgattgcatacatatgtttgaaaataaagaatatggagaagatgtatgtgaaagtttgttctatttctgtttattttagggtcaacctctgtattttgaggtcttttattttctggatttcatttttataatctggcacaggctatttgctctactcagaaagttttaacttaaatgttcagtcatttgattaggcttaatagccagagactggatctgttcacttgttttccttttttaagtactaatataactgttgagattttgatgcattttgacataatgttctgttttggaatacagggttagtgacttaaatttttaaaagcaactttactagctagaaattaatttcccttgcttaactcatattttttcagtgtcttgtatctattgctgttcatcttttattgtaagaaattgttttcacttataaatctcaaggga

SEQ ID NO: 114469 - DNA, 4130 bp, Homo sapiens
  Payload ID: 2377
  Gene Symbol: CARNMT1
  Gene Name: carnosine N-methyltransferase 1
  Uniprot ID: Q8N4J0
  ENST ID: ENST00000376834
  CDS Start-End: 154-1383
gcggatggaggcctgagggtggcgggggcggagcgcgccgcgagctgggggcatgtccgcggcgggcgccgtctagaggaaggccaagcagccgccaccacgctgtcggtcgcggagagacgcaagcgagccaggccgagggccgcggcggcgatgcagcgacggcgtcgccctccgccgcccacctcccggctgcccgagggctgcgggggaggaggcggtggcagcgaggaggtggaagtgcagttttccgccgggcgttggggctcggccgcggcggtttcggcggcagcggcggcggccacgcgcagcaccgaggaggaggaggagaggcttgagcgtgagcacttctggaagatcattaatgccttccgctactacggcaccagtatgcatgagcgggtgaaccgaacagaaagacagtttcgatcacttccagctaaccaacagaaactacttcctcagtttcttcttcacttggacaagatccggaaatgcattgatcataatcaagaaatactactgaccattgtgaatgattgcatacatatgtttgaaaataaagaatatggagaagatgggaatggaaagattatgccagcatctacatttgacatggataagttaaaatccacgctgaaacagtttgtgagagactggagtgaaactgggaaagcagaaagggatgcctgttaccagccaatcattaaagaaattttaaaaaattttccaaaagagagatgggatccttctaaagtaaatattctggtacctggtgctggactaggaagactggcctgggaaatagctatgctaggttatgcttgtcaaggaaatgaatggagtttttttatgctcttttcttccaactttgtactcaacagatgttctgaaattaataaatataaactttatccttggatccatcagtttagcaataaccggagatcagctgatcagattcgacccatctttttccctgatgttgacccccacagtcttcctcctggttctaacttttctatgacagcaggagattttcaagagatttattcagaatgcaatacctgggactgtattgctacctgtttcttcatagacacagctcacaatgtaattgattatattgatacaatatggaaaatactcaagccaggtggaatttggataaatctaggtcctctgctgtaccactttgaaaatctggcaaatgaactttccatagaattgagctatgaggatataaaaaacgttgttctgcagtatggattcaaggtagaggtggaaaaagaatctgtattgtcaacatatactgtgaatgatctctctatgatgaaatactactatgaatgtgtcttgtttgtggtccgtaagccacaataatggtctcaagtgataccacctggaaaaaagtttagtaagaacaaatgctgaaatcaacgactcaaaatcaactatcagtgatgacaggacacaacctcaaatcagtggtgccttcttattcctaacgaaatttagaaatagtgtctattttcttaatatgtctattgctttttcagaaatatactatgccatgcagatttgtactacacaagtaaaaatggaggaaatgtcttgaagtatactttttccttgaagcccagaattgtgtttcagtaggaaaaaaacctaatctccagtgtcttcatgatgctgtccattgcaagtctgccgaattaatgactaatagtattgaagtacataataatcttcctttttttgttgttttgtatgcattgcacatgtaacttttagaagagtctaaggatcctcagtcatattcaacatctggagttgggactttgttcactttcaatctaagaaaactatgcgtaaaatatgtctttttttttttttttcttcagagacaggatcccgctctgtctcccaggccggagtgcagtggcacgatcatagctcactgtaacctcaaactcctggactcaagcgatcttcctgccttagccttagcctcctgagtagctaggactgtaggcatgtaccaccgcgcctggcctgtgtctattttatcattcagattaatttaattttgtattttctggctcagatgaacttaaagaagcatcaaacatttcttttttatgaaatgttaaatttaatagcatcacaggccggtaaaatatattcaagtaacagaaatatcaaagtcttttggccacaataaactgaacactttatgaaagcatactcatcatggatcactttgaaatatacgagatctcaacattcaaagtgagaaataaaaagcctttattaaaagtagtgctaggaaacagagaaaataagaataaaatttacccatttgaaatatgtgattttcagactctaaatgaatacagagtttgacagtgtgatgtttacaataatgtcttttctttagaatatctggattatgaaagcaagcacttttttcattaaaaaaattatatactaggaaaaactgtcataatagtattaatgtggggaattttgattatgaaattcagggatatattactgcccgtggtctgtgtcttcaatattgtaagcagcagccatcatgtaatttcagattaataccaattttgttccctgatagatggagcttaaacagtatatgctgctttaaatttctacctctagcagatctttattggagggagttttcctttgtattttttaatgtatgatattctgtttccagtagcttggaaagtagagatgactaatgttttagccttttcttggagaaaaggaagaactcttcttgaatattttcacagatgattgtgattgctttaaatgacctctgtggcaatttaaattagatggatttaatctcagtaatgtgctggtcgcataaatgtcatgttttaataggaaaagttacttgtaaatctttagacctttgttgtcacttaggctggggagtcactaccctatttggcatcttactagttggggggaccttttccgtgtacagtgatgggacttttgtgacctttactctcactatgcaatagagggtttcatgtagttaatctgacatgtcaaaattgggaagactgtaaccttttttttttttttttaagatttctcttttttgtgtccctcaatacttagcagatgttcatttggtggaaattcttattacttacatgaatgagtttgaatttagtggcaaggaagaaaaaaaaaactcaaattattgttttaaaagaagaaaacttgcaaagtacataagtattttttaaaaatcaatcgaacagaaaggaatgcatgctgtttttcaatggcttagacatgctttttattcactgactagtattcacttttttacaacttgtatcaaaacaaatgatctttgtttttgtcacaggcaaaaacaggttgacactggtgggttggctttattaattaattttttttctattaggttttctttaataatgttaaatttctaaattatagcatatgttttagttaattctgaaatcagttacttcatttgttaatttatccctcatatcatgaatattgttttttaaatgttctatacaaatttgcatcacttcttttcttacagcttttgcagttaatatattctaaacttgaaaatgtggtatcaatcaataatagaagtatcactggaggatttatttagctttgtatttcttaattttagtcctagctactaaagtatgtaagccttaaagtttaaaatgtttttcttaaattagctttatacacaaacattttcatttactttatgaaatgggaggagatagtccactgtgcttatgtttttttgtttaatttctatattctgaagcagtgcagatatagggtatgctaatcaagtgagcaaggtggaacatgtacaatataaggagaagctgtaaaaatcacagtataaaattatgaagtttggtaactgtaaaatgtactgtatttatatgtaactctcattctaaaagttgccacaaaagctgaattggaagcttcatgtctgcatgaaatttcctatatttttaatgtgtatgatgaaattaatttttcttgaatattaaagtctgccaattgctatgaaa

SEQ ID NO: 114470 - DNA, 715 bp, Homo sapiens
  Payload ID: 2377
  Gene Symbol: CARNMT1
  Gene Name: carnosine N-methyltransferase 1
  ENST ID: ENST00000451153
  CDS Start-End: 1-715
gttctgaggctgcagttggaatcagacagacatgacctcctacgcagcaccagtatgcatgagcgggtgaaccgaacagaaagacagtttcgatcacttccagctaaccaacagaaactacttcctcagtttcttcttcacttggacaagatccggaaatgcattgatcataatcaagaaatactactgaccattgtgaatgattgcatacatatgtttgaaaataaagaatatggagaagatgggaatggaaagattatgccagcatctacatttgacatggataagttaaaatccacgctgaaacagtttgtgagagactggagtgaaactgggaaagcagaaagggatgcctgttaccagccaatcattaaagaaattttaaaaaattttccaaaagagagatgggatccttctaaagtaaatattctggtacctggtgctggactaggaagactggcctgggaaatagctatgctaggttatgcttgtcaaggaaatgaatggagtttttttatgctcttttcttccaactttgtactcaacagatgttctgaaattaataaatataaactttatccttggatccatcagtttagcaataaccggagatcagctgatcagattcgacccatctttttccctgatgttgacccccacagtcttcctcctggttctaacttttctatgacagcaggagattttcaagagattt

SEQ ID NO: 114471 - DNA, 3942 bp, Homo sapiens
  Payload ID: 2378
  Gene Symbol: CARNS1
  Gene Name: carnosine synthase 1
  Uniprot ID: A5YM72
  ENST ID: ENST00000307823
  CDS Start-End: 453-2936
gctgtgccactgccaccgccgccgccgctgcatcccgcccggtccgagtccgcccgccacgcccgccgagccgctgccgccgccagctctccctggatccatcgggtcccgagtgggattgcccactgggctccaaggacctggaggaagagggcccctggggagggggctctggcctgccgcccacaggctgcttccctggctcctggcgccaggacgtgggcctggactgcaagggatcccccgagggggccgaggcccgggcttggactgtctactactacagcctcctgcagagctgtctgcagcaagctggccttccggagactcaggaccgcggccaggtgccccgcacaggctgtcctggggcggaggtgaccttgtgcgttctgggctcccccagcacctttctgcctgtgctgctggagggtggggtccagagcccgggaaacatgctcctttgcctgtcccctgcttggctgatgaaggtgccagcacccgggcagccgggtgaggcagccctgctagtctccaaggctgtgagcttccaccctgggggcctgacattcctggatgactttgtccccccgcgccgtgccacctactttttggcaggcctgggcctggggcctggccggggccgagaggcagcagaactcgcccgtgacctgacctgccccacaggagcttcggctgagctggcccggctgctggaggaccggctgctgacaaggcagttgctggcccagcagggtggtgtggctgtgccagcaaccctggctttcacctacaagccgccggggctgctgcggggaggggatgccagcctagggctacggctggtggagctgagtggcaaagagggccaggagacgctggtgaaagaggaagtggaggcttttctgcgctccgaggccctgggtgatatcctgcaggtagctgtgaagctcagtggctggcgctggcgggggcggcaggcatggcgtctgcacccgcgggcagagctgggtgcagtggtggacacagtgctggcgctgctggagaagctggaggaggaggagagtgtcctggtggaggctgtgtacccacctgcccagctgccctgctcagatggtccttcacccggccccggcctggccgtgcgaatctgtgctgtggtgtgtcggacacagggtgataggccactgctgagcaaggtggtgtgcggcgtgggccgcggggaccgccctctacggcaccacaactccctgccgaggacgctggaggtggcgctggcccagtgcggcctgggcgaggaggcgcaggtggcggctgtgcggcagcgcgtcaaggcggcggccgaggccgcgctggccgccgtgctggctctggaggccggcctgagtgccgagcagcgcggcgggcgccgggcgcacacggacttcctgggcgtggatttcgcgctgacagcggccggcggcgtgctgaccccagtggccctggagctgaacggcggcctgtgtctggaggcgtgcggcgcgctggaggggctgtgggccgcgccgcggctggggccggcggccgacgaggcggtggcggcgccgctggtggagaccatgcttcggcggtcggcgcgctgcctcatggagggaaaacagctgctggtggtcggcgctggcggcgtcagcaagaagttcgtgtgggaggcggcgcgcgactacgggctccagctgcacctcgtggagtcagaccccaaccactttgcatcccagttggtacagaccttcatccactttgacatgacagagcaccggagggatgaggagaacgcacggctgctggcagagttggtgcgggctcgcggcctcaagctagatggctgcttctcctactgggatgactgcctggtgctcacagccctgctctgccaggagctaggtctgccctgcagctccccagctgccatgcgcctggctaagcagaagagcctcacccagctgcacctgttgcaccaccatggcccaccctggcctgcgccctccctccatgctgtgccctgctgcccactggagagtgaggctgatgtggagagggccgtgcaccaggtacccctgccaggtgtcatgaagctggagttcggggcaggtgcagtgggtgtccggctggtagaggatgcgccacagtgccatgagcacttttcccggattacccgagacttgcagggcgaggccgaccacccaggcattgggctgggctggggcaatgccatgctgctgatggagtttgtggagggcaccgagcacgacgtggacctggtgttgtttggtgggcggttgctggctgcctttgtctccgacaatggccctacgaggctgcctggcttcactgagacggcggcctgcatgcccaccgggctggcaccagagcaggaggcacagatggttcaggcagccttccgctgttgcctgggctgcgggttgctcgatggagtcttcaacgtggagctcaagctgaccggggctgggcctcggcttatcgagatcaacccccgcatgggtggcttctacctgcgtgattggatcctggagctctatggtgttgacctgctgctggctgctgttatggtggcctgtggcttgcgtcctgccctgcccacccgcccacgtgctcgtggccatctggtgggcgtcatgtgccttgtgtcccagcacctgcaggccctgagttccaccgccagccgtgagaccctgcaggccctgcacgaccgtggactgctacgcctcaatctgctggaggaggccctggtgcctggcgagtatgaggagccctactgcagtgtggcctgtgccggacccagccccaccgaggcccgtctccgcctgctgggcctctgccagggcctgggcatcgatgggcccagctaccctgttgcccacttcctgtctcacttcaaatagcactggggtcagggggcagggaagcagtgctgggtggaggcactgtggtgccctctgctccctggagctcttcctgcttctctccccatcaccatgccccagccccagcctggcccgctgcaatgcctaggtctgttccagagcagcagggcaatttagacaccaaggcatcctggactcaagggcctcttgccctcccgaaggccccagtccagcctacagcttccccagcattctagccttggagaaatgacaatggccacacacacacacacacacacacacacacacctctgacgccagctccccaggtgggagtgggcccaaacccagcccctcctgtccacctctccaggtctcactctcttcctgccatctacaagaggagaggacctggctgggccccaagccttggacaaatcctgggaaaacctgagactagaacccttgtcttcctcttacccaaattctaggatagctctgaagcctgctggaaacttggtggcatccaacctgcctcattcggcctgaccggtagaggcaggtggcctgtggacagaagtaatcctctttctgctcaccccaggcagacacaactgcctatgttcccccgatgagaggaaacaggctgagagaagaaaaatgactgctccaggattataccacagtggagagcgggtcacaggacatgatgcagggtccaggtttctgttttgatcaagtcttacatgcccattcagcttctaggcccccctcacctccctgccctcattcacaagtggccctgagacacgtgaacacctccctcctatgcatcacaaaccttctccaccgagctttggtgctttggcctctggcacacctaactagcattggcagaggagagtctacactctcttcctcattcagggaagatgctttaagaaatcctgcctctgtgcagcagaggagctggaggcagctccccaggcatccctccccaaataaaggcttatgtactggtgaa

SEQ ID NO: 114472 - DNA, 3971 bp, Homo sapiens
  Payload ID: 2378
  Gene Symbol: CARNS1
  Gene Name: carnosine synthase 1
  Uniprot ID: A5YM72
  ENST ID: ENST00000445895
  CDS Start-End: 115-2967
ccactcccaaagtctaggggctggaaggccaggcagggacttggctgccctgactccttcgtctctctgtccctctgtctctgccatcagtctctcagccactccacccacgagatgctctccctggatccatcgggtcccgagtgggattgcccactgggctccaaggacctggaggaagagggcccctggggagggggctctggcctgccgcccacaggctgcttccctggctcctggcgccaggacgtgggcctggactgcaagggatcccccgagggggccgaggcccgggcttggactgtctactactacagcctcctgcagagctgtctgcagcaagctggccttccggagactcaggaccgcggccaggtgccccgcacaggctgtcctggggcggaggtgaccttgtgcgttctgggctcccccagcacctttctgcctgtgctgctggagggtggggtccagagcccgggaaacatgctcctttgcctgtcccctgcttggctgatgaaggtgccagcacccgggcagccgggtgaggcagccctgctagtctccaaggctgtgagcttccaccctgggggcctgacattcctggatgactttgtccccccgcgccgtgccacctactttttggcaggcctgggcctggggcctggccggggccgagaggcagcagaactcgcccgtgacctgacctgccccacaggagcttcggctgagctggcccggctgctggaggaccggctgctgacaaggcagttgctggcccagcagggtggtgtggctgtgccagcaaccctggctttcacctacaagccgccggggctgctgcggggaggggatgccagcctagggctacggctggtggagctgagtggcaaagagggccaggagacgctggtgaaagaggaagtggaggcttttctgcgctccgaggccctgggtgatatcctgcaggtagctgtgaagctcagtggctggcgctggcgggggcggcaggcatggcgtctgcacccgcgggcagagctgggtgcagtggtggacacagtgctggcgctgctggagaagctggaggaggaggagagtgtcctggtggaggctgtgtacccacctgcccagctgccctgctcagatggtccttcacccggccccggcctggccgtgcgaatctgtgctgtggtgtgtcggacacagggtgataggccactgctgagcaaggtggtgtgcggcgtgggccgcggggaccgccctctacggcaccacaactccctgccgaggacgctggaggtggcgctggcccagtgcggcctgggcgaggaggcgcaggtggcggctgtgcggcagcgcgtcaaggcggcggccgaggccgcgctggccgccgtgctggctctggaggccggcctgagtgccgagcagcgcggcgggcgccgggcgcacacggacttcctgggcgtggatttcgcgctgacagcggccggcggcgtgctgaccccagtggccctggagctgaacggcggcctgtgtctggaggcgtgcggcgcgctggaggggctgtgggccgcgccgcggctggggccggcggccgacgaggcggtggcggcgccgctggtggagaccatgcttcggcggtcggcgcgctgcctcatggagggaaaacagctgctggtggtcggcgctggcggcgtcagcaagaagttcgtgtgggaggcggcgcgcgactacgggctccagctgcacctcgtggagtcagaccccaaccactttgcatcccagttggtacagaccttcatccactttgacatgacagagcaccggagggatgaggagaacgcacggctgctggcagagttggtgcgggctcgcggcctcaagctagatggctgcttctcctactgggatgactgcctggtgctcacagccctgctctgccaggagctaggtctgccctgcagctccccagctgccatgcgcctggctaagcagaagagcctcacccagctgcacctgttgcaccaccatggcccaccctggcctgcgccctccctccatgctgtgccctgctgcccactggagagtgaggctgatgtggagagggccgtgcaccaggtacccctgccaggtgtcatgaagctggagttcggggcaggtgcagtgggtgtccggctggtagaggatgcgccacagtgccatgagcacttttcccggattacccgagacttgcagggcgaggccgaccacccaggcattgggctgggctggggcaatgccatgctgctgatggagtttgtggagggcaccgagcacgacgtggacctggtgttgtttggtgggcggttgctggctgcctttgtctccgacaatggccctacgaggctgcctggcttcactgagacggcggcctgcatgcccaccgggctggcaccagagcaggaggcacagatggttcaggcagccttccgctgttgcctgggctgcgggttgctcgatggagtcttcaacgtggagctcaagctgaccggggctgggcctcggcttatcgagatcaacccccgcatgggtggcttctacctgcgtgattggatcctggagctctatggtgttgacctgctgctggctgctgttatggtggcctgtggcttgcgtcctgccctgcccacccgcccacgtgctcgtggccatctggtgggcgtcatgtgccttgtgtcccagcacctgcaggccctgagttccaccgccagccgtgagaccctgcaggccctgcacgaccgtggactgctacgcctcaatctgctggaggaggccctggtgcctggcgagtatgaggagccctactgcagtgtggcctgtgccggacccagccccaccgaggcccgtctccgcctgctgggcctctgccagggcctgggcatcgatgggcccagctaccctgttgcccacttcctgtctcacttcaaatagcactggggtcagggggcagggaagcagtgctgggtggaggcactgtggtgccctctgctccctggagctcttcctgcttctctccccatcaccatgccccagccccagcctggcccgctgcaatgcctaggtctgttccagagcagcagggcaatttagacaccaaggcatcctggactcaagggcctcttgccctcccgaaggccccagtccagcctacagcttccccagcattctagccttggagaaatgacaatggccacacacacacacacacacacacacacacacctctgacgccagctccccaggtgggagtgggcccaaacccagcccctcctgtccacctctccaggtctcactctcttcctgccatctacaagaggagaggacctggctgggccccaagccttggacaaatcctgggaaaacctgagactagaacccttgtcttcctcttacccaaattctaggatagctctgaagcctgctggaaacttggtggcatccaacctgcctcattcggcctgaccggtagaggcaggtggcctgtggacagaagtaatcctctttctgctcaccccaggcagacacaactgcctatgttcccccgatgagaggaaacaggctgagagaagaaaaatgactgctccaggattataccacagtggagagcgggtcacaggacatgatgcagggtccaggtttctgttttgatcaagtcttacatgcccattcagcttctaggcccccctcacctccctgccctcattcacaagtggccctgagacacgtgaacacctccctcctatgcatcacaaaccttctccaccgagctttggtgctttggcctctggcacacctaactagcattggcagaggagagtctacactctcttcctcattcagggaagatgctttaagaaatcctgcctctgtgcagcagaggagctggaggcagctccccaggcatccctccccaaataaaggcttatgtactggtg

SEQ ID NO: 114473 - DNA, 2968 bp, Homo sapiens
  Payload ID: 2378
  Gene Symbol: CARNS1
  Gene Name: carnosine synthase 1
  Uniprot ID: A5YM72
  ENST ID: ENST00000531040
  CDS Start-End: 111-2885
gctgtgccactgccaccgccgccgccgctgcatcccgcccggtccgagtccgcccgccacgcccgccgagccgctgccgccgccagtctctcagccactccacccacgagatgctctccctggatccatcgggtcccgagtgggattgcccactgggctccaaggacctggaggaagagggcccctggggagggggctctggcctgccgcccacaggctgcttccctggctcctggcgccaggacgtgggcctggactgcaagggatcccccgagggggccgaggcccgggcttggactgtctactactacagcctcctgcagagctgtctgcagcaagctggccttccggagactcaggaccgcggccaggtgccccgcacaggctgtcctggggcggaggtgaccttgtgcgttctgggctcccccagcacctttctgcctgtgctgctggagggtggggtccagagcccgggaaacatgctcctttgcctgtcccctgcttggctgatgaaggtgccagcacccgggcagccgggtgaggcagccctgctagtctccaaggctgtgagcttccaccctgggggcctgacattcctggatgactttgtccccccgcgccgtgccacctactttttggcaggcctgggcctggggcctggccggggccgagaggcagcagaactcgcccgtgacctgacctgccccacaggagcttcggctgagctggcccggctgctggaggaccggctgctgacaaggcagttgctggcccagcagggtggtgtggctgtgccagcaaccctggctttcacctacaagccgccggggctgctgcggggaggggatgccagcctagggctacggctggtggagctgagtggcaaagagggccaggagacgctggtgaaagaggaagtggaggcttttctgcgctccgaggccctgggtgatatcctgcaggtagctgtgaagctcagtggctggcgctggcgggggcggcaggcatggcgtctgcacccgcgggcagagctgggtgcagtggtggacacagtgctggcgctgctggagaagctggaggaggaggagagtgtcctggtggaggctgtgtacccacctgcccagctgccctgctcagatggtccttcacccggccccggcctggccgtgcgaatctgtgctgtggtgtgtcggacacagggtgataggccactgctgagcaaggtggtgtgcggcgtgggccgcggggaccgccctctacggcaccacaactccctgccgaggacgctggaggccgcgctggccgccgtgctggctctggaggccggcctgagtgccgagcagcgcggcgggcgccgggcgcacacggacttcctgggcgtggatttcgcgctgacagcggccggcggcgtgctgaccccagtggccctggagctgaacggcggcctgtgtctggaggcgtgcggcgcgctggaggggctgtgggccgcgccgcggctggggccggcggccgacgaggcggtggcggcgccgctggtggagaccatgcttcggcggtcggcgcgctgcctcatggagggaaaacagctgctggtggtcggcgctggcggcgtcagcaagaagttcgtgtgggaggcggcgcgcgactacgggctccagctgcacctcgtggagtcagaccccaaccactttgcatcccagttggtacagaccttcatccactttgacatgacagagcaccggagggatgaggagaacgcacggctgctggcagagttggtgcgggctcgcggcctcaagctagatggctgcttctcctactgggatgactgcctggtgctcacagccctgctctgccaggagctaggtctgccctgcagctccccagctgccatgcgcctggctaagcagaagagcctcacccagctgcacctgttgcaccaccatggcccaccctggcctgcgccctccctccatgctgtgccctgctgcccactggagagtgaggctgatgtggagagggccgtgcaccaggtacccctgccaggtgtcatgaagctggagttcggggcaggtgcagtgggtgtccggctggtagaggatgcgccacagtgccatgagcacttttcccggattacccgagacttgcagggcgaggccgaccacccaggcattgggctgggctggggcaatgccatgctgctgatggagtttgtggagggcaccgagcacgacgtggacctggtgttgtttggtgggcggttgctggctgcctttgtctccgacaatggccctacgaggctgcctggcttcactgagacggcggcctgcatgcccaccgggctggcaccagagcaggaggcacagatggttcaggcagccttccgctgttgcctgggctgcgggttgctcgatggagtcttcaacgtggagctcaagctgaccggggctgggcctcggcttatcgagatcaacccccgcatgggtggcttctacctgcgtgattggatcctggagctctatggtgttgacctgctgctggctgctgttatggtggcctgtggcttgcgtcctgccctgcccacccgcccacgtgctcgtggccatctggtgggcgtcatgtgccttgtgtcccagcacctgcaggccctgagttccaccgccagccgtgagaccctgcaggccctgcacgaccgtggactgctacgcctcaatctgctggaggaggccctggtgcctggcgagtatgaggagccctactgcagtgtggcctgtgccggacccagccccaccgaggcccgtctccgcctgctgggcctctgccagggcctgggcatcgatgggcccagctaccctgttgcccacttcctgtctcacttcaaatagcactggggtcagggggcagggaagcagtgctgggtggaggcactgtggtgccctctgctccctggagctcttcctgcttctct

SEQ ID NO: 114474 - DNA, 915 bp, Homo sapiens
  Payload ID: 2379
  Gene Symbol: CARTPT
  Gene Name: CART prepropeptide
  Uniprot ID: Q16568
  ENST ID: ENST00000296777
  CDS Start-End: 132-482
agacggttgacccgggccctcctccacacccccttccttcttcgcctcctccctctttcctgcacgggggctcgggctcactataaaaggtgggagcgcgtggtgccccagcaacgacgagtttcagaacgatggagagctcccgcgtgaggctgctgcccctcctgggcgccgccctgctgctgatgctacctctgttgggtacccgtgcccaggaggacgccgagctccagccccgagccctggacatctactctgccgtggatgatgcctcccacgagaaggagctgatcgaagcgctgcaagaagtcttgaagaagctcaagagtaaacgtgttcccatctatgagaagaagtatggccaagtccccatgtgtgacgccggtgagcagtgtgcagtgaggaaaggggcaaggatcgggaagctgtgtgactgtccccgaggaacctcctgcaattccttcctcctgaagtgcttatgaaggggcgtccattctcctccatacatccccatccctctactttccccagaggaccacaccttcctccctggagtttggcttaagcaacagataaagtttttattttcctctgaagggaaagggctcttttcctgctgtttcaaaaataaaagaacacattagatgttactgtgtgaagaataatgccttgtatggtgttgatacgtgtgtgaagtattcttattttatttgtctgacaaactcttgtgtacctttgtgtaaagaagggaagctttgtttgaaaattgtatttttgtatgtggcatggcagaatgaaaattagatctagctaatctcggtagatgtcattacaacctggaaaataaatcaccctaagtgacacaaattgaagcatgtacaaattatacataataaagtgtttttaataattgcc

SEQ ID NO: 114475 - DNA, 1946 bp, Homo sapiens
  Payload ID: 2380
  Gene Symbol: CRTAC1
  Gene Name: cartilage acidic protein 1
  ENST ID: ENST00000309155
  CDS Start-End: 1-1914
atgtccaggatgttaccgttcctgctgctgctctggtttctgcccatcactgaggggtcccagcgggctgaacccatgttcactgcagtcaccaactcagttctgcctcctgactatgacagtaatcccacccagctcaactatggtgtggcagttactgatgtggaccatgatggggactttgagatcgtcgtggcggggtacaatggacccaacctggttctgaagtatgaccgggcccagaagcggctggtgaacatcgcggtcgatgagcgcagctcaccctactacgcgctgcgggaccggcaggggaacgccatcggggtcacagcctgcgacatcgacggggacggccgggaggagatctacttcctcaacaccaataatgccttctcgggggtggccacgtacaccgacaagttgttcaagttccgcaataaccggtgggaagacatcctgagcgatgaggtcaacgtggcccgtggtgtggccagcctctttgccggacgctctgtggcctgtgtggacagaaagggctctggacgctactctatctacattgccaattacgcctacggtaatgtgggccctgatgccctcattgaaatggaccctgaggccagtgacctctcccggggcattctggcgctcagagatgtggctgctgaggctggggtcagcaaatatacagggggccgaggcgtcagcgtgggccccatcctcagcagcagtgcctcggatatcttctgcgacaatgagaatgggcctaacttccttttccacaaccggggcgatggcacctttgtggacgctgcggccagtgctggtgtggacgacccccaccagcatgggcgaggtgtcgccctggctgacttcaaccgtgatggcaaagtggacatcgtctatggcaactggaatggcccccaccgcctctatctgcaaatgagcacccatgggaaggtccgcttccgggacatcgcctcacccaagttctccatgccctcccctgtccgcacggtcatcaccgccgactttgacaatgaccaggagctggagatcttcttcaacaacattgcctaccgcagctcctcagccaaccgcctcttccgcgtcatccgtagagagcacggagaccccctcatcgaggagctcaatcccggcgacgccttggagcctgagggccggggcacagggggtgtggtgaccgacttcgacggagacgggatgctggacctcatcttgtcccatggagagtccatggctcagccgctgtccgtcttccggggcaatcagggcttcaacaacaactggctgcgagtggtgccacgcacccggtttggggcctttgccaggggagctaaggtcgtgctctacaccaagaagagtggggcccacctgaggatcatcgacgggggctcaggctacctgtgtgagatggagcccgtggcacactttggcctggggaaggatgaagccagcagtgtggaggtgacgtggccagatggcaagatggtgagccggaacgtggccagcggggagatgaactcagtgctggagatcctctacccccgggatgaggacacacttcaggacccagccccactggagtgtggccaaggattctcccagcaggaaaatggccattgcatggacaccaatgaatgcatccagttcccattcgtgtgccctcgagacaagcccgtatgtgtcaacacctatggaagctacaggtgccggaccaacaagaagtgcagtcggggctacgagcccaacgaggatggcacagcctgcgtggctcaagtggcctttttaggtgggtattcttcagccgcctctagaatctctgagcctctctctcgggcctcatatctttctctaggccttggactttgccttcagttatatgcactttaaatcccatcaataaaggaaaaaacaaaacaaaa

SEQ ID NO: 114476 - DNA, 2348 bp, Homo sapiens
  Payload ID: 2380
  Gene Symbol: CRTAC1
  Gene Name: cartilage acidic protein 1
  Uniprot ID: Q9NQ79
  ENST ID: ENST00000370591
  CDS Start-End: 357-2294
ctggctgccggctgctgccaccgcaatcccggctcctaaatcagcgcggggaggcgctccctccccacgcccggctctccgggctctcggggccgcgattggccgcgccggcgccccccaccccgggcccccggctccagctgccgcgccattggctgcgggcctccgccagcctttacataagaccgggcgcgctcgagtggagttgtataaagcgagcgcgcggcgtcggggcgggaggctcgaggccagcccgggaccggggctgggagcaagcaggcggcggcgccggcggcagaggcggcagcgagcgcccgcttcccacgcccctaggcggcggggccgagagcgggaggatggctccgagcgctgaccccggcatgtccaggatgttaccgttcctgctgctgctctggtttctgcccatcactgaggggtcccagcgggctgaacccatgttcactgcagtcaccaactcagttctgcctcctgactatgacagtaatcccacccagctcaactatggtgtggcagttactgatgtggaccatgatggggactttgagatcgtcgtggcggggtacaatggacccaacctggttctgaagtatgaccgggcccagaagcggctggtgaacatcgcggtcgatgagcgcagctcaccctactacgcgctgcgggaccggcaggggaacgccatcggggtcacagcctgcgacatcgacggggacggccgggaggagatctacttcctcaacaccaataatgccttctcgggggtggccacgtacaccgacaagttgttcaagttccgcaataaccggtgggaagacatcctgagcgatgaggtcaacgtggcccgtggtgtggccagcctctttgccggacgctctgtggcctgtgtggacagaaagggctctggacgctactctatctacattgccaattacgcctacggtaatgtgggccctgatgccctcattgaaatggaccctgaggccagtgacctctcccggggcattctggcgctcagagatgtggctgctgaggctggggtcagcaaatatacagggggccgaggcgtcagcgtgggccccatcctcagcagcagtgcctcggatatcttctgcgacaatgagaatgggcctaacttccttttccacaaccggggcgatggcacctttgtggacgctgcggccagtgctggtgtggacgacccccaccagcatgggcgaggtgtcgccctggctgacttcaaccgtgatggcaaagtggacatcgtctatggcaactggaatggcccccaccgcctctatctgcaaatgagcacccatgggaaggtccgcttccgggacatcgcctcacccaagttctccatgccctcccctgtccgcacggtcatcaccgccgactttgacaatgaccaggagctggagatcttcttcaacaacattgcctaccgcagctcctcagccaaccgcctcttccgcgtcatccgtagagagcacggagaccccctcatcgaggagctcaatcccggcgacgccttggagcctgagggccggggcacagggggtgtggtgaccgacttcgacggagacgggatgctggacctcatcttgtcccatggagagtccatggctcagccgctgtccgtcttccggggcaatcagggcttcaacaacaactggctgcgagtggtgccacgcacccggtttggggcctttgccaggggagctaaggtcgtgctctacaccaagaagagtggggcccacctgaggatcatcgacgggggctcaggctacctgtgtgagatggagcccgtggcacactttggcctggggaaggatgaagccagcagtgtggaggtgacgtggccagatggcaagatggtgagccggaacgtggccagcggggagatgaactcagtgctggagatcctctacccccgggatgaggacacacttcaggacccagccccactggagtgtggccaaggattctcccagcaggaaaatggccattgcatggacaccaatgaatgcatccagttcccattcgtgtgccctcgagacaagcccgtatgtgtcaacacctatggaagctacaggtgccggaccaacaagaagtgcagtcggggctacgagcccaacgaggatggcacagcctgcgtggctcaagtggcctttttaggtgggtattcttcagccgcctctagaatctctgagcctctctctcgggcctcatatctttctctaggccttggactttgccttcagttatatgcactttaaatcccatcaataaaggaaaaaacaaaacaaaactaacagcctttgtggaaaact

SEQ ID NO: 114477 - DNA, 2890 bp, Homo sapiens
  Payload ID: 2380
  Gene Symbol: CRTAC1
  Gene Name: cartilage acidic protein 1
  Uniprot ID: Q9NQ79
  ENST ID: ENST00000370597
  CDS Start-End: 357-2342
ctggctgccggctgctgccaccgcaatcccggctcctaaatcagcgcggggaggcgctccctccccacgcccggctctccgggctctcggggccgcgattggccgcgccggcgccccccaccccgggcccccggctccagctgccgcgccattggctgcgggcctccgccagcctttacataagaccgggcgcgctcgagtggagttgtataaagcgagcgcgcggcgtcggggcgggaggctcgaggccagcccgggaccggggctgggagcaagcaggcggcggcgccggcggcagaggcggcagcgagcgcccgcttcccacgcccctaggcggcggggccgagagcgggaggatggctccgagcgctgaccccggcatgtccaggatgttaccgttcctgctgctgctctggtttctgcccatcactgaggggtcccagcgggctgaacccatgttcactgcagtcaccaactcagttctgcctcctgactatgacagtaatcccacccagctcaactatggtgtggcagttactgatgtggaccatgatggggactttgagatcgtcgtggcggggtacaatggacccaacctggttctgaagtatgaccgggcccagaagcggctggtgaacatcgcggtcgatgagcgcagctcaccctactacgcgctgcgggaccggcaggggaacgccatcggggtcacagcctgcgacatcgacggggacggccgggaggagatctacttcctcaacaccaataatgccttctcgggggtggccacgtacaccgacaagttgttcaagttccgcaataaccggtgggaagacatcctgagcgatgaggtcaacgtggcccgtggtgtggccagcctctttgccggacgctctgtggcctgtgtggacagaaagggctctggacgctactctatctacattgccaattacgcctacggtaatgtgggccctgatgccctcattgaaatggaccctgaggccagtgacctctcccggggcattctggcgctcagagatgtggctgctgaggctggggtcagcaaatatacagggggccgaggcgtcagcgtgggccccatcctcagcagcagtgcctcggatatcttctgcgacaatgagaatgggcctaacttccttttccacaaccggggcgatggcacctttgtggacgctgcggccagtgctggtgtggacgacccccaccagcatgggcgaggtgtcgccctggctgacttcaaccgtgatggcaaagtggacatcgtctatggcaactggaatggcccccaccgcctctatctgcaaatgagcacccatgggaaggtccgcttccgggacatcgcctcacccaagttctccatgccctcccctgtccgcacggtcatcaccgccgactttgacaatgaccaggagctggagatcttcttcaacaacattgcctaccgcagctcctcagccaaccgcctcttccgcgtcatccgtagagagcacggagaccccctcatcgaggagctcaatcccggcgacgccttggagcctgagggccggggcacagggggtgtggtgaccgacttcgacggagacgggatgctggacctcatcttgtcccatggagagtccatggctcagccgctgtccgtcttccggggcaatcagggcttcaacaacaactggctgcgagtggtgccacgcacccggtttggggcctttgccaggggagctaaggtcgtgctctacaccaagaagagtggggcccacctgaggatcatcgacgggggctcaggctacctgtgtgagatggagcccgtggcacactttggcctggggaaggatgaagccagcagtgtggaggtgacgtggccagatggcaagatggtgagccggaacgtggccagcggggagatgaactcagtgctggagatcctctacccccgggatgaggacacacttcaggacccagccccactggagtgtggccaaggattctcccagcaggaaaatggccattgcatggacaccaatgaatgcatccagttcccattcgtgtgccctcgagacaagcccgtatgtgtcaacacctatggaagctacaggtgccggaccaacaagaagtgcagtcggggctacgagcccaacgaggatggcacagcctgcgtggggactctcggccagtcaccgggcccccgccccaccacccccaccgctgctgctgccactgccgctgctgctgccgctgctggagctgccactgctgcaccggtcctcgtagatggagatctcaatctggggtcggtggttaaggagagctgcgagcccagctgctgagcaggggtgggacatgaaccagcggatggagtccagcaggggagtgggaaagtgggcttgtgctgctgcctagacagtagggatgtaaaggcctgggagctagaccctccccaagcccatccatgcacattacttagctaacaattagggagactcgtaaggccaggccctgtgctgggcacatagctgtgatcacagcagacagggtcgctgccctgatggcgcttacattccagtgggtctaatgaccatatcttaggacacagatgtgcccagggaggtggtgtcactgcacaggaagtatgaggactttagtgtcctgagttcaaatcctgattcaggaactcacaaagctatgtgaccttacaccagtcacttaacttgttagccatccattatcgcatctgcaaaatggggattaagaatagaatcttggggttagtgtggagattagattaaatgtatgtaagacacttggcacaaaacctggcacatagtaaaggctcaataaaaacaagtgcctctcactgggctttgtcaacacgtga

SEQ ID NO: 114478 - DNA, 474 bp, Homo sapiens
  Payload ID: 2380
  Gene Symbol: CRTAC1
  Gene Name: cartilage acidic protein 1
  ENST ID: ENST00000436034
  CDS Start-End: 1-238
ggatgaggacacacttcaggacccagccccactggagacaccaatgaatgcatccagttcccattcgtgtgccctcgagacaagcccgtatgtgtcaacacctatggaagctacaggtgccggaccaacaagaagtgcagtcggggctacgagcccaacgaggatggcacagcctgcgtggaaagaaccttgctacttggtctctgcaatctccttggaaaatagaatgctcctgtagccagaacactctttggaaatgatgtaacgccacagaatatgctcacgaccagcctcagtagtgaaggcttgttataaaacatagatctattcttcatggggaaaaaaagtcatcccaggatataataaaattacacttaagaatgcagcaacccttttaaaaacatattcaacaaaaaaaaagcccctgccattttctgatatcatggtaatactcctaataaatcacaaaatatg

SEQ ID NO: 114479 - DNA, 2179 bp, Homo sapiens
  Payload ID: 2380
  Gene Symbol: CRTAC1
  Gene Name: cartilage acidic protein 1
  ENST ID: ENST00000413387
  CDS Start-End: 1-1575
tacgcgctgcgggaccggcaggggaacgccatcggggtcacagcctgcgacatcgacggggacggccgggaggagatctacttcctcaacaccaataatgccttctcgggggtggccacgtacaccgacaagttgttcaagttccgcaataaccggtgggaagacatcctgagcgatgaggtcaacgtggcccgtggtgtggccagcctctttgccggacgctctgtggcctgtgtggacagaaagggctctggacgctactctatctacattgccaattacgcctacggtaatgtgggccctgatgccctcattgaaatggaccctgaggccagtgacctctcccggggcattctggcgctcagagatgtggctgctgaggctggggtcagcaaatatacagggggccgaggcgtcagcgtgggccccatcctcagcagcagtgcctcggatatcttctgcgacaatgagaatgggcctaacttccttttccacaaccggggcgatggcacctttgtggacgctgcggccagtgctggtgtggacgacccccaccagcatgggcgaggtgtcgccctggctgacttcaaccgtgatggcaaagtggacatcgtctatggcaactggaatggcccccaccgcctctatctgcaaatgagcacccatgggaaggtccgcttccgggacatcgcctcacccaagttctccatgccctcccctgtccgcacggtcatcaccgccgactttgacaatgaccaggagctggagatcttcttcaacaacattgcctaccgcagctcctcagccaaccgcctcttccgcgtcatccgtagagagcacggagaccccctcatcgaggagctcaatcccggcgacgccttggagcctgagggccggggcacagggggtgtggtgaccgacttcgacggagacgggatgctggacctcatcttgtcccatggagagtccatggctcagccgctgtccgtcttccggggcaatcagggcttcaacaacaactggctgcgagtggtgccacgcacccggtttggggcctttgccaggggagctaaggtcgtgctctacaccaagaagagtggggcccacctgaggatcatcgacgggggctcaggctacctgtgtgagatggagcccgtggcacactttggcctggggaaggatgaagccagcagtgtggaggtgacgtggccagatggcaagatggtgagccggaacgtggccagcggggagatgaactcagtgctggagatcctctacccccgggatgaggacacacttcaggacccagccccactggagacaccaatgaatgcatccagttcccattcgtgtgccctcgagacaagcccgtatgtgtcaacacctatggaagctacaggtgccggaccaacaagaagtgcagtcggggctacgagcccaacgaggatggcacagcctgcgtggggactctcggccagtcaccgggcccccgccccaccacccccaccgctgctgctgccactgccgctgctgctgccgctgctggagctgccactgctgcaccggtcctcgtagatggagatctcaatctggggtcggtggttaaggagagctgcgagcccagctgctgagcaggggtgggacatgaaccagcggatggagtccagcaggggagtgggaaagtgggcttgtgctgctgcctagacagtagggatgtaaaggcctgggagctagaccctccccaagcccatccatgcacattacttagctaacaattagggagactcgtaaggccaggccctgtgctgggcacatagctgtgatcacagcagacagggtcgctgccctgatggcgcttacattccagtgggtctaatgaccatatcttaggacacagatgtgcccagggaggtggtgtcactgcacaggaagtatgaggactttagtgtcctgagttcaaatcctgattcaggaactcacaaagctatgtgaccttacaccagtcacttaacttgttagccatccattatcgcatctgcaaaatggggattaagaatagaatcttggggttagtgtggagattagattaaatgtatgtaagacacttggcacaaaacctggcacatagtaaaggctcaataaaaacaagtgcctctcactgggctttgtcaacacgtga

SEQ ID NO: 114480 - DNA, 6630 bp, Homo sapiens
  Payload ID: 2381
  Gene Symbol: CRTAP
  Gene Name: cartilage associated protein
  Uniprot ID: O75718
  ENST ID: ENST00000320954
  CDS Start-End: 100-1305
aagcactgggcccgccgcgtcgcaccgtcctctttcctttccttctccctccccttttcccttccttcgtcccttccttccttcctttcgccgggcgcgatggagccggggcgccggggggccgcggcgctgctagcgctgctgtgcgtggcctgcgcgctgcgcgccgggcgcgcccaatacgaacgctacagcttccgcagcttcccacgggacgagctgatgccgctcgagtcggcctaccggcacgcgctggacaagtacagcggcgagcactgggccgagagcgtgggctacctggagatcagcctgcggctgcaccgcttgctgcgcgacagcgaggccttctgccaccgcaactgcagcgccgcgccgcagcccgagcccgccgccggcctcgccagctatcccgagctgcgcctcttcgggggcctgctgcgccgcgcgcactgcctcaagcgctgcaagcagggcctgccagccttccgccagtcccagcccagccgcgaggtgctggcggacttccagcgccgcgagccctacaagttcctgcagttcgcttacttcaaggcaaataatctccccaaagccatcgccgctgctcacacctttctactgaagcatcctgatgacgaaatgatgaagaggaacatggcatattataagagcctgcctggtgccgaggactacattaaagacctggaaaccaagtcatatgaaagcctgttcatccgagcagtgcgggcatacaacggtgagaactggagaacatccatcacagacatggagctggcccttcccgacttcttcaaagccttttacgagtgtctcgcagcctgcgagggttccagggagatcaaggacttcaaggatttctacctttccatagcagatcattatgtagaagttctggaatgcaaaatacagtgtgaagagaacctcaccccagttataggaggctatccggttgagaaatttgtggctaccatgtatcattacttgcagtttgcctattataagttgaacgacctgaagaatgcagccccctgtgcagtcagctatctgctctttgatcagaatgacaaggtcatgcagcagaacctggtgtattaccagtaccacagggacacttggggcctctcggatgagcacttccagcccagacctgaagcagttcagttctttaatgtgaccacactccagaaggagctgtatgactttgctaaggaaaatataatggatgatgatgagggagaagttgtggaatatgtggatgacctcttggaactggaggagaccagctagcccacagcaaccaaagagacttcctcttggcgttcaggaaacacagattctttgtccttttcccaacagcccaggctgttgatacctcagagccttctctttactctccaaagtgaaagggaagcccccgtctctctaactgcatgtcatcaggggtgagcctgcctttcctatcttcacacctgccacctcatgttcacacctatctttctcaccttttttttgagatggagtctcgctctcttgcccaggctggagtgcaatggcacgttctcagctcactgcaacctccgcctcttgggttcaagcaattctgctgcatcagcctcccgagtacctgggattacaggcatgtgccaccacgcccggctaattttgtatttttagtagagacggggttttgccatgttggccaggctggtctcgaactcttgacttcagatgatccatctgccttggcctcccacagtgctgggattacaggcgtgagccaccatgcccggcctctttctcacctttacacctgtcttcttatcctcacatctgttttcacaccttcatccctgtcttcctcatgttcacacttgtcttccccatgttcatagctgcctttcttaccattttggtttgaagggcagtcttctctggcttgtttttttgtttttcccagaaaatcagtattattttttaaataagaaaaacattcctagaagatgataattgtgaaaacctcctttggcttatttgcttttccagattttagtctcctttctccccatccgggaaagatggtggaagacataggctaaatttctccagcctcacaatggtcttcacttggtctgacttgtaccaattctagcacccactgaaaaacaagttgagtagagagtgtagagtgcagaaatgtggcttttgccccactttgcatctccaaaattacaacggttggccgatcccatttgaggacaatgcttagttataagtctccgagttggaaaaggaagaaagccagagctgtctagtttcattcattctttcagtaaatatttattgagtacctactgtgtgctaggcattgacctgggaactagagatacttcacagaataacagggaaagttccctgtgctcatggagcttacattctacagggagaaagagatagccaatacataggaataaatatatacaaggtatcatgtagtgataattgctgtggagaaaaataaagcaggggagggagtaagaaatcctggagatgaggctgcagttttaaatggggcctcactgggaatgtgacgttgagcagagacgttagggaagtggatcctggacaaggcattccaggcagaggaacaggatgtgcactgccccaaagtgagaacttgctctacgtggtcaggaaagagcagggagaccaagcagagtcgtgggcaggggtagaatggaaggagaggcggctggggaggacaggtggtggagggccttggcttctgctaagtgagatgggaaccactggagggtttgaacagaggagtgccttgattgatttatattttgcaagggtcattctagctgccatattgtgaaaaactttagtggacaagggcagaaggaagagggaagacctgttaggaagctactgcaaggttccaggcttgggcctgggccacagcaacagcagtggtcaaatatctagatttattttgaaaagagccaataggatttgctgagagtttgaatgtggagtgtaagagaaggaagagttaatgatgacattaaggtttttggcctgaatagcaggaaagatggagttaccagttactgaaatagggaaggatgggctgggtaagtatggaatttggtgcaaagcaggctgtctgtggttggaatgggaggttctggctgcaaatcaaagtggagagttctctcaggtcaggtctgcagcagagctcgagacagggatctgaatgcacttggtttattgttgggggtgctctcagaaggaacctgtgaaagcctttatcagtcatttattggctgtgagaagttctctgggagtgtgggtacatttgaaggcaagtgacttcagttgagggcaagtctctggaaaagaggctgtaggcatctggcagctaccatgcatggtagtgtgttgggggtgggggtcctgggcactggctgtgtgaagggatctggcagggcaccacagcgccccctactgaaccatcagcatgtcagtggcatttaaagccatgcagctggaggggccactgagattgtctctgagtattactgagaagcaacagaaaagagccatggatggagcccttgggctctctgggaaatgggaaatcagccaaaggactgagaaggagttaccttaaggtcagagaaaaccaagagagtgtggtgttctggaagctgagctttctttattcaacctcattcccttctccaaataagccacttgtgtagttgggcccctccagggttgaaggcaagaggagaaaggcacagcgtttgggaaacaagacttttcctgcaatagcctgggaaggaataaaaggatagagtgtttgggtttttgtgtaatggtggttaattggggtggaacactcacacgttgtgctttttctgggcttcccttatcccccagaacactctaccaacctcggggaactcgggcacatccttctgtttctccttcagctctatcctgctttcctcatcccttctgacaccacgtcctcactcacctgcacaagaatccctgcatcaggttctcctttgagggtacccacccaggacagtcccctaccacttctgtcttgggctgaagttgcccacgtccacaaaatctgtactcccagcgggggtgtttggcccgaggagtcagtgttattactggtggatgcaccgtgtccacagcagcccccaatcccagcgatgcgtcagatcttacgtggcttcctgctgggggagatggccttcacccacgggatgccgggttctcctttctttcctcaccccaacctttactccaccagagaaacttccttttgaactcagtggggaagagggtgatgagacaggactagaaagtagtgggggacccagcgagtggacgccctgctccgggattcctgagtctgtaaatagtgtgcccagcagctgtgaactccccttatagcctcaggctgcagtgtccttcccagctgtgtgagaaaatgaaagccgacgtccacagggacccaggcagggttgggtgttgtgactcactccacctctgtgccctgcagaggtactgttgggtccttgtcttgtgagcctggggtgagctctctgtacatgttgttgttccacgtatgggttgacttggcatgctggggggtcctcgttcactctctgaagttggcctcctttcactggggattgaaaagcacctccacccctaccctagtgatgtcccctgaggacccgggtgatagtacagtcaatattgtcagtactttgctttgattgaaggctgtagagctgagttaccaaaatttctatttcaaaggaaaccaaaccttaaaaaaaaaaaacaaaaactgggctgggtcttccaaacctaccatgaaaccctggtgtgcaggctgcactcaatgacctcaacccaacacctccctgagtgtgcttcttggaagagcctagaagattcctggatggagaccccattggttcagcctcaagtctggcccgtcttcgaaaaaacaaacacatttgtaagctttgtgggagcttccaggcctgctctaagatgccttgcttgtcctttgacccatcagcatggagctcagtggttgctgtttggttctgcaggctggtggggaggccgcccatcgtggtggggcatctgtccagccccattgccactcagggcatccaaacaggaggcacccgctgggaagggtctaaagatactccttgtggccactgctactgttcacacttgacttgtggagaagcgaagggctgaggggaggtttgtgtacacccatgtatttaaaagtgactgactgactgaaatgagcacataccgacatatgcaacatactaataccttcctgattttcgagactttctaattactacaactaacctgttgtgctcacctctggaattcagaaagagagccactgcgagcactgaccacaagggctgccttaggaaggaaatgtgtgctttcaggagttcttattaggggaattttaagagcacaaaaattttattgaacccaccttagtgacaaacagaaaatgatttgttagattgtcagttggaaggggtttattatgactgctggtgaaataaacagtgaccagtttctgccaacatttatggaaataacgtttctaggttttaaatgtgagccgtaaactgaagctacttcagttaaaaaaaaaaaaatcaatacttaaactgtagggaaaaggtggattggtgccagagaaaacattatttaatagtgtcagaacatggaactgcaacacagtttgtagcaaggcactgagaaaaacccacaactaatccttcatcgcagctgtctgaactcttgatcatctgccatcccccaaacagtgacttctttttttctggtgactccaggcctgaatgacctagtgtggagagtttaaactatgtacaagggaggaaagaaaaaaaggaaaggaaccttaagtaagcctcagccaaaggttttatgcattggacttcctgtgcctgcccccaggggcaagactgatccccatgcctgtgcccatgacatctccctgaaagaggacaccatgacagcccggctttgccttgactgacccactgctaccccagaaataagaatcaagagcagctattgttatccttagagtgttttccgtctagggccggctcgtgaacagccacatatccttgcacctgacactgtccccacacaaatagctggctttcgttgcttgttgaatgaatgagtgagttggctctatatccccttggagctggccggtaagatattagtgcctcattttacaagaagagaataggaaggaattaagcaatttggccaacagatacaagatagattccagagttttatctcccactttagggtggcagccagtaggccaaactccaaagaccgttgctgatgtctttttctgcctcccctctttgggttagtgtggtatgtacaagctcactcttgttgaaaattagaaaatagttgaaaacaaaaggtttttgtttttctttttaaatcacattaaatgttttacattgctta

SEQ ID NO: 114481 - DNA, 1811 bp, Homo sapiens
  Payload ID: 2381
  Gene Symbol: CRTAP
  Gene Name: cartilage associated protein
  ENST ID: ENST00000449224
  CDS Start-End: 25-1101
ccttccttcctttcgccgggcgcgatggagccggggcgccggggggccgcggcgctgctagcgctgctgtgcgtggcctgcgcgctgcgcgccgggcgcgcccaatacgaacgctacagcttccgcagcttcccacgggacgagctgatgccgctcgagtcggcctaccggcacgcgctggacaagtacagcggcgagcactgggccgagagcgtgggctacctggagatcagcctgcggctgcaccgcttgctgcgcgacagcgaggccttctgccaccgcaactgcagcgccgcgccgcagcccgagcccgccgccggcctcgccagctatcccgagctgcgcctcttcgggggcctgctgcgccgcgcgcactgcctcaagcgctgcaagcagggcctgccagccttccgccagtcccagcccagccgcgaggtgctggcggacttccagcgccgcgagccctacaagttcctgcagttcgcttacttcaaggcaaataatctccccaaagccatcgccgctgctcacacctttctactgaagcatcctgatgacgaaatgatgaagaggaacatggcatattataagagcctgcctggtgccgaggactacattaaagacctggaaaccaagtcatatgaaagcctgttcatccgagcagtgcgggcatacaacggtgagaactggagaacatccatcacagacatggagctggcccttcccgacttcttcaaagccttttacgagtgtctcgcagcctgcgagggttccagggagatcaaggacttcaaggatttctacctttccatagcagtgaacgacctgaagaatgcagccccctgtgcagtcagctatctgctctttgatcagaatgacaaggtcatgcagcagaacctggtgtattaccagtaccacagggacacttggggcctctcggatgagcacttccagcccagacctgaagcagttcagttctttaatgtgaccacactccagaaggagctgtatgactttgctaaggaaaatataatggatgatgatgagggagaagttgtggaatatgtggatgacctcttggaactggaggagaccagctagcccacagcaaccaaagagacttcctcttggcgttcaggaaacacagattctttgtccttttcccaacagcccaggctgttgatacctcagagccttctctttactctccaaagtgaaagggaagcccccgtctctctaactgcatgtcatcaggggtgagcctgcctttcctatcttcacacctgccacctcatgttcacacctatctttctcaccttttttttgagatggagtctcgctctcttgcccaggctggagtgcaatggcacgttctcagctcactgcaacctccgcctcttgggttcaagcaattctgctgcatcagcctcccgagtacctgggattacaggcatgtgccaccacgcccggctaattttgtatttttagtagagacggggttttgccatgttggccaggctggtctcgaactcttgacttcagatgatccatctgccttggcctcccacagtgctgggattacaggcgtgagccaccatgcccggcctctttctcacctttacacctgtcttcttatcctcacatctgttttcacaccttcatccctgtcttcctcatgttcacacttgtcttccccatgttcatagctgcctttcttaccattttggtttgaagggcagtcttctctggcttgtttttttgtttttcccagaaaatcagtattattttttaaataagaaaaacattcctag

SEQ ID NO: 114482 - DNA, 4199 bp, Homo sapiens
  Payload ID: 2382
  Gene Symbol: CILP2
  Gene Name: cartilage intermediate layer protein 2
  Uniprot ID: Q8IUL8
  ENST ID: ENST00000291495
  CDS Start-End: 86-3556
agtcccagcggccgccagacccgccggagttggacccgagcacgccgcggagcccggaccctccctcggacgctctgccccggccatggcgtcgctgctgccactgctctgtctctgtgtcgtcgctgcgcacctggcgggggcccgagacgccacccccaccgaggagccaatggcgactgcactgggcctggaaagacggtccgtgtacaccggccagccctcaccagccctggaggactgggaagaggccagcgagtggacgtcctggttcaacgtggaccaccccggaggcgacggcgacttcgagagcctggctgccatccgcttctactacgggccagcgcgcgtgtgcccgcgaccgctggcgctggaagcgcgcaccacggactgggccctgccgtccgccgtcggcgagcgcgtgcacttgaaccccacgcgcggcttctggtgcctcaaccgcgagcaaccgcgtggccgccgctgctccaactaccacgtgcgcttccgctgcccactagaagcctcgtggggcgcgtggggcccgtggggtccctgctcggggagctgtgggccaggccgtcgcttgcgccgccgccactgcccaagccccgctggggatgcgtgtcccgggcgtcctctggaggcgcagaagtgcgtgcggcctcggtgtccagggtgcagccttgacacctgtgaatgcccggaccacatcctcctgggctcggtggtcaccccatctgggcaaccactgctaggagccagggtctccctgcgagaccagcctggcactgtggccaccagcgatgctcacggaaccttccgggtgcctggtgtctgtgctgacagccgcgccaacatcagggcccagatggatggcttctctgcaggggaggcccaggcccaggccaacggatccatctctgtggtcaccatcatccttgataagttggagaagccgtacctggtgaaacaccctgagtcccgagtgcgagaggctggccagaatgtgactttctgctgcaaagcctccgggacccccatgcccaagaaatactcctggttccacaatgggaccctgctggacaggcgagctcatgggtacggggcccacctggagctgcggggactgcgcccagaccaggctggcatctaccactgcaaggcatggaatgaggcgggtgccgtgcgctcgggcactgcccggctcactgtacttgccccaggccagccagcctgcgacccccggccccgagagtacctgatcaagctccctgaggactgtggtcagccaggtagtggccctgcctacctggatgtgggcctctgtcccgacacccgctgccccagcctggcaggctccagcccccgctgcggggacgccagctcccgctgctgctctgtgcgccgtctggagagaagggagattcactgccctggctacgtcctcccagtgaaggtggtggcagagtgtggctgccagaagtgtctgccccctcgggggctggtccggggccgtgttgtggctgctgactccggggagccgctacgcttcgccaggattctgctgggccaggagcccatcggcttcaccgcctaccagggcgactttaccattgaggtgccgccctccacccagcggctggtggtgacttttgtggaccccagcggtgagttcatggacgctgtccgggtcttgccttttgatcctcgaggtgccggcgtgtaccacgaggtcaaggccatgcggaagaaagccccggtcattttacataccagccagagcaacacgatccccctgggcgagctggaagatgaggcgcccctgggcgagctggtcctgccttctggcgctttccgcagagccgacggcaaaccctactcggggcctgtggaggcccgggtgacgttcgtggacccccgagacctcacctcggcggcgtctgcccccagtgacctgcgcttcgtggacagcgacggcgagctggctccactgcgcacctacggcatgttctccgtggacctccgtgcgcccggctccgcggagcagctgcaggtggggccggtggccgtgcgggtggccgccagccagatccacatgccaggccacgtggaggccctcaagctgtggtcgctgaaccccgagaccggcttgtgggaggaggagagcggcttccggcgcgaggggtcctcgggcccccgggtgcgccgggaggagcgcgtcttcctggtgggcaacgtggagatccgggagcggcgcctgttcaatctggacgtgcctgagcgccgccgctgcttcgtgaaggtgcgcgcctacgccaacgacaagttcacccccagcgagcaggtggagggcgtggtggtcacgctggtcaatctggagcccgcccccggcttctccgccaacccccgtgcctggggccgctttgacagcgcggtcaccggccccaatggcgcctgcctccccgccttctgcgacgccgacaggccagacgcctacaccgccctggtcaccgccaccctgggcggcgaggagctggagccggccccttccttgccccgcccactcccggccaccgtgggcgtcacccagccctacctggacaggctggggtaccgtcggacggaccacgacgatcccgccttcaagcgtaacggcttccgcatcaacctcgccaagcccaggccaggtgaccccgccgaggccaatgggcctgtgtacccgtggcgcagcctgcgggaatgccagggggccccggtgactgccagccacttccgcttcgccagggtggaggcggacaagtacgagtacaacgtggtccccttccgagagggcacacctgcctcctggactggcgatctcctggcctggtggcccaacccgcaggagttccgggcctgcttcctcaaggtgaagatccagggtccccaggagtatatggtccgctcccacaacgcagggggcagccacccacgcacccgcggccagctctacggacttcgggatgcccggagtgtgcgagaccccgagcgtccgggcacctcggcagcctgcgtggagttcaagtgcagcgggatgctgttcgaccagcggcaggtggacaggacgctggtgaccattatgccccagggcagctgccggcgcgtggccgtcaacggactccttcgggattacctgacccggcaccccccaccggtgcccgcggaggacccagctgccttctccatgctggcccccctagaccctctgggccacaactatggcgtctacactgtcactgaccagagcccacgcttggccaaggagatcgccattggccgctgctttgatggttcctctgacggcttctccagagagatgaaggctgatgccggcacagccgtcaccttccagtgccgggagccaccggccggacgacccagcctcttccagaggctgctggagtccccggcgacagcacttggtgacatccgcagggagatgagcgaggcggcgcaggcacaggcccgggcctcaggtcccctccgcacccgccggggtagggtccggcagtgacctgggcaggggcctcgctttcccacctccctccagactcctttgaccccaggaagttttgcccctccttcttctccagacagccccctccccaggtgtctgggtcccctttcccgcccctttccagaactcagagtcagacaagaacccagagcatccgatggtagaaacaccaggaagacaattgttgctgtgtggtatggaatggagtttgcggtgactctggggccagcacccaggggacgacgttcaaccctagcctgaagggacccgctcccagctcagaagccgtctctgacttctcgtgcgtattttgaccctgatttcaatcttctacccttgggagttctggcgtttggcacaaagtcccctctgcctgtttggagctcagtgctagaccaggtcccctgccccgagctttgtttttggggttatttattgaaacaaagtgtggggagctggttgtgggtgtgagtgggggtgtggggtccaggctgggcccagtgaaaaggaggaaggggttcccatgcgggggaggctctggggctgaggggaacaattctcacgtgtttggtgcttagagacctgcccggggcgttgggcaggccctccgggggctgaattaaaaatgctttatttccaa

SEQ ID NO: 114483 - DNA, 4234 bp, Homo sapiens
  Payload ID: 2382
  Gene Symbol: CILP2
  Gene Name: cartilage intermediate layer protein 2
  ENST ID: ENST00000586018
  CDS Start-End: 103-3591
atcccgcccccactctcagtcccagcggccgccagacccgccggagttggacccgagcacgccgcggagcccggaccctccctcggacgctctgccccggccatggcgtcgctgctgccactgctctgtctctgtgtcgtcgctgcgcacctggcgggggcccgagacgccacccccaccgaggagccaatggcgactgcactgggcctggaaagacggtccgtgtacaccggccagccctcaccagccctggaggactgggaagcgcgtgcggtgcccgcagaggccagcgagtggacgtcctggttcaacgtggaccaccccggaggcgacggcgacttcgagagcctggctgccatccgcttctactacgggccagcgcgcgtgtgcccgcgaccgctggcgctggaagcgcgcaccacggactgggccctgccgtccgccgtcggcgagcgcgtgcacttgaaccccacgcgcggcttctggtgcctcaaccgcgagcaaccgcgtggccgccgctgctccaactaccacgtgcgcttccgctgcccactagaagcctcgtggggcgcgtggggcccgtggggtccctgctcggggagctgtgggccaggccgtcgcttgcgccgccgccactgcccaagccccgctggggatgcgtgtcccgggcgtcctctggaggcgcagaagtgcgtgcggcctcggtgtccagggtgcagccttgacacctgtgaatgcccggaccacatcctcctgggctcggtggtcaccccatctgggcaaccactgctaggagccagggtctccctgcgagaccagcctggcactgtggccaccagcgatgctcacggaaccttccgggtgcctggtgtctgtgctgacagccgcgccaacatcagggcccagatggatggcttctctgcaggggaggcccaggcccaggccaacggatccatctctgtggtcaccatcatccttgataagttggagaagccgtacctggtgaaacaccctgagtcccgagtgcgagaggctggccagaatgtgactttctgctgcaaagcctccgggacccccatgcccaagaaatactcctggttccacaatgggaccctgctggacaggcgagctcatgggtacggggcccacctggagctgcggggactgcgcccagaccaggctggcatctaccactgcaaggcatggaatgaggcgggtgccgtgcgctcgggcactgcccggctcactgtacttgccccaggccagccagcctgcgacccccggccccgagagtacctgatcaagctccctgaggactgtggtcagccaggtagtggccctgcctacctggatgtgggcctctgtcccgacacccgctgccccagcctggcaggctccagcccccgctgcggggacgccagctcccgctgctgctctgtgcgccgtctggagagaagggagattcactgccctggctacgtcctcccagtgaaggtggtggcagagtgtggctgccagaagtgtctgccccctcgggggctggtccggggccgtgttgtggctgctgactccggggagccgctacgcttcgccaggattctgctgggccaggagcccatcggcttcaccgcctaccagggcgactttaccattgaggtgccgccctccacccagcggctggtggtgacttttgtggaccccagcggtgagttcatggacgctgtccgggtcttgccttttgatcctcgaggtgccggcgtgtaccacgaggtcaaggccatgcggaagaaagccccggtcattttacataccagccagagcaacacgatccccctgggcgagctggaagatgaggcgcccctgggcgagctggtcctgccttctggcgctttccgcagagccgacggcaaaccctactcggggcctgtggaggcccgggtgacgttcgtggacccccgagacctcacctcggcggcgtctgcccccagtgacctgcgcttcgtggacagcgacggcgagctggctccactgcgcacctacggcatgttctccgtggacctccgtgcgcccggctccgcggagcagctgcaggtggggccggtggccgtgcgggtggccgccagccagatccacatgccaggccacgtggaggccctcaagctgtggtcgctgaaccccgagaccggcttgtgggaggaggagagcggcttccggcgcgaggggtcctcgggcccccgggtgcgccgggaggagcgcgtcttcctggtgggcaacgtggagatccgggagcggcgcctgttcaatctggacgtgcctgagcgccgccgctgcttcgtgaaggtgcgcgcctacgccaacgacaagttcacccccagcgagcaggtggagggcgtggtggtcacgctggtcaatctggagcccgcccccggcttctccgccaacccccgtgcctggggccgctttgacagcgcggtcaccggccccaatggcgcctgcctccccgccttctgcgacgccgacaggccagacgcctacaccgccctggtcaccgccaccctgggcggcgaggagctggagccggccccttccttgccccgcccactcccggccaccgtgggcgtcacccagccctacctggacaggctggggtaccgtcggacggaccacgacgatcccgccttcaagcgtaacggcttccgcatcaacctcgccaagcccaggccaggtgaccccgccgaggccaatgggcctgtgtacccgtggcgcagcctgcgggaatgccagggggccccggtgactgccagccacttccgcttcgccagggtggaggcggacaagtacgagtacaacgtggtccccttccgagagggcacacctgcctcctggactggcgatctcctggcctggtggcccaacccgcaggagttccgggcctgcttcctcaaggtgaagatccagggtccccaggagtatatggtccgctcccacaacgcagggggcagccacccacgcacccgcggccagctctacggacttcgggatgcccggagtgtgcgagaccccgagcgtccgggcacctcggcagcctgcgtggagttcaagtgcagcgggatgctgttcgaccagcggcaggtggacaggacgctggtgaccattatgccccagggcagctgccggcgcgtggccgtcaacggactccttcgggattacctgacccggcaccccccaccggtgcccgcggaggacccagctgccttctccatgctggcccccctagaccctctgggccacaactatggcgtctacactgtcactgaccagagcccacgcttggccaaggagatcgccattggccgctgctttgatggttcctctgacggcttctccagagagatgaaggctgatgccggcacagccgtcaccttccagtgccgggagccaccggccggacgacccagcctcttccagaggctgctggagtccccggcgacagcacttggtgacatccgcagggagatgagcgaggcggcgcaggcacaggcccgggcctcaggtcccctccgcacccgccggggtagggtccggcagtgacctgggcaggggcctcgctttcccacctccctccagactcctttgaccccaggaagttttgcccctccttcttctccagacagccccctccccaggtgtctgggtcccctttcccgcccctttccagaactcagagtcagacaagaacccagagcatccgatggtagaaacaccaggaagacaattgttgctgtgtggtatggaatggagtttgcggtgactctggggccagcacccaggggacgacgttcaaccctagcctgaagggacccgctcccagctcagaagccgtctctgacttctcgtgcgtattttgaccctgatttcaatcttctacccttgggagttctggcgtttggcacaaagtcccctctgcctgtttggagctcagtgctagaccaggtcccctgccccgagctttgtttttggggttatttattgaaacaaagtgtggggagctggttgtgggtgtgagtgggggtgtggggtccaggctgggcccagtgaaaaggaggaaggggttcccatgcgggggaggctctggggctgaggggaacaattctcacgtgtttggtgcttagagacctgcccggggcgttgggcaggccctccgggggctgaattaaaaatgctttatttccaa

SEQ ID NO: 114484 - DNA, 5695 bp, Homo sapiens
  Payload ID: 2383
  Gene Symbol: CILP
  Gene Name: cartilage intermediate layer protein, nucleotide pyrophosphohydrolase
  Uniprot ID: O75339
  ENST ID: ENST00000261883
  CDS Start-End: 168-3722
actggactgctggagaggcgaaggcttggacccccagctgaggagtcctgctcaagacacggtcactggatctgagaaacttcccaggggaccgcattccagagtcagtgactctgtgaagcacccacatctacctcttgccacgttcccacgggcttgggggaaagatggtggggaccaaggcctgggtgttctccttcctggtcctggaagtcacatctgtgttggggagacagacgatgctcacccagtcagtaagaagagtccagcctgggaagaagaaccccagcatctttgccaagcctgccgacaccctggagagccctggtgagtggacaacatggttcaacatcgactacccaggcgggaagggcgactatgagcggctggacgccattcgcttctactatggggaccgtgtatgtgcccgtcccctgcggctagaggctcggaccactgactggacacctgcgggcagcactggccaggtggtccatggtagtccccgtgagggtttctggtgcctcaacagggagcagcggcctggccagaactgctctaattacaccgtacgcttcctctgcccaccaggatccctgcgccgagacacagagcgcatctggagcccatggtctccctggagcaagtgctcagctgcctgtggtcagactggggtccagactcgcacacgcatttgcttggcagagatggtgtcgctgtgcagtgaggccagcgaagagggtcagcactgcatgggccaggactgtacagcctgtgacctgacctgcccaatgggccaggtgaatgctgactgtgatgcctgcatgtgccaggacttcatgcttcatggggctgtctcccttcccggaggtgccccagcctcaggggctgctatctacctcctgaccaagacgccgaagctgctgacccagacagacagtgatgggagattccgaatccctggcttgtgccctgatggcaaaagcatcctgaagatcacaaaggtcaagtttgcccccattgtactcacaatgcccaagactagcctgaaggcagccaccatcaaggcagagtttgtgagggcagagactccatacatggtgatgaaccctgagacaaaagcacggagagctgggcagagcgtgtctctgtgctgtaaggccacagggaagcccaggccagacaagtatttttggtatcataatgacacattgctggatccttccctctacaagcatgagagcaagctggtgctgaggaaactgcagcagcaccaggctggggagtacttttgcaaggcccagagtgatgctggggctgtgaagtccaaggttgcccagctgattgtcatagcatctgatgagactccttgcaacccagttcctgagagctatcttatccggctgccccatgattgctttcagaatgccaccaactccttctactatgacgtgggacgctgccctgttaagacttgtgcagggcagcaggataatgggatcaggtgccgtgatgctgtgcagaactgctgtggcatctccaagacagaggaaagggagatccagtgcagtggctacacgctacccaccaaggtggccaaggagtgcagctgccagcggtgtacggaaactcggagcatcgtgcggggccgtgtcagtgctgctgacaatggggagcccatgcgctttggccatgtgtacatggggaacagccgtgtaagcatgactggctacaagggcactttcaccctccatgtcccccaggacactgagaggctggtgctcacatttgtggacaggctgcagaagtttgtcaacaccaccaaagtgctacctttcaacaagaaggggagtgccgtgttccatgaaatcaagatgcttcgtcggaaaaagcccatcactttggaagccatggagaccaacatcatccccctgggggaagtggttggtgaagaccccatggctgaactggagattccatccaggagtttctacaggcagaatggggagccctacataggaaaagtgaaggccagtgtgaccttcctggatccccggaatatttccacagccacagctgcccagactgacctgaacttcatcaatgacgaaggagacactttcccccttcggacgtatggcatgttctctgtggacttcagagatgaggtcacctcagagccacttaatgctggcaaagtgaaggtccaccttgactcgacccaggtcaagatgccagagcacatatccacagtgaaactctggtcactcaatccagacacagggctgtgggaggaggaaggtgatttcaaatttgaaaatcaaaggaggaacaaaagagaagacagaaccttcctggtgggcaacctggagattcgtgagaggaggctctttaacctggatgttcctgaaagcaggcggtgctttgttaaggtgagggcctaccggagtgagaggttcttgcctagtgagcagatccagggggttgtgatctccgtgattaacctggagcctagaactggcttcttgtccaaccctagggcctggggccgctttgacagtgtcatcacaggccccaacggggcctgtgtgcctgccttctgtgatgaccagtcccctgatgcctactctgcctatgtcttggcaagcctggctggggaggaactgcaagcagtggagtcttctcctaaattcaacccaaatgcaattggcgtccctcagccctatctcaacaagctcaactaccgtcggacggaccatgaggatccacgggttaaaaagacagctttccagattagcatggccaagccaaggcccaactcagctgaggagagcaatgggcccatctatgcctttgagaacctccgggcatgtgaagaggcaccacccagtgcagcccacttccggttctaccagattgagggggatcgatatgactacaacacagtccccttcaacgaagatgaccctatgagctggactgaagactatctggcatggtggccaaagccgatggaattcagggcctgctatatcaaggtgaagattgtggggccactggaagtgaatgtgcgatcccgcaacatggggggcactcatcggcagacagtggggaagctgtatggaatccgagatgtgaggagcactcgggacagggaccagcccaatgtctcagctgcctgtctggagttcaagtgcagtgggatgctctatgatcaggaccgtgtggaccgcaccctggtgaaggtcatcccccagggcagctgccgtcgagccagtgtgaaccccatgctgcatgagtacctggtcaaccacttgccacttgcagtcaacaacgacaccagtgagtacaccatgctggcacccttggacccactgggccacaactatggcatctacactgtcactgaccaggaccctcgcacggccaaggagatcgcgctcggccggtgctttgatggcacatccgatggctcctccagaatcatgaagagcaatgtgggagtagccctcaccttcaactgtgtagagaggcaagtaggccgccagagtgccttccagtacctccaaagcaccccagcccagtcccctgctgcaggcactgtccaaggaagagtgccctcgaggaggcagcagcgagcgagcaggggtggccagcgccagggtggagtggtggcctctctgagatttcctagagttgctcaacagcccctgatcaactaagttttgtggtacttcaccctcttctgccctcatttcatgtgacagccattgtgagactgatgcacaaactgtcacttggttaatttaagcacttctgttttcgtgaatttgcttgtttgtttcttcatgcctttacttactttgtcccatgctactgattggcacgtggcccccacaatggcacaataaagcccctttgtgaaactgttctttaaatgaaacacaagaaattggccactggtaaaactctgcagcttcaactgtacttcatttaatgccattaatgcaaatatacttcctcttctttttgcatggttttgcccacctctgcaatagtgataatctgatgctgaagatcaaataaccaatataaagcatatttcttggccttgctccacaggacataggcaagccttgatcatagttcatacatataaatggtggtgaaataaagaaataaaacacaatacttttacttgaaatgtaaataacttatttatttctttgctaaatttggaattctagtgcacattcaaagttaagctattaaatatagggtgatcatagttcctctaccaagtctggaaagaacatctcctggtatccacaattacaccaggttgctaactgtatttgtacatttccctttgcattcgcttctgttcttgctagaaacccagtgtagcccagggcagatgtcaataaatgcatactctgtatttcgattctgaggccactgtcctgtcttaactattaaagtgagccagcttctcagaggagtacaggggactctggaaagcagtcacaggtggtgtaagtcctcgccccctaagttacagggcagggcaacataggcacacactccagcagtcaaatttgttctcatggatcacattttccgtttgcagaaaagagcagattcctggagttgtgagcatgttctgggctcctgagcaagactaaaaacacgtcccgatttttttctttccttctttccaatactttggagcttatacaatggcttggcccagggtctgacaagctggccaagtggtcctttggctctcccaacagcctgttgccttctccagctgggctggccggcctcactcagaaatgggcttttacttttttctttatgctcttctaaagatgttcaacttttccagacaccagatctctgttgtgtgttacagaccctgtccctggagcaaaacaattggtccaaacgggcagagttttggttttggaaaaggtatttggtttaaaatagtaaatcagaggcccataggtggtgccagagcgatctcagcggcattacagtcagggtagtggggtgtggggttggataggatgcactcactgcccctatcccaacccctccagaatctgtcaggcaagagtccaaagggtttgggagaagagaggacactgtttacaatcaggacaaaaagctttccctgatgccctggccagcctagtgcagctcctttacccatctctggcctgggctggatttgtactcttggatcaccatctgcccggctcctgggaatttggtttgtaagcaattagaaatttctctagctgagcacatcacaataaccatagaaaaagcaagcatctgcaggagtgaggactagtggtcttgtgattgcaacttgacccacttccagactccacatctgtcccactgctcccaggaagcagctctcactgactgcttggggaggcttgactgcccctgttgtgagtgcacagctatctgcagcaccatcgccccagccacttcaggagccagagtgcctgctgcttcaacctgaccaccagttcacttcaaactcacggggggagggggagggtcgggggggggtgggttgctggggaaggtgggctgactggttccccactctagggcactttccttgctgttctcaattgagggcctgaataaatggactccagcacacagc

SEQ ID NO: 114485 - DNA, 2461 bp, Homo sapiens
  Payload ID: 2384
  Gene Symbol: COMP
  Gene Name: cartilage oligomeric matrix protein
  Uniprot ID: P49747
  ENST ID: ENST00000222271
  CDS Start-End: 46-2319
gtgggcggtagaaagcgagcagccacccagctccccgccaccgccatggtccccgacaccgcctgcgttcttctgctcaccctggctgccctcggcgcgtccggacagggccagagcccgttgggctcagacctgggcccgcagatgcttcgggaactgcaggaaaccaacgcggcgctgcaggacgtgcgggagctgctgcggcagcaggtcagggagatcacgttcctgaaaaacacggtgatggagtgtgacgcgtgcgggatgcagcagtcagtacgcaccggcctacccagcgtgcggcccctgctccactgcgcgcccggcttctgcttccccggcgtggcctgcatccagacggagagcggcgcgcgctgcggcccctgccccgcgggcttcacgggcaacggctcgcactgcaccgacgtcaacgagtgcaacgcccacccctgcttcccccgagtccgctgtatcaacaccagcccggggttccgctgcgaggcttgcccgccggggtacagcggccccacccaccagggcgtggggctggctttcgccaaggccaacaagcaggtttgcacggacatcaacgagtgtgagaccgggcaacataactgcgtccccaactccgtgtgcatcaacacccggggctccttccagtgcggcccgtgccagcccggcttcgtgggcgaccaggcgtccggctgccagcggcgcgcacagcgcttctgccccgacggctcgcccagcgagtgccacgagcatgcagactgcgtcctagagcgcgatggctcgcggtcgtgcgtgtgtgccgttggctgggccggcaacgggatcctctgtggtcgcgacactgacctagacggcttcccggacgagaagctgcgctgcccggagcgccagtgccgtaaggacaactgcgtgactgtgcccaactcagggcaggaggatgtggaccgcgatggcatcggagacgcctgcgatccggatgccgacggggacggggtccccaatgaaaaggacaactgcccgctggtgcggaacccagaccagcgcaacacggacgaggacaagtggggcgatgcgtgcgacaactgccggtcccagaagaacgacgaccaaaaggacacagaccaggacggccggggcgatgcgtgcgacgacgacatcgacggcgaccggatccgcaaccaggccgacaactgccctagggtacccaactcagaccagaaggacagtgatggcgatggtataggggatgcctgtgacaactgtccccagaagagcaacccggatcaggcggatgtggaccacgactttgtgggagatgcttgtgacagcgatcaagaccaggatggagacggacatcaggactctcgggacaactgtcccacggtgcctaacagtgcccaggaggactcagaccacgatggccagggtgatgcctgcgacgacgacgacgacaatgacggagtccctgacagtcgggacaactgccgcctggtgcctaaccccggccaggaggacgcggacagggacggcgtgggcgacgtgtgccaggacgactttgatgcagacaaggtggtagacaagatcgacgtgtgtccggagaacgctgaagtcacgctcaccgacttcagggccttccagacagtcgtgctggacccggagggtgacgcgcagattgaccccaactgggtggtgctcaaccagggaagggagatcgtgcagacaatgaacagcgacccaggcctggctgtgggttacactgccttcaatggcgtggacttcgagggcacgttccatgtgaacacggtcacggatgacgactatgcgggcttcatctttggctaccaggacagctccagcttctacgtggtcatgtggaagcagatggagcaaacgtattggcaggcgaaccccttccgtgctgtggccgagcctggcatccaactcaaggctgtgaagtcttccacaggccccggggaacagctgcggaacgctctgtggcatacaggagacacagagtcccaggtgcggctgctgtggaaggacccgcgaaacgtgggttggaaggacaagaagtcctatcgttggttcctgcagcaccggccccaagtgggctacatcagggtgcgattctatgagggccctgagctggtggccgacagcaacgtggtcttggacacaaccatgcggggtggccgcctgggggtcttctgcttctcccaggagaacatcatctgggccaacctgcgttaccgctgcaatgacaccatcccagaggactatgagacccatcagctgcggcaagcctagggaccagggtgaggacccgccggatgacagccaccctcaccgcggctggatgggggctctgcacccagccccaaggggtggccgtcctgagggggaagtgagaagggctcagagaggacaaaataaagtgtgtgtgcaggga

SEQ ID NO: 114486 - DNA, 2292 bp, Homo sapiens
  Payload ID: 2384
  Gene Symbol: COMP
  Gene Name: cartilage oligomeric matrix protein
  Uniprot ID: P49747
  ENST ID: ENST00000425807
  CDS Start-End: 37-2151
agaaagcgagcagccacccagctccccgccaccgccatggtccccgacaccgcctgcgttcttctgctcaccctggctgccctcggcgcgtccggacagggccagagcccgttgggctcagacctgggcccgcagatgcttcgggaactgcaggaaaccaacgcggcgctgcaggacgtgcgggagctgctgcggcagcaggtcagggagatcacgttcctgaaaaacacggtgatggagtgtgacgcgtgcgggatgcagcagtcagtacgcaccggcctacccagcgtgcggcccctgctccactgcgcgcccggcttctgcttccccggcgtggcctgcatccagacggagagcggcgcgcgctgcggcccctgccccgcgggcttcacgggcaacggctcgcactgcaccgacgtcaacgagtgtgagaccgggcaacataactgcgtccccaactccgtgtgcatcaacacccggggctccttccagtgcggcccgtgccagcccggcttcgtgggcgaccaggcgtccggctgccagcggcgcgcacagcgcttctgccccgacggctcgcccagcgagtgccacgagcatgcagactgcgtcctagagcgcgatggctcgcggtcgtgcgtgtgtgccgttggctgggccggcaacgggatcctctgtggtcgcgacactgacctagacggcttcccggacgagaagctgcgctgcccggagcgccagtgccgtaaggacaactgcgtgactgtgcccaactcagggcaggaggatgtggaccgcgatggcatcggagacgcctgcgatccggatgccgacggggacggggtccccaatgaaaaggacaactgcccgctggtgcggaacccagaccagcgcaacacggacgaggacaagtggggcgatgcgtgcgacaactgccggtcccagaagaacgacgaccaaaaggacacagaccaggacggccggggcgatgcgtgcgacgacgacatcgacggcgaccggatccgcaaccaggccgacaactgccctagggtacccaactcagaccagaaggacagtgatggcgatggtataggggatgcctgtgacaactgtccccagaagagcaacccggatcaggcggatgtggaccacgactttgtgggagatgcttgtgacagcgatcaagaccaggatggagacggacatcaggactctcgggacaactgtcccacggtgcctaacagtgcccaggaggactcagaccacgatggccagggtgatgcctgcgacgacgacgacgacaatgacggagtccctgacagtcgggacaactgccgcctggtgcctaaccccggccaggaggacgcggacagggacggcgtgggcgacgtgtgccaggacgactttgatgcagacaaggtggtagacaagatcgacgtgtgtccggagaacgctgaagtcacgctcaccgacttcagggccttccagacagtcgtgctggacccggagggtgacgcgcagattgaccccaactgggtggtgctcaaccagggaagggagatcgtgcagacaatgaacagcgacccaggcctggctgtgggttacactgccttcaatggcgtggacttcgagggcacgttccatgtgaacacggtcacggatgacgactatgcgggcttcatctttggctaccaggacagctccagcttctacgtggtcatgtggaagcagatggagcaaacgtattggcaggcgaaccccttccgtgctgtggccgagcctggcatccaactcaaggctgtgaagtcttccacaggccccggggaacagctgcggaacgctctgtggcatacaggagacacagagtcccaggtgcggctgctgtggaaggacccgcgaaacgtgggttggaaggacaagaagtcctatcgttggttcctgcagcaccggccccaagtgggctacatcagggtgcgattctatgagggccctgagctggtggccgacagcaacgtggtcttggacacaaccatgcggggtggccgcctgggggtcttctgcttctcccaggagaacatcatctgggccaacctgcgttaccgctgcaatgacaccatcccagaggactatgagacccatcagctgcggcaagcctagggaccagggtgaggacccgccggatgacagccaccctcaccgcggctggatgggggctctgcacccagccccaaggggtggccgtcctgagggggaagtgagaagggctcagagaggacaaaataaagtgtgtgtgcaggg

SEQ ID NO: 114487 - DNA, 2707 bp, Homo sapiens
  Payload ID: 2384
  Gene Symbol: COMP
  Gene Name: cartilage oligomeric matrix protein
  ENST ID: ENST00000542601
  CDS Start-End: 391-2565
agaaagcgagcagccacccagctccccgccaccgccatggtccccgacaccgcctgcgttcttctgctcaccctggctgccctcggcgcgtccggacagggccagagcccgttgggtaagccgcgttagcacccgcgccgtgcccacggccccacaacggactgtaggacccgtgagaggcccgggatccaggctgtttggggctcacggactgttcgtaggggacgtgccgggcgcagaaagcaggtggcgggaccgagactagaggagcgcagtggggcctcggaggtccgggttcgctgcaacggtgggagttggtggtgggattccccggccccatgacgcctcaccaggtcccctgccgccgcaggctcagacctgggcccgcagatgcttcgggaactgcaggaaaccaacgcggcgctgcaggacgtgcgggagctgctgcggcagcaggtcagggagatcacgttcctgaaaaacacggtgatggagtgtgacgcgtgcgggatgcagcagtcagtacgcaccggcctacccagcgtgcggcccctgctccactgcgcgcccggcttctgcttccccggcgtggcctgcatccagacggagagcggcgcgcgctgcggcccctgccccgcgggcttcacgggcaacggctcgcactgcaccgacgtcaacgagtgcaacgcccacccctgcttcccccgagtccgctgtatcaacaccagcccggggttccgctgcgaggcttgcccgccggggtacagcggccccacccaccagggcgtggggctggctttcgccaaggccaacaagcaggtttgcacggacatcaacgagtgtgagaccgggcaacataactgcgtccccaactccgtgtgcatcaacacccggggctccttccagtgcggcccgtgccagcccggcttcgtgggcgaccaggcgtccggctgccagcggcgcgcacagcgcttctgccccgacggctcgcccagcgagtgccacgagcatgcagactgcgtcctagagcgcgatggctcgcggtcgtgcgtgtgtgccgttggctgggccggcaacgggatcctctgtggtcgcgacactgacctagacggcttcccggacgagaagctgcgctgcccggagcgccagtgccgtaaggacaactgcgtgactgtgcccaactcagggcaggaggatgtggaccgcgatggcatcggagacgcctgcgatccggatgccgacggggacggggtccccaatgaaaaggacaactgcccgctggtgcggaacccagaccagcgcaacacggacgaggacaagtggggcgatgcgtgcgacaactgccggtcccagaagaacgacgaccaaaaggacacagaccaggacggccggggcgatgcgtgcgacgacgacatcgacggcgaccggatccgcaaccaggccgacaactgccctagggtacccaactcagaccagaaggacagtgatggcgatggtataggggatgcctgtgacaactgtccccagaagagcaacccggatcaggcggatgtggaccacgactttgtgggagatgcttgtgacagcgatcaagaccaggatggagacggacatcaggactctcgggacaactgtcccacggtgcctaacagtgcccaggaggactcagaccacgatggccagggtgatgcctgcgacgacgacgacgacaatgacggagtccctgacagtcgggacaactgccgcctggtgcctaaccccggccaggaggacgcggacagggacggcgtgggcgacgtgtgccaggacgactttgatgcagacaaggtggtagacaagatcgacgtgtgtccggagaacgctgaagtcacgctcaccgacttcagggccttccagacagtcgtgctggacccggagggtgacgcgcagattgaccccaactgggtggtgctcaaccagggaagggagatcgtgcagacaatgaacagcgacccaggcctggctgtgggttacactgccttcaatggcgtggacttcgagggcacgttccatgtgaacacggtcacggatgacgactatgcgggcttcatctttggctaccaggacagctccagcttctacgtggtcatgtggaagcagatggagcaaacgtattggcaggcgaaccccttccgtgctgtggccgagcctggcatccaactcaaggctgtgaagtcttccacaggccccggggaacagctgcggaacgctctgtggcatacaggagacacagagtcccaggtgcggctgctgtggaaggacccgcgaaacgtgggttggaaggacaagaagtcctatcgttggttcctgcagcaccggccccaagtgggctacatcagggtgcgattctatgagggccctgagctggtggccgacagcaacgtggtcttggacacaaccatgcggggtggccgcctgggggtcttctgcttctcccaggagaacatcatctgggccaacctgcgttaccgctgcaatgacaccatcccagaggactatgagacccatcagctgcggcaagcctagggaccagggtgaggacccgccggatgacagccaccctcaccgcggctggatgggggctctgcacccagccccaaggggtggccgtcctgagggggaagtgagaagggctcagagaggacaaaataaagtgtgtgtgcaggga

SEQ ID NO: 114488 - DNA, 2619 bp, Homo sapiens
  Payload ID: 2385
  Gene Symbol: CASS4
  Gene Name: Cas scaffolding protein family member 4
  Uniprot ID: Q9NQ75
  ENST ID: ENST00000360314
  CDS Start-End: 226-2586
gaagagtggtgtttttttcttcttcttcttcttttgtggtttcacatagcaaatgagtgacagtctctacttacagacaaagtgagacgtcaggcattgagacatagctccatagaattcagtttctgagaaccagccagaagcatgcagtgacattgcacaatctgcctctgaagctggagatactagctgcagagctcaggggagctgctccacatcaccgacatgaagggaacaggcatcatggactgtgcgcccaaggcactcctggccagggcactttatgacaactgccctgactgctctgacgagctggctttcagcagaggggacatcctgaccattctggagcaacacgtgccagaaagcgagggttggtggaagtgtttgctccatgggaggcaaggcctggcccctgccaaccgcctccaaatcctcacggaggtcgctgcagacaggccgtgccccccattcctgagaggcctggaagaagctcctgccagctcagaggagacctatcaggtgcccactctaccccgccctcccactccaggccccgtttatgagcagatgaggagttgggcggaggggccccagccccctactgcccaagtctatgaattccccgaccctcccaccagtgccagaatcatctgtgaaaagactctcagctttccaaaacaggccatcctcacgcttcccagacctgtccgggcctcactgccgactctgccttcccaggtgtatgacgtgcctacccagcaccggggccccgtggtcctgaaggagccagagaagcagcagttatatgacataccagccagccccaagaaggcaggactccatcccccagacagccaagcaagtgggcagggtgttcccctgatatcagtgactaccttaagaagaggcggttacagcacattaccaaatcctcagaaatcggaatggatttatgacactccagtgtctccaggaaaggccagcgtcagaaacacgcctctcaccagctttgcggaagaatcaaggccccacgctctccccagttccagctccactttctacaatcctccaagtggcagatccaggtccctcactccacaactgaataacaatgtgcccatgcagaaaaaactcagccttccagaaattccttcttatggctttcttgtacccagaggcacatttcctttggatgaagatgtcagctacaaggttccttcaagctttctgattccccgagtggaacagcagaacaccaagcccaatatttatgacatccctaaagcaacgtcgagtgtttctcaggctgggaaggagctggagaaagccaaggaggtgtcagagaattccgcgggccataattcctcatggttctccagacggacaacttccccatctcctgaaccggacagattatcaggttccagttctgacagcagagctagcatcgtttcctcgtgctccaccacatccaccgacgactcctccagctcttcctcggaggagtcagcaaaggagctctccttggacctggatgtggccaaggagacagtgatggctctgcagcacaaggtggtcagctctgtcgctggcctgatgctctttgtcagcaggaagtggagattccgagactatctggaggccaacattgatgcaatccacaggtccactgatcacatagaagaatctgtaagagaatttctggattttgcccgaggagtccatgggactgcctgtaacctcactgacagtaaccttcagaacagaattcgggaccagatgcagaccatctccaactcctaccgcatcctgcttgaaacaaaggaaagcttggataatcgcaattggcctctggaagttcttgtgactgacagtgtccagaacagcccagatgaccttgagaggtttgtcatggtggcacggatgcttccagaagacatcaagaggtttgcctccattgtcattgccaatggaaggctcctttttaagcggaactgtgaaaaggaagagactgtgcagttgaccccaaatgcagaatttaagtgtgaaaaatacatccagcctccccaaagagaaactgaatcacaccaaaagagtaccccttccactaagcaaagggaagatgaacactcttctgaactattaaagaaaaatagggcaaatatctgtggacagaatcctggccctcttatacctcagccttcgagtcaacagactcctgagaggaaaccccgcttatctgaacactgccggctctactttggggcgctcttcaaagccatcagcgcatttcacggcagcctcagcagcagccagcccgcggagatcatcactcagagcaagctggtcatcatggtgggacagaagctggtggacacgctgtgcatggagacccaggagagggacgtgcgcaacgagatcctccgtggcagcagtcacctctgcagcctgctcaaggacgtagcgctggccactaagaatgccgtgctcacgtaccccagccctgccgcgctggggcacctccaggcggaggctgagaagctggagcaacacacgcggcagttcagagggacactgggatgaggactgtctacctcccttcctcctctgctcacc

SEQ ID NO: 114489 - DNA, 2888 bp, Homo sapiens
  Payload ID: 2385
  Gene Symbol: CASS4
  Gene Name: Cas scaffolding protein family member 4
  Uniprot ID: Q9NQ75
  ENST ID: ENST00000434344
  CDS Start-End: 199-1248
attttactcttatcgtgctttccagaaagtttgcctgctgggagagtctttttgatcgtttcccatgtgttgtcagatagctccatagaattcagtttctgagaaccagccagaagcatgcagtgacattgcacaatctgcctctgaagctggagatactagctgcagagctcaggggagctgctccacatcaccgacatgaagggaacaggcatcatggactgtgcgcccaaggcactcctggccagggcactttatgacaactgccctgactgctctgacgagctggctttcagcagaggggacatcctgaccattctggagcaacacgtgccagaaagcgagggttggtggaagtgtttgctccatgggaggcaaggcctggcccctgccaaccgcctccaaatcctcacggaggtcgctgcagacaggccgtgccccccattcctgagaggcctggaagaagctcctgccagctcagaggagacctatcaggtgcccactctaccccgccctcccactccaggccccgtttatgagcagatgaggagttgggcggaggggccccagccccctactgcccaagtctatgaattccccgaccctcccaccagtgccagaatcatctgtgaaaagactctcagctttccaaaacaggccatcctcacgcttcccagacctgtccgggcctcactgccgactctgccttcccaggtgtatgacgtgcctacccagcaccggggccccgtggtcctgaaggagccagagaagcagcagttatatgacataccagccagccccaagaaggcaggactccatcccccagacagccaagcaagtaatcctggccctcttatacctcagccttcgagtcaacagactcctgagaggaaaccccgcttatctgaacactgccggctctactttggggcgctcttcaaagccatcagcgcatttcacggcagcctcagcagcagccagcccgcggagatcatcactcagagcaagctggtcatcatggtgggacagaagctggtggacacgctgtgcatggagacccaggagagggacgtgcgcaacgagatcctccgtggcagcagtcacctctgcagcctgctcaaggacgtagcgctggccactaagaatgccgtgctcacgtaccccagccctgccgcgctggggcacctccaggcggaggctgagaagctggagcaacacacgcggcagttcagagggacactgggatgaggactgtctacctcccttcctcctctgctcacctctcagcttcacacccacaacttgtgcaactctgccctatgggaaaagccagccggggcatacaccaatgagctgaaacagacctggtgcccaaagctggtagtaccaagtggctaagcaaccccagggcattgacttaccccgcagggggtcaggaaagagagtcaggtatgaggtaaagaccttgtgaagtttagcatatatggagtatgcagtatcagcttgaagtgacttcgcagaaataatattttatattgattaaatgtgtgcatgttttgtttgttttttgagacaaagtctcactctgtcacacaggctggagtgcagtggcgcgatctcagctcactgcaacctccgccttctgggttgaagcaattctcccgcctcagcctccagagtagctggtactacaggtgtgcgccaccatgcccagctaatttttgtatttttttttaatgaaaggtctcacatatttattactgaacccagccaaccaatgcattcataacagattcagaaagaaaaaatatattcccaataaaacatgtacaattctccagagagcggtgacattttcagcttgatgtggtaacatgactgtgaccttcagacagcataaatatgtgtgccctctcatgtgcaattccttatagggctagcttggttcttcttcaatgtctccttttggagttgtacctgattttattaccagttttcatctgaatccactggggagtggggcgattttgttttaatttctcggtcaggaatcacttaatcctggaagtcttatgagaagacatggcaagaagcagagtcaagcacacaccacaatggcagagaaaggaagagctaatttttgtatttttagtagagtcggggtttcaccatattagccaggctggtctggaactcctgacctcaggccatcccccgcctcggcctcccaaagtgctgggattacaggcctgagccaccattcctggcatgtacgtgttttaaattcactcatttaacacttatgtattggatgcctactacatgccaagttctaggtgctggagacatagcagtgtttcagagggcttgccctcttggaacttatgatctagtaggggagtcaggcagtaaagcggtgaagaaatacatacacagtatagcaggtgccaggaaaaacgtaagtaggggaagtgcaagagaacttatcttcaaatggttaatttttattgcatccattagataatagagtaagttttttgttgttttgaattgaattagttctgtgagattggtacaaattatgtatgtgtcttgcacccataaatatatatttttgctatgttactttaacctaaagatagatgttatatttacaacataacatgatctgttgggttctctattaatttatttcatacattatagattctgggttgataaattctgctcaatttgaaaaattttatattttgtctcaaatctgttacaatttatattggttggtgcaaaagtaattgcggtttttgccgtagacagtaatggcaaaaaccacaattgcttttgcaccaccctaataatattaaatataatcatgactttaaacatca

SEQ ID NO: 114490 - DNA, 3942 bp, Homo sapiens
  Payload ID: 2386
  Gene Symbol: CASD1
  Gene Name: CAS1 domain containing 1
  Uniprot ID: Q96PB1
  ENST ID: ENST00000297273
  CDS Start-End: 288-2681
aggaaggggaggagacaggcgtccagggcgcctggggaaccggcacggcggagcagcggcggcggggctggggggaggccgccgagtcggccgcggccgaggaggggcaggcggaggtcgggggcgccgcggccgcggggtcaggttccccggcgggaggcgcaggtggcggcctggggagctggcggccgctcctcgcctggctgcagcggcggcagccccagtgctgcccctgtgcggcgcccctttcccgctccgccgcgcactgttgtcatggaggaaccaagatggcggctctggcctacaacctgggcaagcgggagatcaaccactacttcagcgtgaggagcgccaaggtgctggcgctggtggccgtgctgctgctcgcagcgtgccacctcgcctcccgccgctaccgaggcaatgattcgtgtgaataccttctctcaagtggcagatttcttggagagaaagtttggcaacctcacagttgtatgatgcataaatacaaaatcagtgaagcaaagaactgccttgtagataaacatattgcatttattggagattccagaattcgtcaattgttttattcttttgtaaaaataattaatccccaattcaaagaagaaggaaataagcatgaaaacattccttttgaagacaagactgcatcagttaaagtggattttctgtggcatcctgaagttaatggttctatgaaacagtgtatcaaagtgtggactgaggattccattgcaaagccacatgtgattgtagcaggagctgccacatggtccatcaagattcacaatggtagcagtgaagcgctttctcaatataaaatgaacatcacctccatagcaccacttttagaaaaattggcaaagactagtgatgtttattgggtcttacaagatcctgtttatgaagatctattaagtgaaaataggaagatgatcactaatgagaagatagatgcttacaatgaagctgcagtcagtattttgaatagtagcaccagaaattctaaatcaaatgttaagatgttcagtgtttccaaattaattgctcaagaaaccatcatggaatctttggatggcttacatcttcctgaatcgagcagagaaactactgcaatgattcttatgaatgtgtattgcaataagattttgaagcctgtagatgggtcctgttgtcaacctcggcctcctgttactctcatacagaagctagctgcttgttttttcactttatctattatcggatatttaattttttacataattcatcgtaatgctcatcggaagaataagccgtgtactgatttggaaagtggagaggaaaagaaaaatattatcaatacccctgtgtcttcattagaaatacttttacaatctttctgcaaacttggcctgattatggcatatttctatatgtgtgaccgtgcaaatctgttcatgaaggaaaacaaattttatacacattcatctttctttattccaattatctacattttggttttgggagtattttataatgaaaatactaaagagactaaagtattaaatagagaacaaacagacgaatggaaaggctggatgcaacttgtgattttgatttatcacatttctggagcaagtacatttttgcctgtatacatgcacattcgagttctggttgctgcatatttatttcagacagggtatgggcatttctcatacttttggataaaaggagattttggaatctatagagtatgtcaggttttatttcgtctcaatttcctggtagtggtgttatgtatagtaatggatcgaccttatcaattctattactttgtccccttggtcactgtatggttcatggtcatatatgttactttagcactatggccacaaataatccaaaaaaaagcaaacggaaattgtttctggcattttggcttactgttgaaactaggctttttgctgttattcatatgttttttggcatattctcagggtgcatttgagaagatcttttctctttggccattgtccaagtgttttgaactgaaagggaatgtatatgaatggtggttcagatggaggttagaccgttatgtagttttccacggaatgctgtttgcttttatttatctggctttgcagaagcgtcaaatactttctgaaggaaagggtgaacctcttttttcaaacaaaatttcaaattttctgttgtttatttcagtagtttctttcttgacctattccatctgggctagcagttgtaaaaacaaagcagagtgcaatgaactccatccgtctgtttctgtggtacagattttagccttcatcctaataagaaacatccctggatatgcccgttcagtttacagttcattttttgcttggtttggaaaaatttcattagagctatttatttgccagtatcacatatggctggcagcggacacaaggggtatcttggtactgatacctggaaaccctatgctcaacatcattgtcagcactttcatatttgtttgtgtggcacatgaaatttctcagatcactaatgatcttgcacagattattattcctaaagataactcatctctcttgaaaaggttggcatgtatagctgcatttttttgtggactcctcatcttatcatccattcaagataaatcaaaacattaggttccaaaaattctaaaaaacctaaactcttcaggctacctttgtgtgtctctagaagagaaaagcatctatctggagatataaatgtgtatgtaaatataaacgtttgtggcaagaggacagttctgtgacatctgttgaacatatgtggttgtatatattggaaatgtacatatccaatatgaaatactaaaacaaacaaacaaacaaaaaaccagaatgcattgtataggattgcatgtgaagtcttttctactgaatctatatttccatttgtaagtgattttaagttaacatatgaaggcagggaaatgattacctttccagtaaaaagtatagataatttaattaacttagtgacaccaccaagtgttttgatataactaaatttgtggtaataagactgtctgcacctgtattcattgtggaacttcctctttcattggaaactttcttactcaagaatgacggcagtattgttttcttatatgtgcaatgaagtggaatgataaacagtatgcctttaatttatatgtgttcttgttctgatgttgtttcctgaaatgatttttcttcctaactgtggttttcgggtatgcaagcctaaatctttgtacactttgtctcacagaatagttctgaggctccatgacagggttttgtcattgttgatgttattgttgcttcgttttataaaaaagccaaaattttttttccaatccaaacgttcacctgtttcctttcctcaagctataccagtgtaataccagttaccctgtggatccatttaatatgttatccccactaattaattttcgtatattatttccaatatttggaaagctctttatagccatttggtatttcctattacccacctcctattttaaatatttatcagtctaaacttgtgcagtgtagtaaacatgcaagttgttacgattgagctgtattaccataagtagaattttaagtaaactggtgaatttgggcaataaatgtttttgctttttgtttgatttttttttacaagctaactgttagaggtatacatttatttatctgttgtacagatttgattatgattttaatgtttgaaagattgcacttgtttgcttttactatatgtggggtaaaatatattttctgttcacagtatatgaaaatatggagtaatttaaacagtaaataaacattctgtggatgcttatttttgtattggcaaagtatcaattaaactatatgtgttctttttcaaaaa

SEQ ID NO: 114491 - DNA, 641 bp, Homo sapiens
  Payload ID: 2386
  Gene Symbol: CASD1
  Gene Name: CAS1 domain containing 1
  ENST ID: ENST00000443644
  CDS Start-End: 18-155
gtcatggaggaaccaagatggcggctctggcctacaacctgggcaagcgggagatcaaccactacttcagcgtgaggagcgccaaggtgctggcgctggtggccgtgctgctgctcgcagcgtgccacctcgcctcccgccgctaccgagcatgaaaacattccttttgaagacaagactgcatcagttaaagtggattttctgtggcatcctgaagttaatggttctatgaaacagtgtatcaaagtgtggactgaggattccattgcaaagccacatgtgattgtagcaggagctgccacatggtccatcaagattcacaatggtagcagtgaagcgctttctcaatataaaatgaacatcacctccatagcaccacttttagaaaaattggcaaagactagtgatgtttattgggtcttacaagatcctgtttatgaagatctattaagtgaaaataggaagatgatcactaatgagaagatagatgcttacaatgaagctgcagtcagtattttgaatagtagcaccagaaattctaaatcaaatgttaagatgttcagtgtttccaaattaattgctcaagaaaccatcatggaatctttggatggcttacatcttcctgaatcgagcagagaaac

SEQ ID NO: 114492 - DNA, 532 bp, Homo sapiens
  Payload ID: 2386
  Gene Symbol: CASD1
  Gene Name: CAS1 domain containing 1
  ENST ID: ENST00000447923
  CDS Start-End: 156-532
aactttggtgtactttcgcccaccagaactgggcaaactgaggacattaaaaaaacggtttaagagaaactggccagagcggcaatgattcgtgtgaataccttctctcaagtggcagatttcttggagagaaagtttggcaacctcacagttgtatgatgcataaatacaaaatcagtgaagcaaagaactgccttgtagataaacatattgcatttattggagattccagaattcgtcaattgttttattcttttgtaaaaataattaatccccaattcaaagaagaaggaaataagcatgaaaacattccttttgaagacaagactgcatcagttaaagtggattttctgtggcatcctgaagttaatggttctatgaaacagtgtatcaaagtgtggactgaggattccattgcaaagccacatgtgattgtagcaggagctgccacatggtccatcaagattcacaatggtagcagtgaagcgctttctcaatataaaatgaacatcacctccatagcaccactttt

SEQ ID NO: 114493 - DNA, 352 bp, Homo sapiens
  Payload ID: 2386
  Gene Symbol: CASD1
  Gene Name: CAS1 domain containing 1
  ENST ID: ENST00000417387
  CDS Start-End: 15-326
atggaggaaccaagatggcggctctggcctacaacctgggcaagcgggagatcaaccactacttcagcgtgaggagcgccaaggtgctggcgctggtggccgtgctgctgctcgcagcgtgccacctcgcctcccgccgctaccgaggcaatgattcgtgtgaataccttctctcaagtggcagatttcttggagagaaagtttggcaacctcacagttgtatgatgcataaatacaaaatcagcatgaaaacattccttttgaagacaagactgcatcagttaaagtggattttctgtggcatcctgaagttaatggttctatgaaacagtgtatcaaagtgtggactgag

SEQ ID NO: 114494 - DNA, 985 bp, Homo sapiens
  Payload ID: 2387
  Gene Symbol: CSN1S1
  Gene Name: casein alpha s1
  Uniprot ID: P47710
  ENST ID: ENST00000246891
  CDS Start-End: 50-607
tcaacacaacttgcttctctccagacttgggcttaaggctctgataaccatgaggcttctcattctcacctgtcttgtggctgttgctcttgccaggcctaaacttcctcttagatacccagaacgccttcagaatccatcagagagcagtgagcctataccattagaatcaagagaggaatacatgaatggtatgaacaggcagagaaacattctgagagaaaaacagactgatgaaatcaaggatactaggaatgagtctactcagaactgtgttgtggcagagcctgagaagatggaatccagcatcagttcatcgagtgaggaaatgtctctcagtaagtgtgcggaacagttttgtagactgaacgaatacaaccaacttcagctgcaagctgcccatgcccaggagcaaattcgcagaatgaatgaaaacagccatgtccaagtgcctttccagcagctcaaccaacttgctgcctacccctatgctgtttggtactatccacaaatcatgcagtatgttcctttcccaccgttttccgacatctccaatcccactgctcatgaaaattatgaaaaaaataacgtcatgctacagtggtgatatgattgaaaatttcattctctgaatttctcctctcaaggaaaaccatcttatctgaagactggactgttgttttagaatagtaaaatcccatattgaaggaaattgttctttttgagttatctacttaatagcatatcattctttttcttaagctaaattttcctagagagtttattgtctaaatttcagttgtgtcttgccatatggagggcacctaatcagagggtattaaagtgtttactaagttttctagtggacattttgtttaaaaagtctttgaattgccagttctgtaagtgccatcaattaaaatagttttgtgcagtgacagagattttcttttttcttttcaataaattacactttaaggcaaaa

SEQ ID NO: 114495 - DNA, 596 bp, Homo sapiens
  Payload ID: 2387
  Gene Symbol: CSN1S1
  Gene Name: casein alpha s1
  ENST ID: ENST00000510936
  CDS Start-End: 1-231
aagatggaatccagcatcagttcatcgagtgaggagcaaattcgcagaatgaatgaaaacagccatgtccaagtgcctttccagcagctcaaccaacttgctgcctacccctatgctgtttggtactatccacaaatcatgcagtatgttcctttcccaccgttttccgacatctccaatcccactgctcatgaaaattatgaaaaaaataacgtcatgctacagtggtgatatgattgaaaatttcattctctgaatttctcctctcaaggaaaaccatcttatctgaagactggactgttgttttagaatagtaaaatcccatattgaaggaaattgttctttttgagttatctacttaatagcatatcattctttttcttaagctaaattttcctagagagtttattgtctaaatttcagttgtgtcttgccatatggagggcacctaatcagagggtattaaagtgtttactaagttttctagtggacattttgtttaaaaagtctttgaattgccagttctgtaagtgccatcaattaaaatagttttgtgcagtgacagagattttcttttttcttttcaataaattaca

SEQ ID NO: 114496 - DNA, 597 bp, Homo sapiens
  Payload ID: 2387
  Gene Symbol: CSN1S1
  Gene Name: casein alpha s1
  Uniprot ID: P47710
  ENST ID: ENST00000507763
  CDS Start-End: 12-542
ctctgataaccatgaggcttctcattctcacctgtcttgtggctgttgctcttgccaggcctaaacttcctcttagatacccagaacgccttcagaatccatcagagagcagtgagcctataccattagaatcaagagaggaatacatgaatggtatgaacaggagaaacattctgagagaaaaacagactgatgaaatcaaggatactaggaatgagtctactcagaactgtgttgtggcagagcctgagaagatggaatccagcatcagttcatcgagtgaggaacagttttgtagactgaacgaatacaaccaacttcagctgcaagctgcccatgcccaggagcaaattcgcagaatgaatgaaaacagccatgtccaagtgcctttccagcagctcaaccaacttgctgcctacccctatgctgtttggtactatccacaaatcatgcagtatgttcctttcccaccgttttccgacatctccaatcccactgctcatgaaaattatgaaaaaaataacgtcatgctacagtggtgatatgattgaaaatttcattctctgaatttctcctctcaaggaaaaccatcttatc

SEQ ID NO: 114497 - DNA, 871 bp, Homo sapiens
  Payload ID: 2387
  Gene Symbol: CSN1S1
  Gene Name: casein alpha s1
  ENST ID: ENST00000505782
  CDS Start-End: 1-510
atgaggcttctcattctcacctgtcttgtggctgttgctcttgccaggcctaaacttcctcttagatacccagaacgccttcagaatccatcagagagcagtgagcctataccattagaatcaagagaggaatacatgaatggtatgaacaggcagagaaacattctgagagaaaaacagactgatgaaatcaagaactgtgttgtggcagagcctgagaagatggaatccagcatcagttcatcgagtgaggaacagttttgtagactgaacgaatacaaccaacttcagctgcaagctgcccatgcccaggagcaaattcgcagaatgaatgaaaacagccatgtccaagtgcctttccagcagctcaaccaacttgctgcctacccctatgctgtttggtactatccacaaatcatgcagtatgttcctttcccaccgttttccgacatctccaatcccactgctcatgaaaattatgaaaaaaataacgtcatgctacagtggtgatatgattgaaaatttcattctctgaatttctcctctcaaggaaaaccatcttatctgaagactggactgttgttttagaatagtaaaatcccatattgaaggaaattgttctttttgagttatctacttaatagcatatcattctttttcttaagctaaattttcctagagagtttattgtctaaatttcagttgtgtcttgccatatggagggcacctaatcagagggtattaaagtgtttactaagttttctagtggacattttgtttaaaaagtctttgaattgccagttctgtaagtgccatcaattaaaatagttttgtgcagtgacagagattttcttttttcttttcaataaat

SEQ ID NO: 114498 - DNA, 895 bp, Homo sapiens
  Payload ID: 2387
  Gene Symbol: CSN1S1
  Gene Name: casein alpha s1
  ENST ID: ENST00000507772
  CDS Start-End: 1-534
atgaggcttctcattctcacctgtcttgtggctgttgctcttgccaggcctaaacttcctcttagatacccagaacgccttcagaatccatcagagagcagtgagcctataccattagaatcaagagaggaatacatgaatggtatgaacaggcagagaaacattctgagagaaaaacagactgatgaaatcaaggatactaggaatgagtctactcagaactgtgttgtggcagagcctgagaagatggaatccagcatcagttcatcgagtgaggaacagttttgtagactgaacgaatacaaccaacttcagctgcaagctgcccatgcccaggagcaaattcgcagaatgaatgaaaacagccatgtccaagtgcctttccagcagctcaaccaacttgctgcctacccctatgctgtttggtactatccacaaatcatgcagtatgttcctttcccaccgttttccgacatctccaatcccactgctcatgaaaattatgaaaaaaataacgtcatgctacagtggtgatatgattgaaaatttcattctctgaatttctcctctcaaggaaaaccatcttatctgaagactggactgttgttttagaatagtaaaatcccatattgaaggaaattgttctttttgagttatctacttaatagcatatcattctttttcttaagctaaattttcctagagagtttattgtctaaatttcagttgtgtcttgccatatggagggcacctaatcagagggtattaaagtgtttactaagttttctagtggacattttgtttaaaaagtctttgaattgccagttctgtaagtgccatcaattaaaatagttttgtgcagtgacagagattttcttttttcttttcaataaat

SEQ ID NO: 114499 - DNA, 165 bp, Homo sapiens
  Payload ID: 2387
  Gene Symbol: CSN1S1
  Gene Name: casein alpha s1
  ENST ID: ENST00000633258
  CDS Start-End: 1-165
cagagaaacattctgagagaaaaacagactgatgaaatcaagaactgtgttgtggcagagcctgagaagatggaatccagcatcagttcatcgagtgaggaaatgtctctcagtaagtgtgcggaacagttttgtagactgaacgaatacaaccaacttcagctg

SEQ ID NO: 114500 - DNA, 1066 bp, Homo sapiens
  Payload ID: 2388
  Gene Symbol: CSN2
  Gene Name: casein beta
  Uniprot ID: P05814
  ENST ID: ENST00000353151
  CDS Start-End: 13-693
gacttagtagccatgaaggtcctcatcctcgcctgcctggtggctcttgctcttgcaagggagaccatagaaagcctttcaagcagtgaggaatctattacagaatacaagcagaaagttgagaaggttaaacatgaggaccagcagcaaggagaggatgaacaccaggataaaatctacccctctttccagccacagcctctgatctatccattcgttgaacctatcccctatggttttcttccacaaaacattctgcctcttgctcagcctgctgtggtgctgcctgtccctcagcctgaaataatggaagtccctaaagctaaagacactgtctacactaagggcagagtgatgcctgtccttaaatctccaacgatacccttttttgaccctcaaatcccaaaactcactgatcttgaaaatctgcatcttcctctgcctctgctccagcccttgatgcagcaggtccctcagcctattcctcagactcttgcacttccccctcagcccctgtggtctgttcctcagcccaaagtcctgcctatcccccagcaagtggtgccctaccctcagagagctgtgcctgttcaagcccttctgctcaaccaagaacttctacttaaccccacccaccagatctaccctgtgactcagccacttgccccagttcataaccccattagtgtctaagaagatttcaaagttaattttccctccttatttttgaattgactgagactggaaatatgatgccttttccgtctttgtatcacgttaccccaaattaagtatgtttgaatgagtttatatggaaaaaatgaactttgtccctttatttattttatatattatgtcattcatttaatttgaaatttgactcatgaactatttacattttccaaatcttaattcaactagtaccacagaagttcaatactcatttggaaatgctacaaacatatcaaacatatgtatacaaattgtttctggaattgtgcttatttttatttctttaagaatctatttcctttccagtcatttcaataaattattcttaagcata

SEQ ID NO: 114501 - DNA, 1066 bp, Homo sapiens; identical to SEQ ID NO: 114500
  Payload ID: 2388
  Gene Symbol: CSN2
  Gene Name: casein beta
  ENST ID: ENST00000635174
  CDS Start-End: 13-693

SEQ ID NO: 114502 - DNA, 836 bp, Homo sapiens
  Payload ID: 2389
  Gene Symbol: CSN3
  Gene Name: casein kappa
  Uniprot ID: P07498
  ENST ID: ENST00000304954
  CDS Start-End: 87-635
atttttcttgggtcttctctacagctgacaggccaactcaacctactgccaaccaagacctgactggcacgaggaaaggtgcaataatgaagagttttcttctagttgtcaatgccctggcattaaccctgccttttttggctgtggaggttcaaaaccagaaacaaccagcatgccatgagaatgatgaaagaccattctatcagaaaacagctccatatgtcccaatgtattatgtgccaaatagctatccttattatggaaccaatttgtaccaacgtagaccagctatagcaattaataatccatatgtgcctcgcacatattatgcaaacccagctgtagttaggccacatgcccaaattcctcagcggcaatacctgccaaatagccacccacccactgtggtacgtcgcccaaacctgcatccatcatttattgccatccccccaaagaaaattcaggataaaataatcatccctaccatcaataccattgctactgttgaacctacaccagctcctgccactgaaccaacggtggacagtgtagtcactccagaagctttttcagagtccatcatcacgagcacccctgagacaaccacagttgcagttactccacctacggcataaaaacaccaaggaaatatcaaagaacacaacgcaggacttgctgaaaccaaattactacttcacactctccttcagccatttgtctgccttcagtcaacagaaaatgtgattttcacagattcagctcttctctccttacattttacattcatgccacattcaatattttgattcttgcacaataaagccaactgattgcaa

SEQ ID NO: 114503 - DNA, 6067 bp, Homo sapiens
  Payload ID: 2390
  Gene Symbol: CSNK1A1
  Gene Name: casein kinase 1, alpha 1
  Uniprot ID: P48729
  ENST ID: ENST00000261798
  CDS Start-End: 434-1411
gggggcattttgtgttggctggagctggagtaacaagatggcgtcgtccgcggagtgacaggggtccctctgggccggagccggcggcagtggtggcagcggtatcgccgccctagctcaccgcgccccttttccagcccgcgacgtcgccgcgcaagcgaggcagcggcggccgccgagaaacaagtggcccagcctggtaaccgccgagaagcccttcacaaactgcggcctggcaaaaagaaacctgactgagcggcggtgatcaggttcccctctgctgattctgggccccgaaccccggtaaaggcctccgtgttccgtttcctgccgccctcctccgtagccttgcctagtgtaggagccccgaggcctccgtcctcttcccagaggtgtcggggcttggccccagcctccatcttcgtctctcaggatggcgagtagcagcggctccaaggctgaattcattgtcggagggaaatataaactggtacggaagatcgggtctggctccttcggggacatctatttggcgatcaacatcaccaacggcgaggaagtggcagtgaagctagaatctcagaaggccaggcatccccagttgctgtacgagagcaagctctataagattcttcaaggtggggttggcatcccccacatacggtggtatggtcaggaaaaagactacaatgtactagtcatggatcttctgggacctagcctcgaagacctcttcaatttctgttcaagaaggttcacaatgaaaactgtacttatgttagctgaccagatgatcagtagaattgaatatgtgcatacaaagaattttatacacagagacattaaaccagataacttcctaatgggtattgggcgtcactgtaataagttattccttattgattttggtttggccaaaaagtacagagacaacaggacaaggcaacacataccatacagagaagataaaaacctcactggcactgcccgatatgctagcatcaatgcacatcttggtattgagcagagtcgccgagatgacatggaatcattaggatatgttttgatgtattttaatagaaccagcctgccatggcaagggctaaaggctgcaacaaagaaacaaaaatatgaaaagattagtgaaaagaagatgtccacgcctgttgaagttttatgtaaggggtttcctgcagaatttgcgatgtacttaaactattgtcgtgggctacgctttgaggaagccccagattacatgtatctgaggcagctattccgcattcttttcaggaccctgaaccatcaatatgactacacatttgattggacaatgttaaagcagaaagcagcacagcaggcagcctcttccagtgggcagggtcagcaggcccaaacccccacaggtttctaagcatgaattgaggaacagaagaagcagagcagatgatcggagcagcatttgtttctccccaaatctagaaattttagttcatatgtacactagccagtggttgtggacaaccatttacttggtgtaaagaacttaatttcagtataaactgactctgggcagcattggtgatgctgtatcctgagttgtagcctctgtaattgtgaatattaactgagatagtgaaacatggtgtccggttttctattgcattttttcaagtggaaaagttaactaaatggttgacacacaaaaattggtggagaaattgtgcatatgccaattttttgttaaaaccttttgttttgaactatactgctttgagatctcatttcagaagaacggcatgaacagtcttcagccacagttgtgatggttgttaaatgctcacaattgtgcattcttagggtttttccatccctggggtttgcaagttgttcacttaaaacattcttaaaatggttggcttcttgtctgcaagccagctgatatggtagcaaccaaagattccagtgtttgagcatatgaaagactctgcctgcttaattgtgctagaaataacagcatctaaagtgaagacttaagaaaaacttagtgactactagattatccttaggactctgcattaactctataatgttcttggtattaaaaaaaaagcatatttgtcacagaaatttagttaacatcttacaactgaacatgtatgtatgttgcttagataaatgtaatcactgtaaacatctatatgatctgggattttgtttttattttgaaatgggagcttttttgtttacaagttcattaaaaactaaaaactgtttctgtaaggaaatgagattttttttaaacaacaaaaaatgccttgctgactcactattaaataaaaatctccccaattttttgatagactacttcaagccatttgttacatggtattcctttgcaagtcaatttaggtttcgtgttataacttttcctctttttttaagaaaaatgaaaaaagtaattcttttgtctgaaggggaaaggcattctttcatttttttctttttttttttttttttttatgacttgcaggcacaatatctagtactgcaactgccagaacttggtattgtagctgctgcccgctgactagcagctggactgattttgaataaaaatgaaagcattaaagggtttccctacaaaacatttttctttaaaatacttttgaaatggctataagcagttgactttcacccttggagagcatcacactgtgtgaggttcagtgattgttgaccctccccagcccctcctgcttctttaagttatctgtgtgcgtgcgcttcctctcaatcttctttgcacgctcatttctttttctctgacccatgagaaaggaaaacttactgatgataatttttaaatagtgtaatttattcatttatagcatgtcaggataaattaaaagaacatttgtctggaaatgctgccgggagcctattgtgtaaatgtaggtattttgtaaaataaccttgaaattgtaaattgacacgtgtttggtcagattgtgtcaagtttaatttgttttgttttcttttttcttttttttatttgaaaactactttagcaataattaattccatgattatcacattctgccattaagggatattagtaccgtaatactgaagaaattttattaagtctgaacttctggggtaggcagcttctttgtttcttttctatccacccttgtcggttgaggtatttgtttcttgactaataaaccctttgatacttttagccagaaatcagtctcataaagctatttttgagtatagtttgtgtaaaataaaaatgtttagctttggtaataacttccaagctgaactccctctagcaagatatttttcagtgcttttatttactatgcacttagactatgcactttttctgaaatatttttgtaacacttttttgtatttttgccatttgaaaaggttgtggtgtagttggtctgtaattaagttgcagatttaaaactgctgttagctttgtaaatcaaaatataggtgttttttgtcctggtatatcgtcattccatctgcagctggagctggaatcccattgatcttctagctaccattcattttcttcactgttcacaaaagaagagtgtgaaattcagtgaatgctgttactaatcctgttacgagatgaatctcatttcaccaaaattaaattatgtttttccgctaaaatgatgatacaagttgaagacacatcactctgaaattggaagacctcaccacttaaggctccacagtggcttactcagctgaactctaggttactactctttactttgttcacccattggggggtgcagtttttttaaaatgttgggagatggccattctaactactgttgaatgtctctgttttgggaaggtataacaagaaataaaaaagaatatatatgaagggagagactggttatctcctcccatatggttgtgcttatcctcttatggcttacaaatgaatatttggaggtttgctttcacaatgatttcccatcaacaaatatttttagtaggatttttcctgtttctgttagtccttgcagtactcataaatgttttaagctgagcatactgtaatagtcataagtttaatttcattataataaaaataatcaaacaaaaggactttagaacccaagacaatgagctagttttccctaaagtttgctgaactattaaggaatatgttcttatagcttttgactagaatgagtcatgggaattctaagaagggatggcctagacatttttagctcagttaaattcagcatttaatgcaggtgagttcctgggtcgttttccaactagtctggaacagtctggttctgactcaaactggtataaagcattattttaggttttctctttgccagtttttaagcagttataaccatgtaaatcaagatgtgaggacatctatatgaagtatagtaaagaagtggtgtcagcagatcaatatgtgtgtcctgggtgtgctgctctcttaagtgagactttgtgagactatactttaaatgcattattaccattgcttacattttgggggattttcttcctcctcaaaacttccatttctattgtaatattcttaatgacaatctttttttttttttagcagtgtatgtttgaaacagccaaagatggcgatgaaccaagtgtaaattgatctaagcagcccatgcagtttgtgttgaatcaacaaacagtgtattgttgaagtgaaattattttctgaaatgacttgttagaccagttttgaggacatactcaaaagtagagtaataatggctcctgggatggagaaatatgagatgaacctggaacattctattatggtgccacaaaggaaatctaaaaaaaaaaaaaaaaaaaaaagtggttggctaggagcagtggcacacgcctgtgattccagcactttgggaggccgaagtgggcaggagttcaagaccagcctggccaacatagtgaaaccctgtctctactaaaaatacaaaaattagccgggtgtggtggcgggcgcctgtaatcccagcttttcaagaggctgaggcagaagaatcgcttgaacccgggagatggaggttgcagtgagctgagatcgtgccactgcactccagcctgggcgttgcagtgagactccgtctcaacaacaacaaaaaggtggatacatgtcaaaagggcacaggagccacttgaaggattatacttgctaaatctgtgtcaattatcaaaataaactggtagcaacgttacaactcactgaataagataccatgattccatgttgacttaaaaatggagagaagagaaagctctaacttgaatgtcagctaatttaaggtgaaaggattttatgtgttagaaaaatcaccattttgcaaactagttttcagaatccttaatatatgtcatctcttttattcctcataacagtaataagaaacagttaactgtttcagaaaagagtggggctgcccaaggcaaggcatgttggtaattggtaagctttatagagccaagacctcaacctgattttcttgctttcatgcagttaagccatggtgctcctcttgttatatcacccttttaaacccagagattgatagtattagccatcatttgctgagtgtcatgcactattctaagtgctttacatgtatttgcctaatcagcgccctgtgaagtacatcctgtctccattttgcatataaggataccaaagcacagagttggagggaagatagttatattcccttactttatttatttatttttttgagacagggtctcgcactgtcgcccaggcttgagtgctataagaccttaagtttcccctttcaaagtagtttatagtgtctaaatatcttacataaaagtatatatcaaatagggtggcagtctggaaagatttaaaatccagaatgactggaaggttgggcaactaagatttcttaaattgcagctgttttcaacatagatgtgttgtagagtcttttcggtttcaaaattaaattgactataaatggagtgtgcttaa

SEQ ID NO: 114504 - DNA, 2559 bp, Homo sapiens
  Payload ID: 2390
  Gene Symbol: CSNK1A1
  Gene Name: casein kinase 1, alpha 1
  Uniprot ID: P48729
  ENST ID: ENST00000377843
  CDS Start-End: 589-1602
atgcgcagctgggcggtgacagggtgacgctcggagcgtgggccgcgactctcacggatccggttccgccctctcgctgccgatccttcggagcgagcgcccgagatccctttcccagagtgctctgcgccgtgaagaagcggctcccggggactgggggcattttgtgttggctggagctggagtaacaagatggcgtcgtccgcggagtgacaggggtccctctgggccggagccggcggcagtggtggcagcggtatcgccgccctagctcaccgcgccccttttccagcccgcgacgtcgccgcgcaagcgaggcagcggcggccgccgagaaacaagtggcccagcctggtaaccgccgagaagcccttcacaaactgcggcctggcaaaaagaaacctgactgagcggcggtgatcaggttcccctctgctgattctgggccccgaaccccggtaaaggcctccgtgttccgtttcctgccgccctcctccgtagccttgcctagtgtaggagccccgaggcctccgtcctcttcccagaggtgtcggggcttggccccagcctccatcttcgtctctcaggatggcgagtagcagcggctccaaggctgaattcattgtcggagggaaatataaactggtacggaagatcgggtctggctccttcggggacatctatttggcgatcaacatcaccaacggcgaggaagtggcagtgaagctagaatctcagaaggccaggcatccccagttgctgtacgagagcaagctctataagattcttcaaggtggggttggcatcccccacatacggtggtatggtcaggaaaaagactacaatgtactagtcatggatcttctgggacctagcctcgaagacctcttcaatttctgttcaagaaggttcacaatgaaaactgtacttatgttagctgaccagatgatcagtagaattgaatatgtgcatacaaagaattttatacacagagacattaaaccagataacttcctaatgggtattgggcgtcactgtaataagttattccttattgattttggtttggccaaaaagtacagagacaacaggacaaggcaacacataccatacagagaagataaaaacctcactggcactgcccgatatgctagcatcaatgcacatcttggtattgagcagagtcgccgagatgacatggaatcattaggatatgttttgatgtattttaatagaaccagcctgccatggcaagggctaaaggctgcaacaaagaaacaaaaatatgaaaagattagtgaaaagaagatgtccacgcctgttgaagttttatgtaaggggtttcctgcagaatttgcgatgtacttaaactattgtcgtgggctacgctttgaggaagccccagattacatgtatctgaggcagctattccgcattcttttcaggaccctgaaccatcaatatgactacacatttgattggacaatgttaaagcagaaagcagcacagcaggcagcctcttccagtgggcagggtcagcaggcccaaacccccacaggcaagcaaactgacaaaaccaagagtaacatgaaaggtttctaagcatgaattgaggaacagaagaagcagagcagatgatcggagcagcatttgtttctccccaaatctagaaattttagttcatatgtacactagccagtggttgtggacaaccatttacttggtgtaaagaacttaatttcagtataaactgactctgggcagcattggtgatgctgtatcctgagttgtagcctctgtaattgtgaatattaactgagatagtgaaacatggtgtccggttttctattgcattttttcaagtggaaaagttaactaaatggttgacacacaaaaattggtggagaaattgtgcatatgccaattttttgttaaaaccttttgttttgaactatactgctttgagatctcatttcagaagaacggcatgaacagtcttcagccacagttgtgatggttgttaaatgctcacaattgtgcattcttagggtttttccatccctggggtttgcaagttgttcacttaaaacattcttaaaatggttggcttcttgtctgcaagccagctgatatggtagcaaccaaagattccagtgtttgagcatatgaaagactctgcctgcttaattgtgctagaaataacagcatctaaagtgaagacttaagaaaaacttagtgactactagattatccttaggactctgcattaactctataatgttcttggtattaaaaaaaaagcatatttgtcacagaaatttagttaacatcttacaactgaacatgtatgtatgttgcttagataaatgtaatcactgtaaacatctatatgatctgggattttgtttttattttgaaatgggagcttttttgtttacaagttcattaaaaactaaaaactgtttctgtaaggaaatgagattttttttaaacaacaaaaaatgccttgctgactcactattaaataaaaatctccccaattttttgatagactacttc

SEQ ID NO: 114505 - DNA, 620 bp, Homo sapiens
  Payload ID: 2390
  Gene Symbol: CSNK1A1
  Gene Name: casein kinase 1, alpha 1
  ENST ID: ENST00000515748
  CDS Start-End: 205-474
ggcctggcaaaaagaaacctgactgagcggcggtgatcaggttcccctctgctgattctgggccccgaaccccggtaaaggcctccgtgttccgtttcctgccgccctcctccgtagccttgcctagtgtaggagccccgaggcctccgtcctcttcccagaggtgtcggggcttggccccagcctccatcttcgtctctcaggatggcgagtagcagcggctccaaggctgaattcattgtcggagggaaatataaactggtacggaagatcgggtctggctccttcggggacatctatttggcgatcaacatcaccaacggcgaggaagtggcagtgaagctagaatctcagaaggccaggcatccccagttgctgtacgagagcaagctctataagattcttcaaggtggggttggcatcccccacatacgcagccccgagtggattaaacctttgaaaagccaagaataaagctgcaggaggcggtgtggaggttcgaggaaggagatggcatagtgacagtgtttgtgatctctgcagcagatgtgacacgaaattgttgaattacactatgtaaaatccttcgtagttcttttaaaagtgttaattactctttc

SEQ ID NO: 114506 - DNA, 1098 bp, Homo sapiens
  Payload ID: 2390
  Gene Symbol: CSNK1A1
  Gene Name: casein kinase 1, alpha 1
  Uniprot ID: P48729
  ENST ID: ENST00000515768
  CDS Start-End: 1-1098
atggcgagtagcagcggctccaaggctgaattcattgtcggagggaaatataaactggtacggaagatcgggtctggctccttcggggacatctatttggcgatcaacatcaccaacggcgaggaagtggcagtgaagctagaatctcagaaggccaggcatccccagttgctgtacgagagcaagctctataagattcttcaaggtggggttggcatcccccacatacggtggtatggtcaggaaaaagactacaatgtactagtcatggatcttctgggacctagcctcgaagacctcttcaatttctgttcaagaaggttcacaatgaaaactgtacttatgttagctgaccagatgatcagtagaattgaatatgtgcatacaaagaattttatacacagagacattaaaccagataacttcctaatgggtattgggcgtcactgtaataagtgtttagaatctccagtggggaagaggaaaagaagcatgactgttagtacttctcaggacccatctttctcaggattaaaccagttattccttattgattttggtttggccaaaaagtacagagacaacaggacaaggcaacacataccatacagagaagataaaaacctcactggcactgcccgatatgctagcatcaatgcacatcttggtattgagcagagtcgccgagatgacatggaatcattaggatatgttttgatgtattttaatagaaccagcctgccatggcaagggctaaaggctgcaacaaagaaacaaaaatatgaaaagattagtgaaaagaagatgtccacgcctgttgaagttttatgtaaggggtttcctgcagaatttgcgatgtacttaaactattgtcgtgggctacgctttgaggaagccccagattacatgtatctgaggcagctattccgcattcttttcaggaccctgaaccatcaatatgactacacatttgattggacaatgttaaagcagaaagcagcacagcaggcagcctcttccagtgggcagggtcagcaggcccaaacccccacaggcaagcaaactgacaaaaccaagagtaacatgaaaggtttctaa

SEQ ID NO: 114507 - DNA, 1099 bp, Homo sapiens
  Payload ID: 2390
  Gene Symbol: CSNK1A1
  Gene Name: casein kinase 1, alpha 1
  ENST ID: ENST00000503350
  CDS Start-End: 1-503
ggcaacacataccatacagagaagataaaaacctcactggcactgcccgatatgctagcatcaatgcacatcttggtattgagcagagtcgccgagatgacatggaatcattaggatatgttttgatgtattttaatagaaccagcctgccatggcaagggctaaaggctgcaacaaagaaacaaaaatatgaaaagattagtgaaaagaagatgtccacgcctgttgaagttttatgtaaggggtttcctgcagaatttgcgatgtacttaaactattgtcgtgggctacgctttgaggaagccccagattacatgtatctgaggcagctattccgcattcttttcaggaccctgaaccatcaatatgactacacatttgattggacaatgttaaagcagaaagcagcacagcaggcagcctcttccagtgggcagggtcagcaggcccaaacccccacaggcaagcaaactgacaaaaccaagagtaacatgaaaggttagtagccaagaaccaagtgacgttacagggaaaaaattgaatacaaaattgggtaattcatttctaacagtgttagatcaaggaggtggttttaaaatacataaaaatttggctctgcgttaaaaaaaaaaagacgtccttggaaaatttgactactaactttaaacccaaatgtccttgttcatatatatgtatatgtatttgtatatacatatatgtgtgtatatttatatcatttctcttgggattttgggtcatttttttaacaactgcatcttttttactcattcattaaccccctttccaaaaatttggtgttgggaatataatataatcaatcaatccaaaatcctagacctaacacttgttgatttctaataatgaatttggttagccatattttgactttatttcagactaacaatgttaagattttttattttgcatgttaatgctttagcatttaaaatggaaaattgtgaacatgttgtaatttcaagaggtgagtttggcattacccccaaagtgtctatcttctcagttgcagagcatctcattttctctcttaaatgctcaaataaatgcaaagctcagcaca

SEQ ID NO: 114508 - DNA, 1772 bp, Homo sapiens
  Payload ID: 2390
  Gene Symbol: CSNK1A1
  Gene Name: casein kinase 1, alpha 1
  ENST ID: ENST00000504676
  CDS Start-End: 263-973
cagcttttcacttcttcttgtagtcgcgacttggagttttgctaatgtctccctcctttcctaagtgacattgaatccgtagggatgttgatgccatcatcccctctttcccctgcaggaagtggcagtgaagctagaatctcagaaggccaggcatccccagttgctgtacgagagcaagctctataagattcttcaaggtggggttggcatcccccacatacggtggtatggtcaggaaaaagactacaatgtactagtcatggatcttctgggacctagcctcgaagacctcttcaatttctgttcaagaaggttcacaatgaaaactgtacttatgttagctgaccagatgatcagtagaattgaatatgtgcatacaaagaattttatacacagagacattaaaccagataacttcctaatgggtattgggcgtcactgtaataagttattccttattgattttggtttggccaaaaagtacagagacaacaggacaaggcaacacataccatacagagaagataaaaacctcactggcactgcccgatatgctagcatcaatgcacatcttggtattgagcagagtcgccgagatgacatggaatcattaggatatgttttgatgtattttaatagaaccagcctgccatggcaagggctaaaggctgcaacaaagaaacaaaaatatgaaaagattagtgaaaagaagatgtccacgcctgttgaagttttatgtaaggggtttcctgcagaatttgcgatgtacttaaactattgtcgtgggctacgctttgaggaagccccagattacatgtatctgaggcagctattccgcattcttttcaggaccctgaaccatcaatatgactacacatttgattggacaatgttaaagcagaaagcagcacagcaggcagcctcttccagtgggcagggtcagcaggcccaaacccccacaggtttctaagcatgaattgaggaacagaagaagcagagcagatgatcggagcagcatttgtttctccccaaatctagaaattttagttcatatgtacactagccagtggttgtggacaaccatttacttggtgtaaagaacttaatttcagtataaactgactctgggcagcattggtgatgctgtatcctgagttgtagcctctgtaattgtgaatattaactgagatagtgaaacatggtgtccggttttctattgcattttttcaagtggaaaagttaactaaatggttgacacacaaaaattggtggagaaattgtgcatatgccaattttttgttaaaaccttttgttttgaactatactgctttgagatctcatttcagaagaacggcatgaacagtcttcagccacagttgtgatggttgttaaatgctcacaattgtgcattcttagggtttttccatccctggggtttgcaagttgttcacttaaaacattcttaaaatggttggcttcttgtctgcaagccagctgatatggtagcaaccaaagattccagtgtttgagcatatgaaagactctgcctgcttaattgtgctagaaataacagcatctaaagtgaagacttaagaaaaacttagtgactactagattatccttaggactctgcattaactctataatgttcttggtattaaaaaaaaagcatatttgtcacagaaatttagttaacatcttacaactgaacatgtatgtatgttgcttagataaatgtaatcactgtaaacatctatatgatctgggat

SEQ ID NO: 114509 - DNA, 1856 bp, Homo sapiens
  Payload ID: 2390
  Gene Symbol: CSNK1A1
  Gene Name: casein kinase 1, alpha 1
  ENST ID: ENST00000515435
  CDS Start-End: 263-1057
cagcttttcacttcttcttgtagtcgcgacttggagttttgctaatgtctccctcctttcctaagtgacattgaatccgtagggatgttgatgccatcatcccctctttcccctgcaggaagtggcagtgaagctagaatctcagaaggccaggcatccccagttgctgtacgagagcaagctctataagattcttcaaggtggggttggcatcccccacatacggtggtatggtcaggaaaaagactacaatgtactagtcatggatcttctgggacctagcctcgaagacctcttcaatttctgttcaagaaggttcacaatgaaaactgtacttatgttagctgaccagatgatcagtagaattgaatatgtgcatacaaagaattttatacacagagacattaaaccagataacttcctaatgggtattgggcgtcactgtaataagtgtttagaatctccagtggggaagaggaaaagaagcatgactgttagtacttctcaggacccatctttctcaggattaaaccagttattccttattgattttggtttggccaaaaagtacagagacaacaggacaaggcaacacataccatacagagaagataaaaacctcactggcactgcccgatatgctagcatcaatgcacatcttggtattgagcagagtcgccgagatgacatggaatcattaggatatgttttgatgtattttaatagaaccagcctgccatggcaagggctaaaggctgcaacaaagaaacaaaaatatgaaaagattagtgaaaagaagatgtccacgcctgttgaagttttatgtaaggggtttcctgcagaatttgcgatgtacttaaactattgtcgtgggctacgctttgaggaagccccagattacatgtatctgaggcagctattccgcattcttttcaggaccctgaaccatcaatatgactacacatttgattggacaatgttaaagcagaaagcagcacagcaggcagcctcttccagtgggcagggtcagcaggcccaaacccccacaggtttctaagcatgaattgaggaacagaagaagcagagcagatgatcggagcagcatttgtttctccccaaatctagaaattttagttcatatgtacactagccagtggttgtggacaaccatttacttggtgtaaagaacttaatttcagtataaactgactctgggcagcattggtgatgctgtatcctgagttgtagcctctgtaattgtgaatattaactgagatagtgaaacatggtgtccggttttctattgcattttttcaagtggaaaagttaactaaatggttgacacacaaaaattggtggagaaattgtgcatatgccaattttttgttaaaaccttttgttttgaactatactgctttgagatctcatttcagaagaacggcatgaacagtcttcagccacagttgtgatggttgttaaatgctcacaattgtgcattcttagggtttttccatccctggggtttgcaagttgttcacttaaaacattcttaaaatggttggcttcttgtctgcaagccagctgatatggtagcaaccaaagattccagtgtttgagcatatgaaagactctgcctgcttaattgtgctagaaataacagcatctaaagtgaagacttaagaaaaacttagtgactactagattatccttaggactctgcattaactctataatgttcttggtattaaaaaaaaagcatatttgtcacagaaatttagttaacatcttacaactgaacatgtatgtatgttgcttagataaatgtaatcactgtaaacatctatatgatctgggat

SEQ ID NO: 114510 - DNA, 775 bp, Homo sapiens
  Payload ID: 2390
  Gene Symbol: CSNK1A1
  Gene Name: casein kinase 1, alpha 1
  ENST ID: ENST00000523203
  CDS Start-End: 393-629
cgtcgtccgcggagtgacaggggtccctctgggccggagccggcggcagtggtggcagcggtatcgccgccctagctcaccgcgccccttttccagcccgcgacgtcgccgcgcaagcgaggcagcggcggccgccgagaaacaagtggcccagcctggtaaccgccgagaagcccttcacaaactgcggcctggcaaaaagaaacctgactgagcggcggtgatcaggttcccctctgctgattctgggccccgaaccccggtaaaggcctccgtgttccgtttcctgccgccctcctccgtagccttgcctagtgtaggagccccgaggcctccgtcctcttcccagaggtgtcggggcttggccccagcctccatcttcgtctctcaggatggcgagtagcagcggctccaaggctgaattcattgtcggagggaaatataaactggtacggaagatcgggtctggctccttcggggacatctatttggcgatcaacatcaccaacggcgaggaagtggcagtgaagctagaatctcagaaggccaggcatccccagttgctgtacgagagcaagctctataagattcttcaaggtggggttggcatcccccacatacgcatgtaaagctcataagccttgcactgaagaacctatactgcagcttcaatctatctgccaccttgactcttccctttatgacagcccatgccccaaaatggtttgcccctgcctggtggtatggtcaggaaaaagactacaatgtactagtc

SEQ ID NO: 114511 - DNA, 835 bp, Homo sapiens
  Payload ID: 2390
  Gene Symbol: CSNK1A1
  Gene Name: casein kinase 1, alpha 1
  ENST ID: ENST00000606719
  CDS Start-End: 166-570
tctcttttaaagttattccttattgattttggtttggccaaaaagtacagagacaacaggacaaggcaacacataccatacagagaagataaaaacctcactggcactgcccgatatgctagcatcaatgcacatcttggtattgagcagagtcgccgagatgacatggaatcattaggatatgttttgatgtattttaatagaaccagcctgccatggcaagggctaaaggctgcaacaaagaaacaaaaatatgaaaagattagtgaaaagaagatgtccacgcctgttgaagttttatgtaaggggtttcctgcagaatttgcgatgtacttaaactattgtcgtgggctacgctttgaggaagccccagattacatgtatctgaggcagctattccgcattcttttcaggaccctgaaccatcaatatgactacacatttgattggacaatgttaaagcagaaagcagcacagcaggcagcctcttccagtgggcagggtcagcaggcccaaacccccacaggcaagcaaactgacaaaaccaagagtaacatgaaaggtttctaagcatgaattgaggaacagaagaagcagagcagatgatcggagcagcatttgtttctccccaaatctagaaattttagttcatatgtacactagccagtggttgtggacaaccatttacttggtgtaaagaacttaatttcagtataaactgactctgggcagcattggtgatgctgtatcctgagttgtagcctctgtaattgtgaatattaactgagatagtgaaacatggtgtccggttttctattgcattttttcaagtgga

SEQ ID NO: 114512 - DNA, 1075 bp, Homo sapiens
  Payload ID: 2390
  Gene Symbol: CSNK1A1
  Gene Name: casein kinase 1, alpha 1
  ENST ID: ENST00000606299
  CDS Start-End: 189-479
aagttattccttattgattttggtttggccaaaaagtacagagacaacaggacaaggcaacacataccatacagagaagataaaaacctcactggcactgcccgatatgctagcatcaatgcacatcttggtattgagcagaggctgcaacaaagaaacaaaaatatgaaaagattagtgaaaagaagatgtccacgcctgttgaagttttatgtaaggggtttcctgcagaatttgcgatgtacttaaactattgtcgtgggctacgctttgaggaagccccagattacatgtatctgaggcagctattccgcattcttttcaggaccctgaaccatcaatatgactacacatttgattggacaatgttaaagcagaaagcagcacagcaggcagcctcttccagtgggcagggtcagcaggcccaaacccccacaggcaagcaaactgacaaaaccaagagtaacatgaaaggttagtagccaagaaccaagtgacgttacagggaaaaaattgaatacaaaattgggtaattcatttctaacagtgttagatcaaggaggtggttttaaaatacataaaaatttggctctgcgttaaaaaaaaaaagacgtccttggaaaatttgactactaactttaaacccaaatgtccttgttcatatatatgtatatgtatttgtatatacatatatgtgtgtatatttatatcatttctcttgggattttgggtcatttttttaacaactgcatcttttttactcattcattaaccccctttccaaaaatttggtgttgggaatataatataatcaatcaatccaaaatcctagacctaacacttgttgatttctaataatgaatttggttagccatattttgactttatttcagactaacaatgttaagattttttattttgcatgttaatgctttagcatttaaaatggaaaattgtgaacatgttgtaatttcaagaggtgagtttggcattacccccaaagtgtctatcttctcagttgcagagcatctcattttctctcttaaatgctcaaataaatgcaaagctcagcaca

SEQ ID NO: 114513 - DNA, 800 bp, Homo sapiens
  Payload ID: 2390
  Gene Symbol: CSNK1A1
  Gene Name: casein kinase 1, alpha 1
  ENST ID: ENST00000606826
  CDS Start-End: 1-553
tggcactgcccgatatgctagcatcaatgcacatcttggtattgagcagagtcgccgagatgacatggaatcattaggatatgttttgatgtattttaatagaaccagcctgccatggcaagggctaaaggctgcaacaaagaaacaaaaatatgaaaagattagtgaaaagaagatgtccacgcctgttgaagttttatgtaaggggtttcctgcagaatttgcgatgtacttaaactattgtcgtgggctacgctttgaggaagccccagattacatgtatctgaggcagctattccgcattcttttcaggaccctgaaccatcaatatgactacacatttgattggacaatgttaaagcagaaagcagcacagcaggcagcctcttccagtgggcagggtcagcaggcccaaacccccacaggcaagcaaactgacaaaaccaagagtaacatgaaaggaaatgcggatgaaagtgcaagagttggtttgtggtcatctggagtccatgtctccaagactgctggaccttcaaattctgcaacttgttagatcatctggatgatagcacaactgttagaagacctagaagaatacagcgttgctatgactcagtggtgttgaatgcagaccatctaccagctggggaaagaatcaattataaacaggaataaagggattcattcctcattttaactgatgttacagtgaagatgggttcttgaactcttggaagcctggatgagccacctaatctgcaagataaaaaccaaagaccaatgcgtattggggaaaagaa

SEQ ID NO: 114514 - DNA, 3088 bp, Homo sapiens
  Payload ID: 2390
  Gene Symbol: CSNK1A1
  Gene Name: casein kinase 1, alpha 1
  ENST ID: ENST00000412431
  CDS Start-End: 687-1187
taaagctggaaagatctaaataacccaacaggaaatgcggatgaaagtgcaagagttggtttgtggtcatctggagtccatgtctccaagactgctggaccttcaaattctgcaacttgttagatcatctggatgtaaagaacttaatttcagtataaactgactctgggcagcattggtgatgctgtatcctgagttgtagcctctgtaattgtgaatattaactgagatagtgaaacatggtgtccggttttctattgcattttttcaagtggaaaagttaactaaatggttgacacacaaaaattggtggagaaattgtgcatatgccaattttttgttaaaaccttttgttttgaactatactgctttgagatctcatttcagaagaacggcatgaacagtcttcagccacagttgtgatggttgttaaatgctcacaattgtgcattcttagggtttttccatccctggggtttgcaagttgttcacttaaaacattcttaaaatggttggcttcttgtctgcaagccagctgatatggtagcaaccaaagattccagtgtttgagcatatgaaagactctgcctgcttaattgtgctagaaataacagcatctaaagtgaagacttaagaaaaacttagtgactactagattatccttaggactctgcattaactctataatgttcttggtattaaaaaaaaagcatatttgtcacagaaatttagttaacatcttacaactgaacatgtatgtatgttgcttagataaatgtaatcactgtaaacatctatatgatctgggattttgtttttattttgaaatgggagcttttttgtttacaagttcattaaaaactaaaaactgtttctgtaaggaaatgagattttttttaaacaacaaaaaatgccttgctgactcactattaaataaaaatctccccaattttttgatagactacttcaagccatttgttacatggtattcctttgcaagtcaatttaggtttcgtgttataacttttcctctttttttaagaaaaatgaaaaaagtaattcttttgtctgaaggggaaaggcattctttcatttttttctttttttttttttttttttatgacttgcaggcacaatatctagtactgcaactgccagaacttggtattgtagctgctgcccgctgactagcagctggactgattttgaataaaaatgaaagcattaaagggtttccctacaaaacatttttctttttttatttgaaaactactttagcaataattaattccatgattatcacattctgccattaagggatattagtaccgtaatactgaagaaattttattaagtctgaacttctggggtaggcagcttctttgtttcttttctatccacccttgtcggttgaggtatttgtttcttgactaataaaccctttgatacttttagccagaaatcagtctcataaagctatttttgagtatagtttgtgtaaaataaaaatgtttagctttggtaataacttccaagctgaactccctctagcaagatatttttcagtgcttttatttactatgcacttagactatgcactttttctgaaatatttttgtaacacttttttgtatttttgccatttgaaaaggttgtggtgtagttggtctgtaattaagttgcagatttaaaactgctgttagctttgtaaatcaaaatataggtgttttttgtcctggtatatcgtcattccatctgcagctggagctggaatcccattgatcttctagctaccattcattttcttcactgttcacaaaagaagagtgtgaaattcagtgaatgctgttactaatcctgttacgagatgaatctcatttcaccaaaattaaattatgtttttccgctaaaatgatgatacaagttgaagacacatcactctgaaattggaagacctcaccacttaaggctccacagtggcttactcagctgaactctaggttactactctttactttgttcacccattggggggtgcagtttttttaaaatgttgggagatggccattctaactactgttgaatgtctctgttttgggaaggtataacaagaaataaaaaagaatatatatgaagggagagactggttatctcctcccatatggttgtgcttatcctcttatggcttacaaatgaatatttggaggtttgctttcacaatgatttcccatcaacaaatatttttagtaggatttttcctgtttctgttagtccttgcagtactcataaatgttttaagctgagcatactgtaatagtcataagtttaatttcattataataaaaataatcaaacaaaaggactttagaacccaagacaatgagctagttttccctaaagtttgctgaactattaaggaatatgttcttatagcttttgactagaatgagtcatgggaattctaagaagggatggcctagacatttttagctcagttaaattcagcatttaatgcaggtgagttcctgggtcgttttccaactagtctggaacagtctggttctgactcaaactggtataaagcattattttaggttttctctttgccagtttttaagcagttataaccatgtaaatcaagatgtgaggacatctatatgaagtatagtaaagaagtggtgtcagcagatcaatatgtgtgtcctgggtgtgctgctctcttaagtgagactttgtgagactatactttaaatgcattattaccattgcttacattttgggggattttcttcctcctcaaaacttccatttctattgtaatattcttaatgacaatctttttttttttttagcagtgtatgtttgaaacagccaaagatggcgatgaaccaagtgtaaattgatctaagcagcccatgcagtttgtgttgaatcaacaaacagtgtattgttgaagtgaaattattttctgaaatgacttgttagaccagttttgaggacatactcaaaagtagagtaataatggctcctgggatggagaaatatgagatgaacctggaacattctattatggtgccacaaaggaaat

SEQ ID NO: 114515 - DNA, 2406 bp, Homo sapiens
  Payload ID: 2391
  Gene Symbol: CSNK1A1L
  Gene Name: casein kinase 1, alpha 1-like
  Uniprot ID: Q8N752
  ENST ID: ENST00000379800
  CDS Start-End: 409-1422
tttgtggttggctgaggtggaggaacaaaatggcggcgccggcggcgtgaccgggccctctggcccacagccgttggtagcggtggcagcagtactgctgccccaactcgctgtgccccctttctcagcccacgacatcgccacgacagcgaggcagcgaccgccaccgagaaagaggtggtggcccagcctggaaccttgagaaaccctcgcaaactgtggcctggcggaaatcctggtgtgctgcagggatcaggctgactccacgccctgtaacaccgggaaacgcctcggtggccatttccagcagccctcatcctcagccttgcgggccggtgggccccggaggcctccatcctcccctagaggggtcagggctgagcccagcctccatctttgcctctcaggatgacaaacaacagcggctccaaagccgaactcgttgtgggagggaaatacaaactggtgcggaagatcgggtctggctcctttggagacgtttatctgggcatcaccaccaccaacggcgaggacgtagcagtgaagctggaatctcagaaggtcaagcacccccagttgctgtatgagagcaaactctacacgattcttcaaggtggggttggcatcccccacatgcactggtatggtcaggaaaaagacaacaatgtgctagtcatggaccttctgggacccagcctcgaagacctctttaatttctgttcaagaaggttcaccatgaaaactgtacttatgttagccgaccagatgatcagcagaattgaatacgtgcatacaaagaattttctacaccgagacattaaaccagataacttcctgatgggtactgggcgtcactgtaataagttgttccttattgattttggtttggccaaaaagtacagagacaacaggaccaggcaacacataccgtacagagaagataaacacctcattggcactgtccgatatgccagcatcaatgcacatcttggtattgagcagagccgccgagatgacatggaatccttaggctacgttttcatgtattttaatagaaccagcctgccgtggcaaggactaagggctatgacaaaaaaacaaaaatatgaaaagattagtgagaagaagatgtccacccctgttgaagttttatgtaaggggtttcctgcagaattcgccatgtacttgaactactgtcgtgggctgcgctttgaggaagtcccagattacatgtatctgaggcagctattccgcattcttttcaggaccctgaaccaccaatatgactacacatttgattggacgatgttaaagcagaaagcagcacagcaggcagcctcttccagtgggcagggtcagcaggcccaaacccagacaggcaagcaaactgaaaaaaacaagaataatgtgaaagataactaagcgtgaatgaggaacagaagaagcagagcagatgattcgagcagcatttgtttctccccacatctagaaattgtagttcatatgtacaccagctagtggctgtgaacaaccatttagttggtgtaaaaaactttatttcaatataaactgactctggggagcgttggtgatgctgtatcccaaagtgtagcctctgtaattgtgaatattaactgaggtagtgaaacgtggtgtctggttttctattgcatttattcaagtagaaaagttaactaaatggttgacacacacgaattggtggagacattgtccatatgccaattttttgttaaaaccttttattttgaactagactgctttgagatatcatttcagaaggacagtattcagccacagctgcaaaggttgtaaatgcttatgattgagcatttttagggtttctccatccctggggtttgcaaattgttcacataaagagcattcttaaaatggttggcttcttgtctgtaagccagctgatctagtagtaaccaaaaattccagttttgagaataggaaagattccgcctgcttacctgtgaagacataagaaaatcttagtaactaccagattatctttagaattccacattaactatatcatgttctcggtattttaaaaacaacaacaaccatatttgtcacagaaatttagttaacatcttacaactgaacatgtatgtacatggcttagataaatgtaatcaccgtaaacacccatatgatctgggattttgttcatattttgaaatgggagcttttatgttttacaagttcactaaaatctgaaaactgtttctataaggaaataatacttttttaaacaacaaccaaaaaatgccttgctgattcactaggaaataaaaatctccccaattttttgatagtcaacttcgagccatttgttacatgatattcccttgcaagtaaattttatttcattat

SEQ ID NO: 114516 - DNA, 1088 bp, Homo sapiens
  Payload ID: 2392
  Gene Symbol: CSNK1D
  Gene Name: casein kinase 1, delta
  ENST ID: ENST00000269361
  CDS Start-End: 1-361
gctgctggggccaagcctggaggacctcttcaacttctgctccaggaaattcagcctcaaaaccgtcctgctgcttgctgaccaaatgatcagtcgcatcgaatacattcattcaaagaacttcatccaccgggatgtgaagccagacaacttcctcatgggcctggggaagaagggcaacctggtgtacatcatcgacttcgggctggccaagaagtaccgggatgcacgcacccaccagcacatcccctatcgtgagaacaagaacctcacggggacggcgcggtacgcctccatcaacacgcaccttggaattggggctgaaggctgccaccaagagacagaaatacgaaaggattagcgagaagaaaatgtccacccccatcgaagtgttgtgtaaaggctacccttccgaatttgccacatacctgaatttctgccgttccttgcgttttgacgacaagcctgactactcgtacctgcggcagcttttccggaatctgttccatcgccagggcttctcctatgactacgtgttcgactggaacatgctcaaatttggtgccagccgggccgccgatgacgccgagcgggagcgcagggaccgagaggagcggctgagacactcgcggaacccggctacccgcggcctcccttccacagcctccggccgcctgcgggggacgcaggaagtggctccccccacacccctcacccctacctcacacacggctaacacctccccccggcccgtctccggcatggagagagagcggaaagtgagtatgcggctgcaccgcggggcccccgtcaacatctcctcgtccgacctcacaggccgacaagatacctctcgcatgtccacctcacagaatagcattcctttcgaacaccacggcaagtagctgctcgtctcccatcggaaggcagcactggattcctggtcgggtggcttccagtggtcttcagtctgtcgtgcaccgatgagaactctccttattgctgtgaagggcagacaatgcatggctgatctactctgttaccaatggctttactagtgacacgtcccccggtctaggatcgaaatg

SEQ ID NO: 114517 - DNA, 3712 bp, Homo sapiens
  Payload ID: 2392
  Gene Symbol: CSNK1D
  Gene Name: casein kinase 1, delta
  Uniprot ID: P48730
  ENST ID: ENST00000314028
  CDS Start-End: 351-1598
gccccgccgggttgctaggggaagtgacgtcacagcgcgatggcggcggctcctttaggcagctgaaaggggatttaggcccggaagatccgagtccatccgcggcggggagagggcaagcgggaccggtaggggccggagcagcggcggcggcgctcggactgtcccatccgccccgtattgaggcgctgggagcggcggggcgacaggaaagcgatggtgaaagcggggccgtgaggggggcggagccgggagccggacccgcagtagcggcagcagcggcgccgcctcccagagttcagacccaggaagcggccgggagggcaggagcgaatcgggccgccgccgccatggagctgagagtcgggaacaggtaccggctgggccggaagatcggcagcggctccttcggagacatctatctcggtacggacattgctgcaggagaagaggttgccatcaagcttgaatgtgtcaaaaccaaacaccctcagctccacattgagagcaaaatctacaagatgatgcagggaggagtgggcatccccaccatcagatggtgcggggcagagggggactacaacgtcatggtgatggagctgctggggccaagcctggaggacctcttcaacttctgctccaggaaattcagcctcaaaaccgtcctgctgcttgctgaccaaatgatcagtcgcatcgaatacattcattcaaagaacttcatccaccgggatgtgaagccagacaacttcctcatgggcctggggaagaagggcaacctggtgtacatcatcgacttcgggctggccaagaagtaccgggatgcacgcacccaccagcacatcccctatcgtgagaacaagaacctcacggggacggcgcggtacgcctccatcaacacgcaccttggaattgaacaatcccgaagagatgacttggagtctctgggctacgtgctaatgtacttcaacctgggctctctcccctggcaggggctgaaggctgccaccaagagacagaaatacgaaaggattagcgagaagaaaatgtccacccccatcgaagtgttgtgtaaaggctacccttccgaatttgccacatacctgaatttctgccgttccttgcgttttgacgacaagcctgactactcgtacctgcggcagcttttccggaatctgttccatcgccagggcttctcctatgactacgtgttcgactggaacatgctcaaatttggtgccagccgggccgccgatgacgccgagcgggagcgcagggaccgagaggagcggctgagacactcgcggaacccggctacccgcggcctcccttccacagcctccggccgcctgcgggggacgcaggaagtggctccccccacacccctcacccctacctcacacacggctaacacctccccccggcccgtctccggcatggagagagagcggaaagtgagtatgcggctgcaccgcggggcccccgtcaacatctcctcgtccgacctcacaggccgacaagatacctctcgcatgtccacctcacagattcctggtcgggtggcttccagtggtcttcagtctgtcgtgcaccgatgagaactctccttattgctgtgaagggcagacaatgcatggctgatctactctgttaccaatggctttactagtgacacgtcccccggtctaggatcgaaatgttaacaccgggagctctccaggccactcacccagcgacgctcgtgggggaaacatactaaacggacagactccaagagctgccaccgctggggctgcactgcggccccccacgtgaactcggttgtaacggggctgggaagaaaagcagagagagaattgcagagaatcagactccttttccagggcctcagctccctccagtggtggccgccctgtactccctgacgattccactgtaactaccaatcttctacttggttaagacagttttgtatcattttgctaaaaattattggcttaaatctgtgtaaagaaaatctgtctttttattgtttcttgtctgtttttgcagtcttacaaaaaaaatgttgactaaggaattctgagacaggctggcttggagttagtgtatgaggtggagtcgggcagggagaaggtgcaggtggatctcaagggtgtgtgctgtgtttgttttgcagtgttttattgtccgctttggagaggagatttctcatcaaaagtccgtggtgtgtgtgtgtgcccgtgtgtggtgggacctcttcaacctgattttggcgtctcaccctccctcctcccgtaattgacatgcctgctgtcaggaactcttgaggccctcggagagcagttagggaccgcaggctgccgcggggcaggggtgcagtgggtgttaccaggcaaagcactgcgcgcttcttccccaggaggtgggcaggcagctgagagcttggaagcagaggctttgagaccctagcaggacaattgggagtcccaggattcaaggtggaagatgcgtttctggtcccttgggagaggactgtgaaccgagaggtggttactgtagtgtttgttgccttgctgcctttgcactcagtccattttctcagcactcaatgctcctgtgcggattggcactccgtctgtatgaatgcctgtgcttaaaaccaggagcggggctgtccttgccacgtgccaagactagctcagaaaagccggcaggccagaaggacccaccctgaggtgccaaggagcaggtgactctcccaaccggacccagaaccttcacggccagaaagtagagtctgcgctgtgaccttctgttgggcgcgtgtctgttggtcagaagtgaagcagcgtgcgtggggccgagtcccaccagaaggcaggtggcctccgtgagctggtgctgccccaggctccatgctgctgtgccctgaggttcccaggatgccttctcgcctctcactccgcagcacttgggcggtagccagtggccatgtgctcccaaccccaatgcgcagggcagtctgtgttcgtgggcacttcggctggaccccatcacgatggacgatgttccctttggactctagggcttcgaaggtgtgcaccttggttctcccttctcctccccagagttccccggatgccataactggctggcgtcccagaacacagttgttcacccccccaccagctggctggccgtctgcctgagcccatggatgctttctcaatcctaggctggttactgtgtaagcgttttggagtacggggccttgagcgggtgggagctgtgtgttgaagtacagagggaggttggggtgggtcagagccgagttaagagattttctttgttgctggaccccttcttgaaggtagacgtcccccacccggagagacgtcgcgctgtggcctgaagtggcgcaagcttgctttgtaaatatctgtggtcccgatgtagtgcccagaacgtttgtgcgaggcagctctgcgcccgggttccagcccgagcctcgccgggtcgcgtcttcggagtgcttgtgacagtccttgcccagtatctagtccccgtcgccccgtgcaggagacgtaggtaggacgtcgtgtcagctgtgcactgacggccagtctccgagctgtgcgtttgtatcgccactgtatttgtgtactttaacaatcgtgtaaataataaattcataatgacttctaccttt

SEQ ID NO: 114518 - DNA, 2047 bp, Homo sapiens
  Payload ID: 2392
  Gene Symbol: CSNK1D
  Gene Name: casein kinase 1, delta
  Uniprot ID: P48730
  ENST ID: ENST00000392334
  CDS Start-End: 317-1546
gcgcgatggcggcggctcctttaggcagctgaaaggggatttaggcccggaagatccgagtccatccgcggcggggagagggcaagcgggaccggtaggggccggagcagcggcggcggcgctcggactgtcccatccgccccgtattgaggcgctgggagcggcggggcgacaggaaagcgatggtgaaagcggggccgtgaggggggcggagccgggagccggacccgcagtagcggcagcagcggcgccgcctcccagagttcagacccaggaagcggccgggagggcaggagcgaatcgggccgccgccgccatggagctgagagtcgggaacaggtaccggctgggccggaagatcggcagcggctccttcggagacatctatctcggtacggacattgctgcaggagaagaggttgccatcaagcttgaatgtgtcaaaaccaaacaccctcagctccacattgagagcaaaatctacaagatgatgcagggaggagtgggcatccccaccatcagatggtgcggggcagagggggactacaacgtcatggtgatggagctgctggggccaagcctggaggacctcttcaacttctgctccaggaaattcagcctcaaaaccgtcctgctgcttgctgaccaaatgatcagtcgcatcgaatacattcattcaaagaacttcatccaccgggatgtgaagccagacaacttcctcatgggcctggggaagaagggcaacctggtgtacatcatcgacttcgggctggccaagaagtaccgggatgcacgcacccaccagcacatcccctatcgtgagaacaagaacctcacggggacggcgcggtacgcctccatcaacacgcaccttggaattgaacaatcccgaagagatgacttggagtctctgggctacgtgctaatgtacttcaacctgggctctctcccctggcaggggctgaaggctgccaccaagagacagaaatacgaaaggattagcgagaagaaaatgtccacccccatcgaagtgttgtgtaaaggctacccttccgaatttgccacatacctgaatttctgccgttccttgcgttttgacgacaagcctgactactcgtacctgcggcagcttttccggaatctgttccatcgccagggcttctcctatgactacgtgttcgactggaacatgctcaaatttggtgccagccgggccgccgatgacgccgagcgggagcgcagggaccgagaggagcggctgagacactcgcggaacccggctacccgcggcctcccttccacagcctccggccgcctgcgggggacgcaggaagtggctccccccacacccctcacccctacctcacacacggctaacacctccccccggcccgtctccggcatggagagagagcggaaagtgagtatgcggctgcaccgcggggcccccgtcaacatctcctcgtccgacctcacaggccgacaagatacctctcgcatgtccacctcacagaatagcattcctttcgaacaccacggcaagtagctgctcgtctcccatcggaaggcagcactggattcctggtcgggtggcttccagtggtcttcagtctgtcgtgcaccgatgagaactctccttattgctgtgaagggcagacaatgcatggctgatctactctgttaccaatggctttactagtgacacgtcccccggtctaggatcgaaatgttaacaccgggagctctccaggccactcacccagcgacgctcgtgggggaaacatactaaacggacagactccaagagctgccaccgctggggctgcactgcggccccccacgtgaactcggttgtaacggggctgggaagaaaagcagagagagaattgcagagaatcagactccttttccagggcctcagctccctccagtggtggccgccctgtactccctgacgattccactgtaactaccaatcttctacttggttaagacagttttgtatcattttgctaaaaattattggcttaaatctgtgtaaagaaaa

SEQ ID NO: 114519 - DNA, 1580 bp, Homo sapiens
  Payload ID: 2392
  Gene Symbol: CSNK1D
  Gene Name: casein kinase 1, delta
  ENST ID: ENST00000398519
  CDS Start-End: 48-1331
cccaggaagcggccgggagggcaggagcgaatcgggccgccgccgccatggagctgagagtcgggaacaggtaccggctgggccggaagatcggcagcggctccttcggagacatctatctcggtacggacattgctgcaggagaagaggttgccatcaagcttgaatgtgtcaaaaccaaacaccctcagctccacattgagagcaaaatctacaagatgatgcagggaggagtgggcatccccaccatcagatggtgcggggcagagggggactacaacgtcatggtgatggagctgctggggccaagcctggaggacctcttcaacttctgctccaggaaattcagcctcaaaaccgtcctgctgcttgctgaccaaatgatcagtcgcatcgaatacattcattcaaagaacttcatccaccgggatgtgaagccagacaacttcctcatgggcctggggaagaagggcaacctggtgtacatcatcgacttcgggctggccaagaagtaccgggatgcacgcacccaccagcacatcccctatcgtgagaacaagaacctcacggggacggcgcggtacgcctccatcaacacgcaccttggaattgaacaatcccgaagagatgacttggagtctctgggctacgtgctaatgtacttcaacctgggctctctcccctggcaggggctgaaggctgccaccaagagacagaaatacgaaaggattagcgagaagaaaatgtccacccccatcgaagtgttgtgtaaaggctacccttccgaatttgccacatacctgaatttctgccgttccttgcgttttgacgacaagcctgactactcgtacctgcggcagcttttccggaatctgttccatcgccagggcttctcctatgactacgtgttcgactggaacatgctcaaatttggtgccagccgggccgccgatgacgccgagcgggagcgcagggaccgagaggagcggctgagacactcgcggaacccggctacccgcggcctcccttccacagcctccggccgcctgcgggggacgcaggaagtggctccccccacacccctcacccctacctcacacacggctaacacctccccccggcccgtctccggcatggagagagagcggaaagtgagtatgcggctgcaccgcggggcccccgtcaacatctcctcgtccgacctcacaggccgacaagatacctctcgcatgtccacctcacagaggagcagggacatggcatctctccggctgcacgcggcccgccagggcacccgctgccgtccccagcgcccacgacgcacctactgagggccccggcggcctctgaccgggctcccagccacgcaggccactgctggccacgagggcaggtgggtgttaggtgtccaggacaagcccaagcgctgggccgggctggatggaggacagggtgcaaagaccagccctgggcactgaccacaccacgcacactgccagccaggcagaggggcgaaaaagggaaggcaggagggtcctgtttcttaaacacagcagtgaataaagtggcttgttccacct

SEQ ID NO: 114520 - DNA, 1040 bp, Homo sapiens
  Payload ID: 2392
  Gene Symbol: CSNK1D
  Gene Name: casein kinase 1, delta
  ENST ID: ENST00000403276
  CDS Start-End: 51-431
agacccaggaagcggccgggagggcaggagcgaatcgggccgccgccgccatggagctgagagtcgggaacaggtaccggctgggccggaagatcggcagcggctccttcggagacatctatctcggtacggacattgctgcaggagaagaggttgccatcaagcttgaatgtgtcaaaaccaaacaccctcagctccacattgagagcaaaatctacaagatgatgcagggaggagtgggcatccccaccatcagatggtgcggggcagagggggactacaacgtcatggtgatggagctgctggggccaagcctggaggacctcttcaacttctgctccaggaaattcagcctcaaaaccgtcctgctgcttgctgaccaaatgaacaatcccgaagagatgacttggagtctctgggctacgtgctaatgtacttcaacctgggctctctcccctggcaggggctgaaggctgccaccaagagacagaaatacgaaaggattagcgagaagaaaatgtccacccccatcgaagtgttgtgtaaaggctacccttccgaatttgccacatacctgaatttctgccgttccttgcgttttgacgacaagcctgactactcgtacctgcggcagcttttccggaatctgttccatcgccagggcttctcctatgactacgtgttcgactggaacatgctcaaatttggtgccagccgggccgccgatgacgccgagcgggagcgcagggaccgagaggagcggctgagacactcgcggaacccggctacccgcggcctcccttccacagcctccggccgcctgcgggggacgcaggaagtggctccccccacacccctcacccctacctcacacacggctaacacctccccccggcccgtctccggcatggagagagagcggaaagtgagtatgcggctgcaccgcggggcccccgtcaacatctcctcgtccgacctcacaggccgacaagatacctctcgcatgtccacctcacagaatagcattcctttcgaacacc

SEQ ID NO: 114521 - DNA, 401 bp, Homo sapiens
  Payload ID: 2392
  Gene Symbol: CSNK1D
  Gene Name: casein kinase 1, delta
  ENST ID: ENST00000584672
  CDS Start-End: 1-193
gagagagcggaaagtgagtatgcggctgcaccgcggggcccccgtcaacatctcctcgtccgacctcacaggccgacaagatacctctcgcatgtccacctcacagaggagcagggacatggcatctctccggctgcacgcggcccgccagggcacccgctgccgtccccagcgcccacgacgcacctactgagggccccggcggcctctgaccgggctcccagccacgcaggccactgctggccacgagggcagatccactctggaatgacacggttcccaccccgccaccttccccctcaaaacactgatcgggcgacgatccgctgggccggcagctggagcccagccgtggccctgcctgagccagtccagtttgtaaaataaatagcaagcgttgc

SEQ ID NO: 114522 - DNA, 563 bp, Homo sapiens
  Payload ID: 2392
  Gene Symbol: CSNK1D
  Gene Name: casein kinase 1, delta
  ENST ID: ENST00000585026
  CDS Start-End: 20-190
gaatcgggccgccgccgccatggagctgagagtcgggaacaggtaccggctgggccggaagatcggcagcggctccttcggagacatctatctcggctggagtgcagtggcgcgatctcggctcactgcaagctccgcctcccagagatggggtttcaccgtgttagccaggatggtctcaatctcctgaccttgtgatccgcccgccttggcctcccaaagtgctgggattacaggcgtgagccaccgcgcccggccgattccagtgtcttatactctgaagggactcgtgagggaagaggagagagctgggtacggacattgctgcaggagaagaggttgccatcaagcttgaatgtgtcaaaaccaaacaccctcagctccacattgagagcaaaatctacaagatgatgcagggaggagtgggcatccccaccatcagatggtgcggggcagagggggactacaacgtcatggtgatggagctgctggggccaagcctggaggacctcttcaacttctgctccaggaaattcagcctcaaaaccgtcctgctgcttgct

SEQ ID NO: 114523 - DNA, 612 bp, Homo sapiens
  Payload ID: 2392
  Gene Symbol: CSNK1D
  Gene Name: casein kinase 1, delta
  ENST ID: ENST00000580446
  CDS Start-End: 51-612
agacccaggaagcggccgggagggcaggagcgaatcgggccgccgccgccatggagctgagagtcgggaacaggtaccggctgggccggaagatcggcagcggctccttcggagacatctatctcgtgggcatccccaccatcagatggtgcggggcagagggggactacaacgtcatggtgatggagctgctggggccaagcctggaggacctcttcaacttctgctccaggaaattcagcctcaaaaccgtcctgctgcttgctgaccaaatgatcagtcgcatcgaatacattcattcaaagaacttcatccaccgggatgtgaagccagacaacttcctcatgggcctggggaagaagggcaacctggtgtacatcatcgacttcgggctggccaagaagtaccgggatgcacgcacccaccagcacatcccctatcgtgagaacaagaacctcacggggacggcgcggtacgcctccatcaacacgcaccttggaattgaacaatcccgaagagatgacttggagtctctgggctacgtgctaatgtacttcaacctgggctctctcccctggcaggggctgaaggctgccaccaagagacagaaat

SEQ ID NO: 114524 - DNA, 1081 bp, Homo sapiens
  Payload ID: 2392
  Gene Symbol: CSNK1D
  Gene Name: casein kinase 1, delta
  ENST ID: ENST00000580784
  CDS Start-End: 1-61
tatgactacgtgttcgactggaacatgctcaaatttgttgctgtctcggcttaaaatctgacctccccacccccgtgcatctggatagtgcagcacagatccggctgccggctgctggccacgccaccacacctgcacaggctgttggaggctgcagggtccggaccctgagtgtactcctcgtccgaccaaacgctctcatccccaccccgctttcctccccagctgtcaccatttggggcctgtctttggcctccgatggttcctgtccctctcctctttctgcacgtgttagtgagcatgttcacagagcagcagggggtagctgctgcccatttggaagtttaaggaagttctgagcccacagggagatgccatggcgagtggggttttttcgattgttgggggagctgagaggcctggctctgaccccttgtggggatgatgctgtcatcccatgaggagaaacgtgcagcctgtggggggctttgcaggcagtctcgtcccagtgccctttgggtgccagccgggccgccgatgacgccgagcgggagcgcagggaccgagaggagcggctgagacactcgcggaacccggctacccgcggcctcccttccacagcctccggccgcctgcgggggacgcaggaagtggctccccccacacccctcacccctacctcacacacggctaacacctccccccggcccgtctccggcatggagagagagcggaaagtgagtatgcggctgcaccgcggggcccccgtcaacatctcctcgtccgacctcacaggccgacaagatacctctcgcatgtccacctcacagaatagcattcctttcgaacaccacggcaagtagctgctcgtctcccatcggaaggcagcactggattcctggtcgggtggcttccagtggtcttcagtctgtcgtgcaccgatgagaactctccttattgctgtgaagggcagacaatgcatggctgatctactctgttaccaatggctttactagtgacacgtcccccggtctaggatcgaaatgttaacaccgggagctctccaggccactcacccagc

SEQ ID NO: 114525 - DNA, 611 bp, Homo sapiens
  Payload ID: 2392
  Gene Symbol: CSNK1D
  Gene Name: casein kinase 1, delta
  ENST ID: ENST00000581660
  CDS Start-End: 77-208
agcagcggcgccgcctcccagagttcagacccaggaagcggccgggagggcaggagcgaatcgggccgccgccgccatggagctgagagtcgggaacaggtaccggctgggccggaagatcggcagcggctccttcggagacatctatctcgtagagatggggtttcaccgtgttagccaggatggtctcaatctcctgaccttgtgatccgcccgccttggcctcccaaagtgctgggattacaggcgtgagccaccgcgcccggccgattccagtgtcttatactctgaagggactcgtgagggaagaggagagagctgggtacggacattgctgcaggagaagaggttgccatcaagcttgaatgtgtcaaaaccaaacaccctcagctccacattgagagcaaaatctacaagatgatgcagggaggagtgggcatccccaccatcagatggtgcggggcagagggggactacaacgtcatggtgatggagctgctggggccaagcctggaggacctcttcaacttctgctccaggaaattcagcctcaaaaccgtcctgctgcttgctgaccaaatgatcagtcgcatcgaatacattcattcaaa

SEQ ID NO: 114526 - DNA, 2642 bp, Homo sapiens
  Payload ID: 2393
  Gene Symbol: CSNK1E
  Gene Name: casein kinase 1, epsilon
  Uniprot ID: P49674
  ENST ID: ENST00000359867
  CDS Start-End: 112-1362
ggttgggatctgaggggtcctctctgtgcccatcacagtttgagcttcagggaaaagaagaagaggtctttgcccttcgtttttccacgggaggagaatcaagagtgagccatggagctacgtgtggggaacaagtaccgcctgggacggaagatcgggagcgggtccttcggagatatctacctgggtgccaacatcgcctctggtgaggaagtcgccatcaagctggagtgtgtgaagacaaagcacccccagctgcacatcgagagcaagttctacaagatgatgcagggtggcgtggggatcccgtccatcaagtggtgcggagctgagggcgactacaacgtgatggtcatggagctgctggggcctagcctcgaggacctgttcaacttctgttcccgcaaattcagcctcaagacggtgctgctcttggccgaccagatgatcagccgcatcgagtatatccactccaagaacttcatccaccgggacgtcaagcccgacaacttcctcatggggctggggaagaagggcaacctggtctacatcatcgacttcggcctggccaagaagtaccgggacgcccgcacccaccagcacattccctaccgggaaaacaagaacctgaccggcacggcccgctacgcttccatcaacacgcacctgggcattgagcaaagccgtcgagatgacctggagagcctgggctacgtgctcatgtacttcaacctgggctccctgccctggcaggggctcaaagcagccaccaagcgccagaagtatgaacggatcagcgagaagaagatgtcaacgcccatcgaggtcctctgcaaaggctatccctccgaattctcaacatacctcaacttctgccgctccctgcggtttgacgacaagcccgactactcttacctacgtcagctcttccgcaacctcttccaccggcagggcttctcctatgactacgtctttgactggaacatgctgaaattcggtgcagcccggaatcccgaggatgtggaccgggagcggcgagaacacgaacgcgaggagaggatggggcagctacgggggtccgcgacccgagccctgccccctggcccacccacgggggccactgccaaccggctccgcagtgccgccgagcccgtggcttccacgccagcctcccgcatccagccggctggcaatacttctcccagagcgatctcgcgggtcgaccgggagaggaaggtgagtatgaggctgcacaggggtgcgcccgccaacgtctcctcctcagacctcactgggcggcaagaggtctcccggatcccagcctcacagacaagtgtgccatttgaccatctcgggaagtgaggagagcccccattggaccagtgtttgcttagtgtcttcactgtattttctttaaaaaaaaaaaaaaaaaaaaaaaggcaaaaataaaccactcaaaagaacaacaaaaaaacccagcacaaaaccgacgatggagtttgtttctttgatttctttgccaatggcaagaagatgagatgccctcagcactgaggattcttgcccccttgtggtgcccgctgcccccaaccttcaggctgccagatgctcccctgacaacaccaggctacaggagccagacgccagggcctgcccggcctcctgttcctgcccccacccaccacctgcctggagaggaacgggtcgggtccgtgtcggagaagtgacaggtcccagagccaaagccggccctcaagcatcatcagggagtggtgtagtcagttgaaggcagttcccaccgagttttccgagcctcagaatccaggagatacgcacagccccacccactctgagatgacagtggctgacttcccgtgctgggcttttccattgtccccctggcctccaggctcctcctctgcctctccatggagtgggtggggaggtggtgggggccggcgtcccctgcgtgtgtgtgtgtgtgtgtgtgtgtggatgtattgacctgtgtttcccaagacagcaggtgccacggcccgccccgcctgccagcccgaattcccgttctcctgtgtctactaacaaggacatgggggtgggcggtgacctccgcatccctcagagctcagagggtcctcgctgccaccggtccccccctagcccgtcatcagccggtggcagctccatcttccattcctggttttagggcagaatccatggagactgcttccagaaggcatctggctctgagttataaattacttccctggtcctgacagtcacctggggtcccccctctccctggttccacctttctgaggaggagcctggagtcagggctgggttttggattaacccatccttcctagttaacacctttttgtttttattttattttatttttgtttgttttctccgtgtgtgtgttttcctaatttatttacctctgtttcccctttttcctttttttttttaattaaagagcaaagctttttattactttgtaatttaaaaaactgaaaaaaaaaaaactgaagaactttggggggaattttgtacttttttcctgtgtaaatattggacttttttgagctttatcgtggttgttaatttgaagtaataaagtagaaaagataaagtga

SEQ ID NO: 114527 - DNA, 2791 bp, Homo sapiens
  Payload ID: 2393
  Gene Symbol: CSNK1E
  Gene Name: casein kinase 1, epsilon
  Uniprot ID: P49674
  ENST ID: ENST00000396832
  CDS Start-End: 262-1512
gcgggcgggcgggcaggaggccgggaggagggaggcggcggcggcggcggcggcggcggcgagagcccagagccagagcccggccggggccgagcggagcgcggcggcggcggcggcggcggcggctgggccgggagaggctggcgcgccgggcggctccgcgaatcctccggcatccgccccggcgggccgcccccgcccgcggcagccccccgagcagtggcccggcatcggcgccttcccggcgggcaagagtgagccatggagctacgtgtggggaacaagtaccgcctgggacggaagatcgggagcgggtccttcggagatatctacctgggtgccaacatcgcctctggtgaggaagtcgccatcaagctggagtgtgtgaagacaaagcacccccagctgcacatcgagagcaagttctacaagatgatgcagggtggcgtggggatcccgtccatcaagtggtgcggagctgagggcgactacaacgtgatggtcatggagctgctggggcctagcctcgaggacctgttcaacttctgttcccgcaaattcagcctcaagacggtgctgctcttggccgaccagatgatcagccgcatcgagtatatccactccaagaacttcatccaccgggacgtcaagcccgacaacttcctcatggggctggggaagaagggcaacctggtctacatcatcgacttcggcctggccaagaagtaccgggacgcccgcacccaccagcacattccctaccgggaaaacaagaacctgaccggcacggcccgctacgcttccatcaacacgcacctgggcattgagcaaagccgtcgagatgacctggagagcctgggctacgtgctcatgtacttcaacctgggctccctgccctggcaggggctcaaagcagccaccaagcgccagaagtatgaacggatcagcgagaagaagatgtcaacgcccatcgaggtcctctgcaaaggctatccctccgaattctcaacatacctcaacttctgccgctccctgcggtttgacgacaagcccgactactcttacctacgtcagctcttccgcaacctcttccaccggcagggcttctcctatgactacgtctttgactggaacatgctgaaattcggtgcagcccggaatcccgaggatgtggaccgggagcggcgagaacacgaacgcgaggagaggatggggcagctacgggggtccgcgacccgagccctgccccctggcccacccacgggggccactgccaaccggctccgcagtgccgccgagcccgtggcttccacgccagcctcccgcatccagccggctggcaatacttctcccagagcgatctcgcgggtcgaccgggagaggaaggtgagtatgaggctgcacaggggtgcgcccgccaacgtctcctcctcagacctcactgggcggcaagaggtctcccggatcccagcctcacagacaagtgtgccatttgaccatctcgggaagtgaggagagcccccattggaccagtgtttgcttagtgtcttcactgtattttctttaaaaaaaaaaaaaaaaaaaaaaaggcaaaaataaaccactcaaaagaacaacaaaaaaacccagcacaaaaccgacgatggagtttgtttctttgatttctttgccaatggcaagaagatgagatgccctcagcactgaggattcttgcccccttgtggtgcccgctgcccccaaccttcaggctgccagatgctcccctgacaacaccaggctacaggagccagacgccagggcctgcccggcctcctgttcctgcccccacccaccacctgcctggagaggaacgggtcgggtccgtgtcggagaagtgacaggtcccagagccaaagccggccctcaagcatcatcagggagtggtgtagtcagttgaaggcagttcccaccgagttttccgagcctcagaatccaggagatacgcacagccccacccactctgagatgacagtggctgacttcccgtgctgggcttttccattgtccccctggcctccaggctcctcctctgcctctccatggagtgggtggggaggtggtgggggccggcgtcccctgcgtgtgtgtgtgtgtgtgtgtgtgtggatgtattgacctgtgtttcccaagacagcaggtgccacggcccgccccgcctgccagcccgaattcccgttctcctgtgtctactaacaaggacatgggggtgggcggtgacctccgcatccctcagagctcagagggtcctcgctgccaccggtccccccctagcccgtcatcagccggtggcagctccatcttccattcctggttttagggcagaatccatggagactgcttccagaaggcatctggctctgagttataaattacttccctggtcctgacagtcacctggggtcccccctctccctggttccacctttctgaggaggagcctggagtcagggctgggttttggattaacccatccttcctagttaacacctttttgtttttattttattttatttttgtttgttttctccgtgtgtgtgttttcctaatttatttacctctgtttcccctttttcctttttttttttaattaaagagcaaagctttttattactttgtaatttaaaaaactgaaaaaaaaaaaactgaagaactttggggggaattttgtacttttttcctgtgtaaatattggacttttttgagctttatcgtggttgttaatttgaagtaataaagtagaaaagataaagtg

SEQ ID NO: 114528 - DNA, 2321 bp, Homo sapiens
  Payload ID: 2393
  Gene Symbol: CSNK1E
  Gene Name: casein kinase 1, epsilon
  Uniprot ID: P49674
  ENST ID: ENST00000400206
  CDS Start-End: 467-1717
ctttcaaacccggccggcccgagtggagtcagctcagtcccggcagccgccgcgcgaggaaatggccgaggggccggagccacagtccacagacaaacgaatttaaaggagcaaccgaggaggcacctgcgaaagaaagcccacacacaggtgaatttaaaggagcagccctggtgtcacctatcagtaaaagactatttggagttttcctcgtcttactggatgtcactctcgtccttgccgacctaattttcactgacagcaaactttatattcctttggagtatcgttctatttctctagctattgccttattttttctcatggatgttcttcttcgagtatttgtagaagggtgttggagcgggccggagagaagtagagtgggctgcgaggagaaggaaacaggcctttcggaggctcctcatccctcggaggtcatcccttactccagcaagagtgagccatggagctacgtgtggggaacaagtaccgcctgggacggaagatcgggagcgggtccttcggagatatctacctgggtgccaacatcgcctctggtgaggaagtcgccatcaagctggagtgtgtgaagacaaagcacccccagctgcacatcgagagcaagttctacaagatgatgcagggtggcgtggggatcccgtccatcaagtggtgcggagctgagggcgactacaacgtgatggtcatggagctgctggggcctagcctcgaggacctgttcaacttctgttcccgcaaattcagcctcaagacggtgctgctcttggccgaccagatgatcagccgcatcgagtatatccactccaagaacttcatccaccgggacgtcaagcccgacaacttcctcatggggctggggaagaagggcaacctggtctacatcatcgacttcggcctggccaagaagtaccgggacgcccgcacccaccagcacattccctaccgggaaaacaagaacctgaccggcacggcccgctacgcttccatcaacacgcacctgggcattgagcaaagccgtcgagatgacctggagagcctgggctacgtgctcatgtacttcaacctgggctccctgccctggcaggggctcaaagcagccaccaagcgccagaagtatgaacggatcagcgagaagaagatgtcaacgcccatcgaggtcctctgcaaaggctatccctccgaattctcaacatacctcaacttctgccgctccctgcggtttgacgacaagcccgactactcttacctacgtcagctcttccgcaacctcttccaccggcagggcttctcctatgactacgtctttgactggaacatgctgaaattcggtgcagcccggaatcccgaggatgtggaccgggagcggcgagaacacgaacgcgaggagaggatggggcagctacgggggtccgcgacccgagccctgccccctggcccacccacgggggccactgccaaccggctccgcagtgccgccgagcccgtggcttccacgccagcctcccgcatccagccggctggcaatacttctcccagagcgatctcgcgggtcgaccgggagaggaaggtgagtatgaggctgcacaggggtgcgcccgccaacgtctcctcctcagacctcactgggcggcaagaggtctcccggatcccagcctcacagacaagtgtgccatttgaccatctcgggaagtgaggagagcccccattggaccagtgtttgcttagtgtcttcactgtattttctttaaaaaaaaaaaaaaaaaaaaaaaggcaaaaataaaccactcaaaagaacaacaaaaaaacccagcacaaaaccgacgatggagtttgtttctttgatttctttgccaatggcaagaagatgagatgccctcagcactgaggattcttgcccccttgtggtgcccgctgcccccaaccttcaggctgccagatgctcccctgacaacaccaggctacaggagccagacgccagggcctgcccggcctcctgttcctgcccccacccaccacctgcctggagaggaacgggtcgggtccgtgtcggagaagtgacaggtcccagagccaaagccggccctcaagcatcatcagggagtggtgtagtcagttgaaggcagttcccaccgagttttccgagcctcagaatccaggagatacgcacagccccacccactctgagatgacagtggctgacttcccgtgctgggcttttccattgtccccctggcctccaggctcctcctctgcctctccatggagtgggtggggaggtggtgggggccggcgtcccc

SEQ ID NO: 114529 - DNA, 1580 bp, Homo sapiens
  Payload ID: 2393
  Gene Symbol: CSNK1E
  Gene Name: casein kinase 1, epsilon
  Uniprot ID: P49674
  ENST ID: ENST00000403904
  CDS Start-End: 293-1543
cggtgcgagagcgcgcgagccggcggcgggggcgggcgggcgggcaggaggccgggaggagggaggcggcggcggcggcggcggcggcggcgagagcccagagccagagcccggccggggccgagcggagcgcggcggcggcggcggcggcggcggctgggccgggagaggctggcgcgccgggcggctccgcgaatcctccggcatccgccccggcgggccgcccccgcccgcggcagccccccgagcagtggcccggcatcggcgccttcccggcgggcaagagtgagccatggagctacgtgtggggaacaagtaccgcctgggacggaagatcgggagcgggtccttcggagatatctacctgggtgccaacatcgcctctggtgaggaagtcgccatcaagctggagtgtgtgaagacaaagcacccccagctgcacatcgagagcaagttctacaagatgatgcagggtggcgtggggatcccgtccatcaagtggtgcggagctgagggcgactacaacgtgatggtcatggagctgctggggcctagcctcgaggacctgttcaacttctgttcccgcaaattcagcctcaagacggtgctgctcttggccgaccagatgatcagccgcatcgagtatatccactccaagaacttcatccaccgggacgtcaagcccgacaacttcctcatggggctggggaagaagggcaacctggtctacatcatcgacttcggcctggccaagaagtaccgggacgcccgcacccaccagcacattccctaccgggaaaacaagaacctgaccggcacggcccgctacgcttccatcaacacgcacctgggcattgagcaaagccgtcgagatgacctggagagcctgggctacgtgctcatgtacttcaacctgggctccctgccctggcaggggctcaaagcagccaccaagcgccagaagtatgaacggatcagcgagaagaagatgtcaacgcccatcgaggtcctctgcaaaggctatccctccgaattctcaacatacctcaacttctgccgctccctgcggtttgacgacaagcccgactactcttacctacgtcagctcttccgcaacctcttccaccggcagggcttctcctatgactacgtctttgactggaacatgctgaaattcggtgcagcccggaatcccgaggatgtggaccgggagcggcgagaacacgaacgcgaggagaggatggggcagctacgggggtccgcgacccgagccctgccccctggcccacccacgggggccactgccaaccggctccgcagtgccgccgagcccgtggcttccacgccagcctcccgcatccagccggctggcaatacttctcccagagcgatctcgcgggtcgaccgggagaggaaggtgagtatgaggctgcacaggggtgcgcccgccaacgtctcctcctcagacctcactgggcggcaagaggtctcccggatcccagcctcacagacaagtgtgccatttgaccatctcgggaagtgaggagagcccccattggaccagtgtttgcttaggtgag

SEQ ID NO: 114530 - DNA, 2127 bp, Homo sapiens
  Payload ID: 2393
  Gene Symbol: CSNK1E
  Gene Name: casein kinase 1, epsilon
  ENST ID: ENST00000405675
  CDS Start-End: 293-1228
cggtgcgagagcgcgcgagccggcggcgggggcgggcgggcgggcaggaggccgggaggagggaggcggcggcggcggcggcggcggcggcgagagcccagagccagagcccggccggggccgagcggagcgcggcggcggcggcggcggcggcggctgggccgggagaggctggcgcgccgggcggctccgcgaatcctccggcatccgccccggcgggccgcccccgcccgcggcagccccccgagcagtggcccggcatcggcgccttcccggcgggcaagagtgagccatggagctacgtgtggggaacaagtaccgcctgggacggaagatcgggagcgggtccttcggagatatctacctgggtgccaacatcgcctctggtgaggaagtcgccatcaagctggagtgtgtgaagacaaagcacccccagctgcacatcgagagcaagttctacaagatgatgcagggtggcgtggggatcccgtccatcaagtggtgcggagctgagggcgactacaacgtgatggtcatggagctgctggggcctagcctcgaggacctgttcaacttctgttcccgcaaattcagcctcaagacggtgctgctcttggccgaccagatgatcagccgcatcgagtatatccactccaagaacttcatccaccgggacgtcaagcccgacaacttcctcatggggctggggaagaagggcaacctggtctacatcatcgacttcggcctggccaagaagtaccgggacgcccgcacccaccagcacattccctaccgggaaaacaagaacctgaccggcacggcccgctacgcttccatcaacacgcacctgggcattgagcaaagccgtcgagatgacctggagagcctgggctacgtgctcatgtacttcaacctgggctccctgccctggcaggggctcaaagcagccaccaagcgccagaagtatgaacggatcagcgagaagaagatgtcaacgcccatcgaggtcctctgcaaaggctatccctccgaattctcaacatacctcaacttctgccgctccctgcggtttgacgacaagcccgactactcttacctacgtcagctcttccgcaacctcttccaccggcagggcttctcctatgactacgtctttgactggaacatgctgaaattcacggacactgtccaagatggtagccattggccacatgcgacacatttttaatgaattaaaattaatcaagactggaaatgtcggccaggcctggtggctcatgcctgtaatcccagcactttgggaggccatagagggcggatgacttgaggtcaggagtttaagaccagcctggccaacatggtgaaacccatttctactaaaaacacaaaaattagctgggcatggtggtgtgttcctgtaatcccagctgcttgggaggctgaggcaggagaatcgcttgaacccaggaggcagagattggagtgagctgagatcatgccactgccctccagtggccaccacatccggcaaggcagatgggaccatttccttcatccagaacgttctgtggacatcactgctctaggttcctcccttatggagtctcacaagactgtctagccagcaagatctcttttccaaccaggccaggagcacctctccacccactgctgctggtctgaccgccttcctggaagtccctcttgaggcaggccctggagttagaagctgggcagaggcacccacagccttatcctttgccaatctctgactcaatgccacggccactgtagtgagctgaaccacctccagcagtcccctggcagaagcacctggaaaacatgcaatgggaaccttcaccctgaggccaggcccttcccatgctacccaacagtagacaggacaccctgtgttgttggctgcaccggggtgctgggatctgtggatccctggggcctggaagccactctcagcacatacagccactgtgttccgaggtccagtcagctggccgggaaggaattcaacacagccaaggacagaggtccatatgatgacgggtggatgctcgtgtgactttgctgaccttttatgttttctatgggcaataaaggccaagagagctc

SEQ ID NO: 114531 - DNA, 787 bp, Homo sapiens
  Payload ID: 2393
  Gene Symbol: CSNK1E
  Gene Name: casein kinase 1, epsilon
  ENST ID: ENST00000442216
  CDS Start-End: 1-275
gctcatgtacttcaacctgggctccctgccctggcaggggctcaaagcagccaccaagcgccagaagtatgaacggatcagcgagaagaagatgtcaacgcccatcgaggtcctctgcaaaggctatccctccgaattctcaacatacctcaacttctgccgctccctgcggtttgacgacaagcccgactactcttacctacgtcagctcttccgcaacctcttccaccggcagggcttctcctatgactacgtctttgactggaacatgctgaaattcggggcttcctcgagccaggctcagccccgtgacagccccatgacagcgaagggacctttctgtccccgcccctgtccctgtgctgggcccacgtactcacccacgtactggtgcccggctcccctgggcacccagagccccccagataggccggtggaggaggtggaggagctgtccccccaaaactactggcctgtggtctggactccagggccccatttctgatgtcgccaggtgtgcctgagcccatcggggccaggcctgaggaagtgtttcttgggaggatgggatgaccccctgttcccaagagatggcagcacagtggaggccatggtggaaaaggccctgccatggggtccttgagggccaggacagcctgagggagggatggtggccactgcccacaaggggcctggtgggaacgggtcccaggacagactcatagctagaccccgttggcggcctctgtgttgaaccagaactcattaaacacctcctcttgcttca

SEQ ID NO: 114532 - DNA, 1005 bp, Homo sapiens
  Payload ID: 2393
  Gene Symbol: CSNK1E
  Gene Name: casein kinase 1, epsilon
  ENST ID: ENST00000366216
  CDS Start-End: 1-359
cccggaatcccgaggatgtggaccgggagcggcgagaacacgaacgcgaggagaggatggggcagctacgggggtccgcgacccgagccctgccccctggcccacccacgggggccactgccaaccggctccgcagtgccgccgagcccgtggcttccacgccagcctcccgcatccagccggctggcaatacttctcccagagcgatctcgcgggtcgaccgggagaggaaggtgagtatgaggctgcacaggggtgcgcccgccaacgtctcctcctcagacctcactgggcggcaagaggtctcccggatcccagcctcacagacaagtgtgccatttgaccatctcgggaagtgaggagagcccccattggaccagtgtttgcttagaaattcatccacacaagagagtggaggcatgaacagggctggccttcctcggatctcaggcccaggaaccaagctgtccatggcgggctgggcagatatttgggggtggggtggggagatgctcaccaggagggcagagaagggagagaatccgtttctgtcacatgaagatggatctcctagcgtgctgggccttgagccaggctctggggcccagagggagatagaccaagggacgagaagacaggagtttggggggccaagtgcagtggctcgcacctgtaatcccagcacttcgggaggcccagacaggtgggtcacttgaggtcaggagttcgagaccagcctggccaacatggtgaaaacccatctctactaaaaacacaaaaattagccgggtgtggtggcacacacctgtaatctcagctactcgggacgctgagacaggagaattgcttgaatctgggaggtggaggttgcagtgagccgagatcgtgccactgcactccagcctgggggacagagcgagactccatctcaaaaaaaaaaaaaagtagccagagacagctgtgtacctcacctgtcttttcccttctcccttctagtgtcttcac

SEQ ID NO: 114533 - DNA, 873 bp, Homo sapiens
  Payload ID: 2393
  Gene Symbol: CSNK1E
  Gene Name: casein kinase 1, epsilon
  ENST ID: ENST00000451964
  CDS Start-End: 1-812
tggggatcccgtccatcaagtggtgcggagctgagggcgactacaacgtgatggtcatggagctgctggggcctagcctcgaggacctgttcaacttctgttcccgcaaattcagcctcaagacggtgctgctcttggccgaccagatgatcagccgcatcgagtatatccactccaagaacttcatccaccgggacgtcaagcccgacaacttcctcatggggctggggaagaagggcaacctggtctacatcatcgacttcggcctggccaagaagtaccgggacgcccgcacccaccagcacattccctaccgggaaaacaagaacctgaccggcacggcccgctacgcttccatcaacacgcacctgggcattgagcaaagccgtcgagatgacctggagagcctgggctacgtgctcatgtacttcaacctgggctccctgccctggcaggggctcaaagcagccaccaagcgccagaagtatgaacggatcagcgagaagaagatgtcaacgcccatcgaggtcctctgcaaaggctatccctccgaattctcaacatacctcaacttctgccgctccctgcggtttgacgacaagcccgactactcttacctacgtcagctcttccgcaacctcttccaccggcagggcttctcctatgactacgtctttgactggaacatgctgaaattcggggcttcctcgagccaggctcagccccgtgacagccccatgacagcgaagggacctttctgtccccgcccctgtccctgtgctgggcccacgtactcacccacgtactggtaaggatcctctgaggtctggcttttccaaaatttgccacttgaccagtgagcgcaagaggctg

SEQ ID NO: 114534 - DNA, 763 bp, Homo sapiens
  Payload ID: 2393
  Gene Symbol: CSNK1E
  Gene Name: casein kinase 1, epsilon
  ENST ID: ENST00000431632
  CDS Start-End: 1-433
ccgcaacctcttccaccggcagggcttctcctatgactacgtctttgactggaacatgctgaaattcggtgcagcccggaatcccgaggatgtggaccgggagcggcgagaacacgaacgcgaggagaggatggggcagctacgggggtccgcgacccgagccctgccccctggcccacccacgggggccactgccaaccggctccgcagtgccgccgagcccgtggcttccacgccagcctcccgcatccagccggctggcaatacttctcccagagcgatctcgcgggtcgaccgggagaggaaggtgagtatgaggctgcacaggggtgcgcccgccaacgtctcctcctcagacctcactgggcggcaagaggtctcccggatcccagcctcacagacaagtgtgccatttgaccatctcgggaagtgaggagagcccccattggaccagtgtttgcttaggcagtagtccgacacgtcgggggactcaactttacactgggacaatctgtgtgtggtctgttttgtagaaattcatccacacaagagagtggaggcatgaacagggctggccttcctcggatctcaggcccaggaaccaagctgtccatggcgggctgggcagatatttgggggtggggtggggagatgctcaccaggagggcagagaagggagagaatccgtttctgtcacatgaagatggatctcctagcgtgctgggccttgagccaggctctggggcccagagggagatagacc

SEQ ID NO: 114535 - DNA, 1631 bp, Homo sapiens
  Payload ID: 2393
  Gene Symbol: CSNK1E
  Gene Name: casein kinase 1, epsilon
  ENST ID: ENST00000413574
  CDS Start-End: 265-1275
ggggcgggcgggcgggcaggaggccgggaggagggaggcggcggcggcggcggcggcggcggcgagagcccagagccagagcccggccggggccgagcggagcgcggcggcggcggcggcggcggcggctgggccgggagaggctggcgcgccgggcggctccgcgaatcctccggcatccgccccggcgggccgcccccgcccgcggcagccccccgagcagtggcccggcatcggcgccttcccggcgggcaagagtgagccatggagctacgtgtggggaacaagtaccgcctgggacggaagatcgggagcgggtccttcggagatatctacctgggtgccaacatcgcctctggtgaggaagtcgccatcaagctggagtgtgtgaagacaaagcacccccagctgcacatcgagagcaagttctacaagatgatgcagggtggcgtggggatcccgtccatcaagtggtgcggagctgagggcgactacaacgtgatggtcatggagctgctggggcctagcctcgaggacctgttcaacttctgttcccgcaaattcagcctcaagacggtgctgctcttggccgaccagatgatcagccgcatcgagtatatccactccaagaacttcatccaccgggacgtcaagcccgacaacttcctcatggggctggggaagaagggcaacctggtctacatcatcgacttcggcctggccaagaagtaccgggacgcccgcacccaccagcacattccctaccgggaaaacaagaacctgaccggcacggcccgctacgcttccatcaacacgcacctgggcattgagcaaagccgtcgagatgacctggagagcctgggctacgtgctcatgtacttcaacctgggctccctgccctggcaggggctcaaagcagccaccaagcgccagaagtatgaacggatcagcgagaagaagatgtcaacgcccatcgaggtcctctgcaaaggctatccctccgaattctcaacatacctcaacttctgccgctccctgcggtttgacgacaagcccgactactcttacctacgtcagctcttccgcaacctcttccaccggcagggcttctcctatgactacgtctttgactggaacatgctgaaattcgccaggagcacctctccacccactgctgctggtctgaccgccttcctggaagtccctcttgaggcaggccctggagttagaagctgggcagaggcacccacagccttatcctttgccaatctctgactcaatgccacggccactgtagtgagctgaaccacctccagcagtcccctggcagaagcacctggaaaacatgcaatgggaaccttcaccctgaggccaggcccttcccatgctacccaacagtagacaggacaccctgtgttgttggctgcaccggggtgctgggatctgtggatccctggggcctggaagccactctcagcacatacagccactgtgttccgaggtccagtcagctggccgggaaggaattcaacacagccaaggacagaggtccatatgatgacgggtggatgctcgtgtgactttgctgaccttttatgttttctatgggcaataaaggccaagagagctcc

SEQ ID NO: 114536 - DNA, 814 bp, Homo sapiens
  Payload ID: 2393
  Gene Symbol: CSNK1E
  Gene Name: casein kinase 1, epsilon
  ENST ID: ENST00000431611
  CDS Start-End: 1-355
acggcccgctacgcttccatcaacacgcacctgggcattgagcaaagccgtcgagatgacctggagagcctgggctacgtgctcatgtacttcaacctgggctccctgccctggcaggggctcaaagcagccaccaagcgccagaagtatgaacggatcagcgagaagaagatgtcaacgcccatcgaggtcctctgcaaaggctatccctccgaattctcaacatacctcaacttctgccgctccctgcggtttgacgacaagcccgactactcttacctacgtcagctcttccgcaacctcttccaccggcagggcttctcctatgactacgtctttgactggaacatgctgaaattcatgcggcccccttcctgccagccccctgcccttccctgtggacggccccaggatgaactagggtgcagcccggaatcccgaggatgtggaccgggagcggcgagaacacgaacgcgaggagaggatggggcagctacgggggtccgcgacccgagccctgccccctggcccacccacgggggccactgccaaccggctccgcagtgccgccgagcccgtggcttccacgccagcctcccgcatccagccggctggcaatacttctcccagagcgatctcgcgggtcgaccgggagaggaaggtgagtatgaggctgcacaggggtgcgcccgccaacgtctcctcctcagacctcactgggcggcaagaggtctcccggatcccagcctcacagacaagtgtgccatttgaccatctcgggaagtgaggagagcccccattggaccagtgtttg

SEQ ID NO: 114537 - DNA, 996 bp, Homo sapiens
  Payload ID: 2393
  Gene Symbol: CSNK1E
  Gene Name: casein kinase 1, epsilon
  ENST ID: ENST00000430335
  CDS Start-End: 322-996
ggggacgaggaggagggggcctgttattttgcaggctcgcgggggaggccccccggccggcctgcctccgcttccccccgctgggccctccgaggccccggccggccaggcggccaccccggctgtgatttggggacgctgagggagggggcttggggtgctgggcgccggatactgttgattcgggcccgcgtagcgtttcatcggacaatcaccggcgccccctgctctcccggccccggcgcccggacctgggggttcgcaaggctgcgcccgctcgttggatgacgggcgtttgggggtcctaagcaagagtgagccatggagctacgtgtggggaacaagtaccgcctgggacggaagatcgggagcgggtccttcggagatatctacctgggtgccaacatcgcctctggtgaggaagtcgccatcaagctggagtgtgtgaagacaaagcacccccagctgcacatcgagagcaagttctacaagatgatgcagggtggcgtggggatcccgtccatcaagtggtgcggagctgagggcgactacaacgtgatggtcatggagctgctggggcctagcctcgaggacctgttcaacttctgttcccgcaaattcagcctcaagacggtgctgctcttggccgaccagatgatcagccgcatcgagtatatccactccaagaacttcatccaccgggacgtcaagcccgacaacttcctcatggggctggggaagaagggcaacctggtctacatcatcgacttcggcctggccaagaagtaccgggacgcccgcacccaccagcacattccctaccgggaaaacaagaacctgaccggcacggcccgctacgcttccatcaacacgcacctgggcattgagcaaagccgtcgagatgacctggagagcctgggctacgtgctcatgtacttcaacctgggctccctgccctggcaggggctcaaagcagccaccaagcgccagaagtat

SEQ ID NO: 114538 - DNA, 8179 bp, Homo sapiens
  Payload ID: 2394
  Gene Symbol: CSNK1G1
  Gene Name: casein kinase 1, gamma 1
  Uniprot ID: Q9HCP0
  ENST ID: ENST00000303052
  CDS Start-End: 497-1765
gtcagtttaacgctgcctgcccaaagtttgtcctattaggcccgccagggtactctgcgactccgggacgagggcggggccgcgctagtggttccggttcggctccagccgcccctcggctcctcgccttccccctcccgtccgccttctcccctccctcccgctcctgggaaagagagaaaccaccgctgcgggtgggtagagaagcacttggcgcctcggggaggggaccgcgcccgcctcatttgcgccttgcagcactgctggaccaggttacaagatgttcacctaagattgagacctagtgactacatttcctacgggaacaaataaatggtttttcatctcccggagatacattacaaacaaatatggtgctaaaagaactccttacctttctctgactacaatttatttggacatacttttgtattgaagagaggtatacatactgaagctacttgctgtactataggagactctgtcctgtaggatcatggaccatcctagtagggaaaaggatgaaagacaacggacaactaaacccatggcacaaaggagtgcacactgctctcgaccatctggctcctcatcgtcctctggggttcttatggtgggacccaacttcagggttggcaagaagataggatgtgggaacttcggagagctcagattaggtaaaaatctctacaccaatgaatatgtagcaatcaaactggaaccaataaaatcacgtgctccacagcttcatttagagtacagattttataaacagcttggcagtgcaggtgaaggtctcccacaggtgtattactttggaccatgtgggaaatataatgccatggtgctggagctccttggccctagcttggaggacttgtttgacctctgtgaccgaacatttactttgaagacggtgttaatgatagccatccagctgctttctcgaatggaatacgtgcactcaaagaacctcatttaccgagatgtcaagccagagaacttcctgattggtcgacaaggcaataagaaagagcatgttatacacattatagactttggactggccaaggaatacattgaccccgaaaccaaaaaacacataccttatagggaacacaaaagtttaactggaactgcaagatatatgtctatcaacacgcatcttggcaaagagcaaagccggagagatgatttggaagccctaggccatatgttcatgtatttccttcgaggcagcctcccctggcaaggactcaaggctgacacattaaaagagagatatcaaaaaattggtgacaccaaaaggaatactcccattgaagctctctgtgagaactttccagaggagatggcaacctaccttcgatatgtcaggcgactggacttctttgaaaaacctgattatgagtatttacggaccctcttcacagacctctttgaaaagaaaggctacacctttgactatgcctatgattgggttgggagacctattcctactccagtagggtcagttcacgtagattctggtgcatctgcaataactcgagaaagccacacacatagggatcggccatcacaacagcagcctcttcgaaatcaggtggttagctcaaccaatggagagctgaatgttgatgatcccacgggagcccactccaatgcaccaatcacagctcatgccgaggtggaggtagtggaggaagctaagtgctgctgtttctttaagaggaaaaggaagaagactgctcagcgccacaagtgaccagtgcctcccaggagtcctcaggccctggggactctgactcaattgtacctgcagctcctgccatttctcattggaagggactcctctttgggggagggtggatatccaaaccaaaaagaagaaaacagatgcccccagaaggggccagtgcgggcagccagggcctagtgggtcattggccatctccgcctgcctaaggctctgagcaggtcccagagctgctgttcctccactgcttgcccatagggctgcctggttgactctccttcccattgtttacagtgaaggtgtcattcacaaaaactcaaggactgctattctccttcttccccttagtttactcctggtttttaccccaccctcaaccctctccagcataaaacctagtgagctaaaggctttgtctgcagaaggagatcaagaggctgggggtaaggccaagaaggtaggaggaaaatggcagacctgggctggagaagaaccttctccgtatcccaggtgtgcctggcagtatggtttcctcttcctctgtgcctgtgcagcattcatcccagctggccttggggttcaggttccttcttccctccctcctgtgaagttacactgtaggacacaagctgtgagcaatctgcagtctactgtccctgtgtgttggcgttcttagcttttttgacaaactcttttctccaggtagtaggacaatgaaaattgttctaagcaaaggaaagaaaactgactttgttgcacttttagtttttttaaaaaaaacaaaaacaaaaacatggcagatgcatattgtgtctggttatattgggggttttacttttacctgttttgagggggatggggccggccaagccattcagagagaacatgggtccagaggacattctcagtggaaagagtttgatctgcagcacccagaagagaagccaaactcggtgtcattctgagtgaacactcaggttggcaagaaaacatacttgaattttcattcatcttctcagcagctgaagaatgtccctaccagagcatcttgacctaatcagcttacagtttgaaaacctagctctccagaacatgagatgagccagccgagccagactgtgaccaggaaacagctcatcccagagaaggagatgcttaacaaaaaaaaattgaaattgtttcccatgctgccagggacttccaactagatagccatgtgacgtcctggtgacttgggggaaaaattagtgatgaaacagccaccaccatattgccattagtggaaaaaaagaggacagtgaacctgccttccacctgccagagggacctcagggtgtggcattatagggccaggaaaagaaaatcggtgtatcctatctgccccaatagctgagctgtagcatttgggctggcctgccttatcagaaaccaagcttatgaagatcttctcccagcaggtccatagcagtaggcttaggatgcagtatatggggccgcatttaaaaggagggaaagattgtttggtgctggaacattccagggaaaaggagactggaatgaaaggtctgaaattatcttctcaattggactccttccagaaaggtggccgtgcctctaagcatgtttttcccagtatgccctaggcctccccccatggtgttttcatatgaggtactactgtgaaggatctggttcctcattcactgtttgacaagtctttcatgtgtggagttactcttctcatgcccaattttcatttgagtttagtggcttaaccaaacaatgactcctcattccagcggtgacagaagagaaagggtcatttacatcaggaaagaggtcttgtatctgggagtagagagctaaccatggagcacagtggctggtgggtgacttagtctgatggtttgtggaccatagaagtcttcacctctggtttgaggtgcagggctgtcttttgtactggagggtgtggggatattttctgatagttgccatttcttgaaaaattcccttgatgtaccttacacagagcagaaataacattaacatggatcagaggtactgggcttcatctgttccattggaccttggctagggaatatcatttcactggcatcaaacctgcttagcttatgaaaagatggtaatatgtcatttctataaatgtttctatatatgaaacataaagtggcagggagatacaatatcacaccccttccccacaaggactgtgaatattgggatttatgtccttgccattacctagtggttacagccctatcactaaaatttacatcgtttctcagttgggatttgggcattgctaacttactgtatagaaagtttaacttttcctcacccctgtatagaaaatgccttgcctctcaagagagggcagagggggggccaggtgcagtggctcacgcctgtaatcccagcagtttgggaggccaaggcaagtggatcatgtgaggtcaagagttcgagaccagcctggccaacatggtgaaaccccgtctctacaaaaaatacaaaaattagctgggcatggtggcatgctcccgtagtcccagctactcgggaggctgaggcaggagaatcacttgagcctgggaggcagaagttgcagtgagccgagatcgcaccactgcactccagcctgggcaacagagtgagactctgtctaaaaagaaaaaaaaaaaagggcagagggaaatggtgggaatgcctggagcatcctggcactctatactctactgagtgcctctcttcagcccctcaccctgcttccacacacacacacacaaaagcaaaggcactgaccagcttggctgcagggcaagctgccttgcagctggatttgcgactttttttttgtcttaaaatttttactggatcagttgtaggggactgtacttcctaagacactgttctcaccttccaacctcacaaatctcttactagatatttggtttttataacaagggtaaagaatcccaggtccctttagcatgcagagtaatggtgatccctccagagccattggcacttcaaagtggtcccagacctgggagattctggtgggatcttccttaaaaataagcaaaaaacctgagtaccctagatgcaattggccatttgtttcaggcccatcagcgaatcagggctccctcctcaaccctactgctacagttccttagctgtatgcctcagccagatccttggggttagggcatgcactcgctgactgtccccacccatccacttgctctgtagtttctgagctttctccatttcacaagtatggtgcctaacgatctttttctttaggattgatgcagttgtttttcctgaaagctaactcagcatctattcataaaaacccttaatagtatacattaggagttttcccaagctctacagtccctcagacattgcatcctaaacagatttgaggcacacaggccaagactccaccaaggcataaatggtcccccctactcccttttgaccagggtatcacttgtgtctctgcagtaagagttggtcaagttgctctacgcaccttggtgctttccagagatctcactccagactgcccccaagggtggatagagtatcctgacagccagtgtgcactcatgactgccttaattaacattcttctgctattatggagcctgtccagcaataaacagggtctaggaaggtacaagattagcttccagttaaaatcccattttatattggaatgcatgagctacagatgacagcagagatcctgaggtttctagacatgttgattgtctcttttttctaaatgaactccaagtacttagaaaacagtccctgtccatcagccagaaaaggtgaccatcacccctaaagtaatttccaaacttagttcagtgggaagatatgctggtagtgcatattcagtgttgattttcagtgctagtaaccacttttaatgccagaaatatgtaacaatgataatgtaacgtcaaagtggttactaaagattatagccttaacttttttatgtaaaagataaaatccattcctcctcccagtgagcaagcatggcttgcatttctcaaaaatgagaacttccatggcagccaagaaaacgtcttctcagaggaactttcgtttgatgcatctcccaagcccacatgcctcctgtgttccagccacctcttccatttcacatttaaaccagctctccattcccattgagttgccctaacaacattgtctccagtgtcagaaccatattaaggttcgtttctcagattgggagcctgcaacaccatacagccaacattgcctttgccacgccactgccaccatccccaccattgccctatggtgggcagatgaattccagaaaccctcagggagccaggataattaggcaacccatctgaattggccacgtaagtgacaggcacttatctctcgggttcttgcttttgcagactccagggaagtcctgtctagaggtcgatggcagagactcctagtctttcccatgaggggttgataggaatcaaattgggattcctttggctttgggttttgtttttttgttgttgtttttggttttcagtttgttttttggtgtatggggggtgattttgtttctgaataagaaaaagaagaggcaaccatggcccttatgtgggtttatcctttttgagcaatgttttagccacaagtaaggaatcttgaaagtcttttgtccagcaagcagtcttaaaaatgtttttcctaactccttttgcaggtgactaagtacaaaaaaatagttttctcattgtattcaaaatagtgagtaggttccctggataatacacagtggtagttgacatattttctcaaaacacaaccagaaaacccacttccggtatttgtaaatcacctttcaagggaaaaagtgaacacgtattccttgtatttctagtttgattaccaaacctgatgttacaaagaaacctccgttctgtagacagaatttcttttatttttcttcttttactcctcacaatcactttcccagtgccatcaccatctataaggtctcagagcagaggattattcatggtaataagtgggggtgtggtgcagccattccagtaacacccacaagaggacagctgttctgaatgtccccacccacccctctttcagtacaggtgagacattttcagttcatgagctccagaccaaatcccaggccagcccttgcaccaaaagccttttttagaaggcttatcagtctattaggaatgtctcaggaaagatgagccatttctttggggagaaatatatttacagatggaagtgtgtgactgcgtgtctgtgtgtgtgtgtggtgtgtgtgcgcacgtgagtgcgtgtgttcatctatgtgcatttcacttccataaagacccagcccaagctgctgggaaccatgtgttcctgagtattctcagaggttaaacaagtgacaagtgagcttctgaaattagtgtctcagcaagctggctttaggaatgagccccattttatcaagcagagaaaaaaaataacagcagaaaagataaagataaaccaaaaatatataccccccaatggaaaataatgttgattcagcaattcccataggatgtattacatgctctaatttattatattattatttatctgtctttgatctttgcccattgtactcttaaaaagatgttgggatgttgattgcgatttttaaacaactagataatgtataaatcagcagtggaaatcagttttaatgtgtggatgtgtctgattattgttaaatgcctctttttttactttttttttttttagatgtataatgtttcataaaccctggcactggtcacaaagctcagctgtgaaaatgaaatttgtagtatttttaaacatgaatgtcaatttcaagtgtatttgaaatggttcctccaggagagatatttgtgcaccattaggaaaatcttctctgcagaggaagtagccttctttggagaaaatggaaaatgggttctgatatgtgatctcagagtagcccatttcctagggcaccatggaaaacacaaatgtgatctttaagtatacctcttccccagtttggggaggaaaggactcagtttgcaccctttttgtatgtaaaataaaatgtcttacctttcttggctacttctgcttgtttggttggttgattggtttgtctgtttttaatctccctcggctcatttgtaattaacaatctagctaggactaactttgatgcgattcaagactcctgtgaacaaaaataatttggcattcttgtttcattccttggattaaatattgtcttctcctgtgagtcacttcaaaaataaatactgctgtctctcttcgagtgctgaa

SEQ ID NO: 114539 - DNA, 1950 bp, Homo sapiens
  Payload ID: 2394
  Gene Symbol: CSNK1G1
  Gene Name: casein kinase 1, gamma 1
  Uniprot ID: Q9HCP0
  ENST ID: ENST00000606225
  CDS Start-End: 129-1310
aatatggtgctaaaagaactccttacctttctctgactacaatttatttggacatacttttgtattgaagagaggtatacatactgaagctacttgctgtactataggagactctgtcctgtaggatcatggaccatcctagtagggaaaaggatgaaagacaacggacaactaaacccatggcacaaaggagtgcacactgctctcgaccatctggctcctcatcgtcctctggggttcttatggtgggacccaacttcagggttggcaagaagataggatgtgggaacttcggagagctcagattaggtaaaaatctctacaccaatgaatatgtagcaatcaaactggaaccaataaaatcacgtgctccacagcttcatttagagtacagattttataaacagcttggcagtgcaggtgaaggtctcccacaggtgtattactttggaccatgtgggaaatataatgccatggtgctggagctccttggccctagcttggaggacttgtttgacctctgtgaccgaacatttactttgaagacggtgttaatgatagccatccagctgctttctcgaatggaatacgtgcactcaaagaacctcatttaccgagatgtcaagccagagaacttcctgattggtcgacaaggcaataagaaagagcatgttatacacattatagactttggactggccaaggaatacattgaccccgaaaccaaaaaacacataccttatagggaacacaaaagtttaactggaactgcaagatatatgtctatcaacacgcatcttggcaaagagcaaagccggagagatgatttggaagccctaggccatatgttcatgtatttccttcgaggcagcctcccctggcaaggactcaaggctgacacattaaaagagagatatcaaaaaattggtgacaccaaaaggaatactcccattgaagctctctgtgagaactttccagaggagatggcaacctaccttcgatatgtcaggcgactggacttctttgaaaaacctgattatgagtatttacggaccctcttcacagacctctttgaaaagaaaggctacacctttgactatgcctatgattgggttgggagacctattcctactccagtagggtcagttcacgtagattctggtgcatctgcaataactcgagaaagccacacacatagggatcggccatcacaacagcagcctcttcgaaatcagagccttaggactgttacagctgagcattatgatgttaacaactcagccatctggcacaggggaagaggcacctaaacagattcttctggacaaaagtcacatatgagcaagatcagaatagtagcagatgtaaaaagcagaatgtatcatcagagcgccgaggagagtgggaaattcagcccagccggcagaccaatacctcatacctaacgtctcacttggctgcagaccgccatgggggatcagtgcaggtggttagctcaaccaatggagagctgaatgttgatgatcccacgggagcccactccaatgcaccaatcacagctcatgccgaggtggaggtagtggaggaagctaagtgctgctgtttctttaagaggaaaaggaagaagactgctcagcgccacaagtgaccagtgcctcccaggagtcctcaggccctggggactctgactcaattgtacctgcagctcctgccatttctcattggaagggactcctctttgggggagggtggatatccaaaccaaaaagaagaaaacagatgcccccagaaggggccagtgcgggcagccagggcctagtgggtcattggccatctccgcctgcctaaggctctgagcaggtcccagagctgctgttcctccactgcttgcccatagggctgcctggttgactctccttcccattgtttacagtgaaggtgtcattcaca

SEQ ID NO: 114540 - DNA, 1654 bp, Homo sapiens
  Payload ID: 2394
  Gene Symbol: CSNK1G1
  Gene Name: casein kinase 1, gamma 1
  ENST ID: ENST00000606793
  CDS Start-End: 293-1561
ttgcattagtgtggtacatgaggacagttgtgaggccagtgcacttttggctcagtgggaatgaatgggttacaagatgttcacctaagattgagacctagtgactacatttcctacgggaacaaataaatggtttttcatctcccggagatacattacaaacaaatatggtgctaaaagaactccttacctttctctgactacaatttatttggacatacttttgtattgaagagaggtatacatactgaagctacttgctgtactataggagactctgtcctgtaggatcatggaccatcctagtagggaaaaggatgaaagacaacggacaactaaacccatggcacaaaggagtgcacactgctctcgaccatctggctcctcatcgtcctctggggttcttatggtgggacccaacttcagggttggcaagaagataggatgtgggaacttcggagagctcagattaggtaaaaatctctacaccaatgaatatgtagcaatcaaactggaaccaataaaatcacgtgctccacagcttcatttagagtacagattttataaacagcttggcagtgcaggtgaaggtctcccacaggtgtattactttggaccatgtgggaaatataatgccatggtgctggagctccttggccctagcttggaggacttgtttgacctctgtgaccgaacatttactttgaagacggtgttaatgatagccatccagctgctttctcgaatggaatacgtgcactcaaagaacctcatttaccgagatgtcaagccagagaacttcctgattggtcgacaaggcaataagaaagagcatgttatacacattatagactttggactggccaaggaatacattgaccccgaaaccaaaaaacacataccttatagggaacacaaaagtttaactggaactgcaagatatatgtctatcaacacgcatcttggcaaagagcaaagccggagagatgatttggaagccctaggccatatgttcatgtatttccttcgaggcagcctcccctggcaaggactcaaggctgacacattaaaagagagatatcaaaaaattggtgacaccaaaaggaatactcccattgaagctctctgtgagaactttccagaggagatggcaacctaccttcgatatgtcaggcgactggacttctttgaaaaacctgattatgagtatttacggaccctcttcacagacctctttgaaaagaaaggctacacctttgactatgcctatgattgggttgggagacctattcctactccagtagggtcagttcacgtagattctggtgcatctgcaataactcgagaaagccacacacatagggatcggccatcacaacagcagcctcttcgaaatcagccaaggtctttaacaagcagagtgttttgtccagcagtgaggccccttttcccacttcccagcacccacataaacaggaataatgtgctggaaatgaaaccaggtggcagaagcagctacacatgcaagagaagcctgattgggtccacattaaccagatgacaggagtgagagccttcacttacatttcggggaccatcagtgagaactgggatggcagtgaacctgaaataaagatcgttgaaataagactgg

SEQ ID NO: 114541 - DNA, 2083 bp, Homo sapiens
  Payload ID: 2394
  Gene Symbol: CSNK1G1
  Gene Name: casein kinase 1, gamma 1
  ENST ID: ENST00000607537
  CDS Start-End: 411-1838
agtggttccggttcggctccagccgcccctcggctcctcgccttccccctcccgtccgccttctcccctccctcccgctcctgggaaagagagaaaccaccgctgcgggtgggtagagaagcacttggcgcctcggggaggggaccgcgcccgcctcatttgcgccttgcagcactgctggaccaggttacaagatgttcacctaagattgagacctagtgactacatttcctacgggaacaaataaatggtttttcatctcccggagatacattacaaacaaatatggtgctaaaagaactccttacctttctctgactacaatttatttggacatacttttgtattgaagagaggtatacatactgaagctacttgctgtactataggagactctgtcctgtaggatcatggaccatcctagtagggaaaaggatgaaagacaacggacaactaaacccatggcacaaaggagtgcacactgctctcgaccatctggctcctcatcgtcctctggggttcttatggtgggacccaacttcagggttggcaagaagataggatgtgggaacttcggagagctcagattaggtaaaaatctctacaccaatgaatatgtagcaatcaaactggaaccaataaaatcacgtgctccacagcttcatttagagtacagattttataaacagcttggcagtgcaggtgaaggtctcccacaggtgtattactttggaccatgtgggaaatataatgccatggtgctggagctccttggccctagcttggaggacttgtttgacctctgtgaccgaacatttactttgaagacggtgttaatgatagccatccagctgctttctcgaatggaatacgtgcactcaaagaacctcatttaccgagatgtcaagccagagaacttcctgattggtcgacaaggcaataagaaagagcatgttatacacattatagactttggactggccaaggaatacattgaccccgaaaccaaaaaacacataccttatagggaacacaaaagtttaactggaactgcaagatatatgtctatcaacacgcatcttggcaaagagcaaagccggagagatgatttggaagccctaggccatatgttcatgtatttccttcgaggcagcctcccctggcaaggactcaaggctgacacattaaaagagagatatcaaaaaattggtgacaccaaaaggaatactcccattgaagctctctgtgagaactttccagaggagatggcaacctaccttcgatatgtcaggcgactggacttctttgaaaaacctgattatgagtatttacggaccctcttcacagacctctttgaaaagaaaggctacacctttgactatgcctatgattgggttgggagacctattcctactccagtagggtcagttcacgtagattctggtgcatctgcaataactcgagaaagccacacacatagggatcggccatcacaacagcagcctcttcgaaatcagaatgtatcatcagagcgccgaggagagtgggaaattcagcccagccggcagaccaatacctcatacctaacgtctcacttggctgcagaccgccatgggggatcagtgcaggtggttagctcaaccaatggagagctgaatgttgatgatcccacgggagcccactccaatgcaccaatcacagctcatgccgaggtggaggtagtggaggaagctaaatgtataatgtttcataaaccctggcactggtcacaaagctcagctgtgaaaatgaaatttgtagtatttttaaacatgaatgtcaatttcaagtgtatttgaaatggttcctccaggagagatatttgtgcaccattaggaaaatcttctctgcagaggaagtagccttctttggagaaaatggaaaatgggttctgatatgtgatctcagagtagcccatttcctagggcaccatggaaaacacaaatgtgatctttaagtatacctcttccccagtttggggaggaaaggactcagtttgcaccctttttgtatgtaaaataaaatgtcttacctttcttggcta

SEQ ID NO: 114542 - DNA, 1756 bp, Homo sapiens
  Payload ID: 2394
  Gene Symbol: CSNK1G1
  Gene Name: casein kinase 1, gamma 1
  ENST ID: ENST00000561349
  CDS Start-End: 199-1515
gacctagtgactacatttcctacgggaacaaataaatggtttttcatctcccggagatacattacaaacaaatatggtgctaaaagaactccttacctttctctgactacaatttatttggacatacttttgtattgaagagaggtatacatactgaagctacttgctgtactataggagactctgtcctgtaggatcatggaccatcctagtagggaaaaggatgaaagacaacggacaactaaacccatggcacaaaggagtgcacactgctctcgaccatctggctcctcatcgtcctctggggttcttatggtgggacccaacttcagggttggcaagaagataggatgtgggaacttcggagagctcagattaggtaaaaatctctacaccaatgaatatgtagcaatcaaactggaaccaataaaatcacgtgctccacagcttcatttagagtacagattttataaacagcttggcagtgcaggtgaaggtctcccacaggtgtattactttggaccatgtgggaaatataatgccatggtgctggagctccttggccctagcttggaggacttgtttgacctctgtgaccgaacatttactttgaagacggtgttaatgatagccatccagctgctttctcgaatggaatacgtgcactcaaagaacctcatttaccgagatgtcaagccagagaacttcctgattggtcgacaaggcaataagaaagagcatgttatacacattatagactttggactggccaaggaatacattgaccccgaaaccaaaaaacacataccttatagggaacacaaaagtttaactggaactgcaagatatatgtctatcaacacgcatcttggcaaagagcaaagccggagagatgatttggaagccctaggccatatgttcatgtatttccttcgaggcagcctcccctggcaaggactcaaggctgacacattaaaagagagatatcaaaaaattggtgacaccaaaaggaatactcccattgaagctctctgtgagaactttccagaggagatggcaacctaccttcgatatgtcaggcgactggacttctttgaaaaacctgattatgagtatttacggaccctcttcacagacctctttgaaaagaaaggctacacctttgactatgcctatgattgggttgggagacctattcctactccagtagggtcagttcacgtagattctggtgcatctgcaataactcgagaaagccacacacatagggatcggccatcacaacagcagcctcttcgaaatcaggtggttagctcaaccaatggagagctgaatgttgatgatcccacgggagcccactccaatgcaccaatcacagctcatgccgaggtggaggtagtggaggaagctaaatgtataatgtttcataaaccctggcactggtcacaaagctcagctgtgaaaatgaaatttgtagtatttttaaacatgaatgtcaatttcaagtgtatttgaaatggttcctccaggagagatatttgtgcaccattaggaaaatcttctctgcagaggaagtagccttctttggagaaaatggaaaatgggttctgatatgtgatctcagagtagcccatttcctagggcaccatggaaaacacaaatgtgatctttaagtatacctcttccccagtttggggaggaaaggactcagtttgcaccctttttgtatgtaaaataaaatgtcttacctttcttg

SEQ ID NO: 114543 - DNA, 615 bp, Homo sapiens
  Payload ID: 2394
  Gene Symbol: CSNK1G1
  Gene Name: casein kinase 1, gamma 1
  ENST ID: ENST00000634909
  CDS Start-End: 1-522
gcaacctaccttcgatatgtcaggcgactggacttctttgaaaaacctgattatgagtatttacggaccctcttcacagacctctttgaaaagaaaggctacacctttgactatgcctatgattgggttgggagacctattcctactccagtagggtcagttcacgtagattctggtgcatctgcaataactcgagaaagccacacacatagggatcggccatcacaacagcagcctcttcgaaatcagaatgtatcatcagagcgccgaggagagtgggaaattcagcccagccggcagaccaatacctcatacctaacgtctcacttggctgcagaccgccatgggggatcagtgcagccaaggtctttaacaagcagagtgttttgtccagcagtgaggccccttttcccacttcccagcacccacataaacaggaataatgtgctggaaatgaaaccaggtggcagaagcagctacacatgcaagagaagcctgattgggtccacattaaccagatgacaggagtgagagccttcacttacatttcggggaccatcagtgagaactgggatggcagtgaacctgaaataaagatcgttgaaataagactgg

SEQ ID NO: 114544 - DNA, 799 bp, Homo sapiens
  Payload ID: 2394
  Gene Symbol: CSNK1G1
  Gene Name: casein kinase 1, gamma 1
  ENST ID: ENST00000635324
  CDS Start-End: 134-478
aaacaaatatggtgctaaaagaactccttacctttctctgactacaatttatttggacatacttttgtattgaagagaggtatacatactgaagctacttgctgtactataggagactctgtcctgtaggatcatggaccatcctagtagggaaaaggatgaaagacaacggacaactaaacccatggcacaaaggagtgcacactgctctcgaccatctggctcctcatcgtcctctggggttcttatggtgggacccaacttcagggttggcaagaagataggatgtgggaacttcggagagctcagattaggtaaaaatctctacaccaatgaatatgtagcaatcaaactggtgaaggtctcccacaggtgtattactttggaccatgtgggaaatataatgccatggtgctggagctccttggccctagcttggaggacttgtttgacctctgtgaccgaacatttactttgaagacggtgttaatgatagccatccagctgctttctcgaatggaatacgtgcactcaaagaacctcatttaccgagatgtcaagccagagaacttcctgattggtcgacaaggcaataagaaagagcatgttatacacattatagactttggactggccaaggaatacattgaccccgaaaccaaaaaacacataccttatagggaacacaaaagtttaactggaactgcaagatatatgtctatcaacacgcatcttggcaaagagcaaagccggagagatgatttggaagccctaggccatatgttcatgtatttccttc

SEQ ID NO: 114545 - DNA, 790 bp, Homo sapiens
  Payload ID: 2394
  Gene Symbol: CSNK1G1
  Gene Name: casein kinase 1, gamma 1
  ENST ID: ENST00000635514
  CDS Start-End: 376-790
acaccaaagggctttattcggccgggagcatcagcaaacttaggtctcaaaaaaccaagctctccaagtgagcaattcctgtcccttttaagggcttacaactgtaagggggtccacgtaagagggtcatgatcgattgagcaagcagggggttacaagatgttcacctaagattgagacctagtgactacatttcctacgggaacaaataaatggtttttcatctcccggagatacattacaaacaaatatggtgctaaaagaactccttacctttctctgactacaatttatttggacatacttttgtattgaagagaggtatacatactgaagctacttgctgtactataggagactctgtcctgtaggatcatggaccatcctagtagggaaaaggatgaaagacaacggacaactaaacccatggcacaaaggagtgcacactgctctcgaccatctggctcctcatcgtcctctggggttcttatggtgggacccaacttcagggttggcaagaagataggatgtgggaacttcggagagctcagattaggtaaaaatctctacaccaatgaatatgtagcaatcaaactggaaccaataaaatcacgtgctccacagcttcatttagagtacagattttataaacagcttggcagtgcaggtgaaggtctcccacaggtgtattactttggaccatgtgggaaatataatgccatggtgctggagctccttggccctagcttggaggacttgtttgacctctgtgaccgaacatttactttga

SEQ ID NO: 114546 - DNA, 712 bp, Homo sapiens
  Payload ID: 2394
  Gene Symbol: CSNK1G1
  Gene Name: casein kinase 1, gamma 1
  ENST ID: ENST00000634302
  CDS Start-End: 1-615
caaaaaattggtgacaccaaaaggaatactcccattgaagctctctgtgagaactttccagaggagatggcaacctaccttcgatatgtcaggcgactggacttctttgaaaaacctgattatgagtatttacggaccctcttcacagacctctttgaaaagaaaggctacacctttgactatgcctatgattgggttgggagacctattcctactccagtagggtcagttcacgtagattctggtgcatctgcaataactcgagaaagccacacacatagggatcggccatcacaacagcagcctcttcgaaatcagaatgtatcatcagagcgccgaggagagtgggaaattcagcccagccggcagaccaatacctcatacctaacgtctcacttggctgcagaccgccatgggggatcagtgcaggtggttagctcaaccaatggagagctgaatgttgatgatcccacgggagcccactccaatgcaccaatcacagctcatgccgaggtggaggtagtggaggaagctaactgcctgaaaatgctcaacctgtggtgctgctgtttctttaagaggaaaaggaagaagactgctcagcgccacaagtgaccagtgcctcccaggagtcctcaggccctggggactctgactcaattgtacctgcagctcctgccatttctcattggaagggactcctctttggggg

SEQ ID NO: 114547 - DNA, 600 bp, Homo sapiens
  Payload ID: 2394
  Gene Symbol: CSNK1G1
  Gene Name: casein kinase 1, gamma 1
  ENST ID: ENST00000635414
  CDS Start-End: 1-204
gacctctttgaaaagaaaggctacacctttgactatgcctatgattgggttgggagacctattcctactccagtagggtcagttcacgtagattctggtgcatctgcaataactcgagaaagccacacacatagggatcggccatcacaacagcagcctcttcgaaatcaggtggactgttcccttgcaaattctccaatttgactaggaaaatatgaatcaaagatcagtaaagagtactgtttagttctgaccgaggctcagggtttgctagttgaaggggctaagtttgcgcagagataatctgcctccttgtgacctgcgtgcagtttcctaacatgctgcctgccatccagtaggagcacagacagagattgcacactcctcctggccacaggatggccacagctccacatagagctcagtgcaggagacgtctgcccctcctcatttctgggacctttactctgagaggagctttgaaacaagcaagtgcaaaactgaaaatagattccttagcgtcttctgttctatcacctagtcactgcggctcacctcttctcttaattctgtattccatattaaaagtttttttctttc

SEQ ID NO: 114548 - DNA, 2592 bp, Homo sapiens
  Payload ID: 2394
  Gene Symbol: CSNK1G1
  Gene Name: casein kinase 1, gamma 1
  ENST ID: ENST00000634811
  CDS Start-End: 419-1798
cttccccctcccgtccgccttctcccctccctcccgctcctgggaaagagagaaaccaccgctgcgggtgggtagagaagcacttggcgcctcggggaggggaccgcgcccgcctcatttgcgccttgcagcactgctggaccaggaggacagttgtgaggccagtgcacttttggctcagtgggaatgaatgggttacaagatgttcacctaagattgagacctagtgactacatttcctacgggaacaaataaatggtttttcatctcccggagatacattacaaacaaatatggtgctaaaagaactccttacctttctctgactacaatttatttggacatacttttgtattgaagagaggtatacatactgaagctacttgctgtactataggagactctgtcctgtaggatcatggaccatcctagtagggaaaaggatgaaagacaacggacaactaaacccatggcacaaaggagtgcacactgctctcgaccatctggctcctcatcgtcctctggggttcttatggtgggacccaacttcagggttggcaagaagataggatgtgggaacttcggagagctcagattaggtaaaaatctctacaccaatgaatatgtagcaatcaaactggaaccaataaaatcacgtgctccacagcttcatttagagtacagattttataaacagcttggcagtgcaggtgaaggtctcccacaggtgtattactttggaccatgtgggaaatataatgccatggtgctggagctccttggccctagcttggaggacttgtttgacctctgtgaccgaacatttactttgaagacggtgttaatgatagccatccagctgctttctcgaatggaatacgtgcactcaaagaacctcatttaccgagatgtcaagccagagaacttcctgattggtcgacaaggcaataagaaagagcatgttatacacattatagactttggactggccaaggaatacattgaccccgaaaccaaaaaacacataccttatagggaacacaaaagtttaactggaactgcaagatatatgtctatcaacacgcatcttggcaaagagcaaagccggagagatgatttggaagccctaggccatatgttcatgtatttccttcgaggcagcctcccctggcaaggactcaaggctgacacattaaaagagagatatcaaaaaattggtgacaccaaaaggaatactcccattgaagctctctgtgagaactttccagaggagatggcaacctaccttcgatatgtcaggcgactggacttctttgaaaaacctgattatgagtatttacggaccctcttcacagacctctttgaaaagaaaggctacacctttgactatgcctatgattgggttgggagacctattcctactccagtagggtcagttcacgtagattctggtgcatctgcaataactcgagaaagccacacacatagggatcggccatcacaacagcagcctcttcgaaatcagaatgtatcatcagagcgccgaggagagtgggaaattcagcccagccggcagaccaatacctcatacctaacgtctcacttggctgcagaccgccatgggggatcagtgcaggtggttagctcaaccaatggagagctgaatgttgatgatcccacgggagcccactccaatgcaccaatcacagctcatgccgaggtggaggtagtggaggaagctaagtgctgctgtttctttaagaggaaaaggaagaagactgctcagcgccacaagtgaccagtgcctcccaggagtcctcaggccctggggactctgactcaattgtacctgcagctcctgccatttctcattggaagggactcctctttgggggagggtggatatccaaaccaaaaagaagaaaacagatgcccccagaaggggccagtgcgggcagccagggcctagtgggtcattggccatctccgcctgcctaaggctctgagcaggtcccagagctgctgttcctccactgcttgcccatagggctgcctggttgactctccttcccattgtttacagtgaaggtgtcattcacaaaaactcaaggactgctattctccttcttccccttagtttactcctggtttttaccccaccctcaaccctctccagcataaaacctagtgagctaaaggctttgtctgcagaaggagatcaagaggctgggggtaaggccaagaaggtaggaggaaaatggcagacctgggctggagaagaaccttctccgtatcccaggtgtgcctggcagtatggtttcctcttcctctgtgcctgtgcagcattcatcccagctggccttggggttcaggttccttcttccctccctcctgtgaagttacactgtaggacacaagctgtgagcaatctgcagtctactgtccctgtgtgttggcgttcttagcttttttgacaaactcttttctccaggtagtaggacaatgaaaattgttctaagcaaaggaaagaaaactgactttgttgcacttttagtttttttaaaaaaaacaaaaacaaaaacatggcagatg

SEQ ID NO: 114549 - DNA, 5548 bp, Homo sapiens
  Payload ID: 2394
  Gene Symbol: CSNK1G1
  Gene Name: casein kinase 1, gamma 1
  ENST ID: ENST00000635142
  CDS Start-End: 225-1517
gttacaagatgttcacctaagattgagacctagtgactacatttcctacgggaacaaataaatggtttttcatctcccggagatacattacaaacaaatatggtgctaaaagaactccttacctttctctgactacaatttatttggacatacttttgtattgaagagaggtatacatactgaagctacttgctgtactataggagactctgtcctgtaggatcatggaccatcctagtagggaaaaggatgaaagacaacggacaactaaacccatggcacaaaggagtgcacactgctctcgaccatctggctcctcatcgtcctctggggttcttatggtgggacccaacttcagggttggcaagaagataggatgtgggaacttcggagagctcagattaggtaaaaatctctacaccaatgaatatgtagcaatcaaactggaaccaataaaatcacgtgctccacagcttcatttagagtacagattttataaacagcttggcagtgcaggtgaaggtctcccacaggtgtattactttggaccatgtgggaaatataatgccatggtgctggagctccttggccctagcttggaggacttgtttgacctctgtgaccgaacatttactttgaagacggtgttaatgatagccatccagctgctttctcgaatggaatacgtgcactcaaagaacctcatttaccgagatgtcaagccagagaacttcctgattggtcgacaaggcaataagaaagagcatgttatacacattatagactttggactggccaaggaatacattgaccccgaaaccaaaaaacacataccttatagggaacacaaaagtttaactggaactgcaagatatatgtctatcaacacgcatcttggcaaagagcaaagccggagagatgatttggaagccctaggccatatgttcatgtatttccttcgaggcagcctcccctggcaaggactcaaggctgacacattaaaagagagatatcaaaaaattggtgacaccaaaaggaatactcccattgaagctctctgtgagaactttccagaggagatggcaacctaccttcgatatgtcaggcgactggacttctttgaaaaacctgattatgagtatttacggaccctcttcacagacctctttgaaaagaaaggctacacctttgactatgcctatgattgggttgggagacctattcctactccagtagggtcagttcacgtagattctggtgcatctgcaataactcgagaaagccacacacatagggatcggccatcacaacagcagcctcttcgaaatcaggtggttagctcaaccaatggagagctgaatgttgatgatcccacgggagcccactccaatgcaccaatcacagctcatgccgaggtggaggtagtggaggaagctaactgcctgaaaatgctcaacctgtggtgctgctgtttctttaagaggaaaaggaagaagactgctcagcgccacaagtgaccagtgcctcccaggagtcctcaggccctggggactctgactcaattgtacctgcagctcctgccatttctcattggaagggactcctctttgggggagggtggatatccaaaccaaaaagaagaaaacagatgcccccagaaggggccagtgcgggcagccagggcctagtgggtcattggccatctccgcctgcctaaggctctgagcaggtcccagagctgctgttcctccactgcttgcccatagggctgcctggttgactctccttcccattgtttacagtgaaggtgtcattcacaaaaactcaaggactgctattctccttcttccccttagtttactcctggtttttaccccaccctcaaccctctccagcataaaacctagtgagctaaaggctttgtctgcagaaggagatcaagaggctgggggtaaggccaagaaggtaggaggaaaatggcagacctgggctggagaagaaccttctccgtatcccaggtgtgcctggcagtatggtttcctcttcctctgtgcctgtgcagcattcatcccagctggccttggggttcaggttccttcttccctccctcctgtgaagttacactgtaggacacaagctgtgagcaatctgcagtctactgtccctgtgtgttggcgttcttagcttttttgacaaactcttttctccaggtagtaggacaatgaaaattgttctaagcaaaggaaagaaaactgactttgttgcacttttagtttttttaaaaaaaacaaaaacaaaaacatggcagatgcatattgtgtctggttatattgggggttttacttttacctgttttgagggggatggggccggccaagccattcagagagaacatgggtccagaggacattctcagtggaaagagtttgatctgcagcacccagaagagaagccaaactcggtgtcattctgagtgaacactcaggttggcaagaaaacatacttgaattttcattcatcttctcagcagctgaagaatgtccctaccagagcatcttgacctaatcagcttacagtttgaaaacctagctctccagaacatgagatgagccagccgagccagactgtgaccaggaaacagctcatcccagagaaggagatgcttaacaaaaaaaaattgaaattgtttcccatgctgccagggacttccaactagatagccatgtgacgtcctggtgacttgggggaaaaattagtgatgaaacagccaccaccatattgccattagtggaaaaaaagaggacagtgaacctgccttccacctgccagagggacctcagggtgtggcattatagggccaggaaaagaaaatcggtgtatcctatctgccccaatagctgagctgtagcatttgggctggcctgccttatcagaaaccaagcttatgaagatcttctcccagcaggtccatagcagtaggcttaggatgcagtatatggggccgcatttaaaaggagggaaagattgtttggtgctggaacattccagggaaaaggagactggaatgaaaggtctgaaattatcttctcaattggactccttccagaaaggtggccgtgcctctaagcatgtttttcccagtatgccctaggcctccccccatggtgttttcatatgaggtactactgtgaaggatctggttcctcattcactgtttgacaagtctttcatgtgtggagttactcttctcatgcccaattttcatttgagtttagtggcttaaccaaacaatgactcctcattccagcggtgacagaagagaaagggtcatttacatcaggaaagaggtcttgtatctgggagtagagagctaaccatggagcacagtggctggtgggtgacttagtctgatggtttgtggaccatagaagtcttcacctctggtttgaggtgcagggctgtcttttgtactggagggtgtggggatattttctgatagttgccatttcttgaaaaattcccttgatgtaccttacacagagcagaaataacattaacatggatcagaggtactgggcttcatctgttccattggaccttggctagggaatatcatttcactggcatcaaacctgcttagcttatgaaaagatggtaatatgtcatttctataaatgtttctatatatgaaacataaagtggcagggagatacaatatcacaccccttccccacaaggactgtgaatattgggatttatgtccttgccattacctagtggttacagccctatcactaaaatttacatcgtttctcagttgggatttgggcattgctaacttactgtatagaaagtttaacttttcctcacccctgtatagaaaatgccttgcctctcaagagagggcagagggggggccaggtgcagtggctcacgcctgtaatcccagcagtttgggaggccaaggcaagtggatcatgtgaggtcaagagttcgagaccagcctggccaacatggtgaaaccccgtctctacaaaaaatacaaaaattagctgggcatggtggcatgctcccgtagtcccagctactcgggaggctgaggcaggagaatcacttgagcctgggaggcagaagttgcagtgagccgagatcgcaccactgcactccagcctgggcaacagagtgagactctgtctaaaaagaaaaaaaaaaaagggcagagggaaatggtgggaatgcctggagcatcctggcactctatactctactgagtgcctctcttcagcccctcaccctgcttccacacacacacacacaaaagcaaaggcactgaccagcttggctgcagggcaagctgccttgcagctggatttgcgactttttttttgtcttaaaatttttactggatcagttgtaggggactgtacttcctaagacactgttctcaccttccaacctcacaaatctcttactagatatttggtttttataacaagggtaaagaatcccaggtccctttagcatgcagagtaatggtgatccctccagagccattggcacttcaaagtggtcccagacctgggagattctggtgggatcttccttaaaaataagcaaaaaacctgagtaccctagatgcaattggccatttgtttcaggcccatcagcgaatcagggctccctcctcaaccctactgctacagttccttagctgtatgcctcagccagatccttggggttagggcatgcactcgctgactgtccccacccatccacttgctctgtagtttctgagctttctccatttcacaagtatggtgcctaacgatctttttctttaggattgatgcagttgtttttcctgaaagctaactcagcatctattcataaaaacccttaatagtatacattaggagttttcccaagctctacagtccctcagacattgcatcctaaacagatttgaggcacacaggccaagactccaccaaggcataaatggtcccccctactcccttttgaccagggtatcacttgtgtctctgcagtaagagttggtcaagttgctctacgcaccttggtgctttccagagatctcactccagactgcccccaagggtggatagagtatcctgacagccagtgtgcactcatgactgccttaattaacattcttctgctattatggagcctgtccagcaataaacagggtctaggaaggtacaagattagcttccagttaaaatcccattttatattggaatgcatgagctacagatgacagcagagatcctgaggtttctagacatgttgattgtctcttttttctaaatgaactccaagtacttagaaaacagtccctgtccatcagccagaaaaggtgaccatcacccctaaagtaatttccaaacttagttcagtgggaagatatgctggtagtgcatattcagtgttgattttcagtgctagtaaccacttttaatgccagaaatatgtaacaatgataatgtaacgtcaaagtggttactaaagattatagccttaactt

SEQ ID NO: 114550 - DNA, 463 bp, Homo sapiens
  Payload ID: 2394
  Gene Symbol: CSNK1G1
  Gene Name: casein kinase 1, gamma 1
  ENST ID: ENST00000635230
  CDS Start-End: 1-110
tagggtcagttcacgtagattctggtgcatctgcaataactcgagaaagccacacacatagggatcggccatcacaacagcagcctcttcgaaatcagagtactgtttagttctgaccgaggctcagggtttgctagttgaaggggctaagtttgcgcagagataatctgcctccttgtgacctgcgtgcagtttcctaacatgctgcctgccatccagtaggagcacagacagagattgcacactcctcctggccacaggatggccacagctccacatagagctcagtgcaggagacgtctgcccctcctcatttctgggacctttactctgagaggagctttgaaacaagcaagtgcaaaactgaaaatagattccttagcgtcttctgttctatcacctagtcactgcggctcacctcttctcttaattctgtattccatattaaaagtttttttctttc

SEQ ID NO: 114551 - DNA, 2485 bp, Homo sapiens
  Payload ID: 2394
  Gene Symbol: CSNK1G1
  Gene Name: casein kinase 1, gamma 1
  ENST ID: ENST00000634654
  CDS Start-End: 309-1688
ctgcgggtgggtagagaagcacttggcgcctcggggaggggaccgcgcccgcctcatttgcgccttgcagcactgctggaccaggttacaagatgttcacctaagattgagacctagtgactacatttcctacgggaacaaataaatggtttttcatctcccggagatacattacaaacaaatatggtgctaaaagaactccttacctttctctgactacaatttatttggacatacttttgtattgaagagaggtatacatactgaagctacttgctgtactataggagactctgtcctgtaggatcatggaccatcctagtagggaaaaggatgaaagacaacggacaactaaacccatggcacaaaggagtgcacactgctctcgaccatctggctcctcatcgtcctctggggttcttatggtgggacccaacttcagggttggcaagaagataggatgtgggaacttcggagagctcagattaggtaaaaatctctacaccaatgaatatgtagcaatcaaactggaaccaataaaatcacgtgctccacagcttcatttagagtacagattttataaacagcttggcagtgcaggtgaaggtctcccacaggtgtattactttggaccatgtgggaaatataatgccatggtgctggagctccttggccctagcttggaggacttgtttgacctctgtgaccgaacatttactttgaagacggtgttaatgatagccatccagctgctttctcgaatggaatacgtgcactcaaagaacctcatttaccgagatgtcaagccagagaacttcctgattggtcgacaaggcaataagaaagagcatgttatacacattatagactttggactggccaaggaatacattgaccccgaaaccaaaaaacacataccttatagggaacacaaaagtttaactggaactgcaagatatatgtctatcaacacgcatcttggcaaagagcaaagccggagagatgatttggaagccctaggccatatgttcatgtatttccttcgaggcagcctcccctggcaaggactcaaggctgacacattaaaagagagatatcaaaaaattggtgacaccaaaaggaatactcccattgaagctctctgtgagaactttccagaggagatggcaacctaccttcgatatgtcaggcgactggacttctttgaaaaacctgattatgagtatttacggaccctcttcacagacctctttgaaaagaaaggctacacctttgactatgcctatgattgggttgggagacctattcctactccagtagggtcagttcacgtagattctggtgcatctgcaataactcgagaaagccacacacatagggatcggccatcacaacagcagcctcttcgaaatcagaatgtatcatcagagcgccgaggagagtgggaaattcagcccagccggcagaccaatacctcatacctaacgtctcacttggctgcagaccgccatgggggatcagtgcaggtggttagctcaaccaatggagagctgaatgttgatgatcccacgggagcccactccaatgcaccaatcacagctcatgccgaggtggaggtagtggaggaagctaagtgctgctgtttctttaagaggaaaaggaagaagactgctcagcgccacaagtgaccagtgcctcccaggagtcctcaggccctggggactctgactcaattgtacctgcagctcctgccatttctcattggaagggactcctctttgggggagggtggatatccaaaccaaaaagaagaaaacagatgcccccagaaggggccagtgcgggcagccagggcctagtgggtcattggccatctccgcctgcctaaggctctgagcaggtcccagagctgctgttcctccactgcttgcccatagggctgcctggttgactctccttcccattgtttacagtgaaggtgtcattcacaaaaactcaaggactgctattctccttcttccccttagtttactcctggtttttaccccaccctcaaccctctccagcataaaacctagtgagctaaaggctttgtctgcagaaggagatcaagaggctgggggtaaggccaagaaggtaggaggaaaatggcagacctgggctggagaagaaccttctccgtatcccaggtgtgcctggcagtatggtttcctcttcctctgtgcctgtgcagcattcatcccagctggccttggggttcaggttccttcttccctccctcctgtgaagttacactgtaggacacaagctgtgagcaatctgcagtctactgtccctgtgtgttggcgttcttagcttttttgacaaactcttttctccaggtagtaggacaatgaaaattgttctaagcaaaggaaagaaaactgactttgttgcacttttagtttttttaaaaaaaacaaaaacaaaaacatggcagatgcat

SEQ ID NO: 114552 - DNA, 830 bp, Homo sapiens
  Payload ID: 2394
  Gene Symbol: CSNK1G1
  Gene Name: casein kinase 1, gamma 1
  ENST ID: ENST00000635270
  CDS Start-End: 281-830
ctttattcggccgggagcatcagcaaacttaggtctcaaaaaaccaagctctccaagttacaagatgttcacctaagattgagacctagtgactacatttcctacgggaacaaataaatggtttttcatctcccggagatacattacaaacaaatatggtgctaaaagaactccttacctttctctgactacaatttatttggacatacttttgtattgaagagaggtatacatactgaagctacttgctgtactataggagactctgtcctgtaggatcatggaccatcctagtagggaaaaggatgaaagacaacggacaactaaacccatggcacaaaggagtgcacactgctctcgaccatctggctcctcatcgtcctctggggttcttatggtgggacccaacttcagggttggcaagaagataggatgtgggaacttcggagagctcagattaggtaaaaatctctacaccaatgaatatgtagcaatcaaactggaaccaataaaatcacgtgctccacagcttcatttagagtacagattttataaacagcttggcagtgcaggtgaaggtctcccacaggtgtattactttggaccatgtgggaaatataatgccatggtgctggagctccttggccctagcttggaggacttgtttgacctctgtgaccgaacatttactttgaagacggtgttaatgatagccatccagctgctttctcgaatggaatacgtgcactcaaagaacctcatttaccgagatgtcaagccagagaacttcctgattggtcgacaaggcaataagaaagagcatgttatac

SEQ ID NO: 114553 - DNA, 601 bp, Homo sapiens
  Payload ID: 2394
  Gene Symbol: CSNK1G1
  Gene Name: casein kinase 1, gamma 1
  ENST ID: ENST00000634722
  CDS Start-End: 1-477
ttctttgaaaaacctgattatgagtatttacggaccctcttcacagacctctttgaaaagaaaggctacacctttgactatgcctatgattgggttgggagacctattcctactccagtagggtcagttcacgtagattctggtgcatctgcaataactcgagaaagccacacacatagggatcggccatcacaacagcagcctcttcgaaatcaggtggttagctcaaccaatggagagctgaatgttgatgatcccacgggagcccactccaatgcaccaatcacagctcatgccgaggtggaggtagtggaggaagctaagtacgtacatctttcaagggggctcttaagtcatgggttgaaaaatcttttctgtctcttcctctctgtgtgctgctcgtctcagactggatttctcatgcttgtaaccacagctttcttccttaactgttttaatttttgcatggtaccttaaggctgctactgcccttctttagctgtgatttcggggaagacagtcacatttttctagttcacatgaaaaagacatagtgaaccgaaagaatcatgttatcagggctacagtggatagtagccat

SEQ ID NO: 114554 - DNA, 1654 bp, Homo sapiens
  Payload ID: 2394
  Gene Symbol: CSNK1G1
  Gene Name: casein kinase 1, gamma 1
  ENST ID: ENST00000634847
  CDS Start-End: 297-1565
gccttgcagcactgctggaccaggaggacagttgtgaggccagtgcacttttggctcagtgggaatgaatgggttacaagatgttcacctaagattgagacctagtgactacatttcctacgggaacaaataaatggtttttcatctcccggagatacattacaaacaaatatggtgctaaaagaactccttacctttctctgactacaatttatttggacatacttttgtattgaagagaggtatacatactgaagctacttgctgtactataggagactctgtcctgtaggatcatggaccatcctagtagggaaaaggatgaaagacaacggacaactaaacccatggcacaaaggagtgcacactgctctcgaccatctggctcctcatcgtcctctggggttcttatggtgggacccaacttcagggttggcaagaagataggatgtgggaacttcggagagctcagattaggtaaaaatctctacaccaatgaatatgtagcaatcaaactggaaccaataaaatcacgtgctccacagcttcatttagagtacagattttataaacagcttggcagtgcaggtgaaggtctcccacaggtgtattactttggaccatgtgggaaatataatgccatggtgctggagctccttggccctagcttggaggacttgtttgacctctgtgaccgaacatttactttgaagacggtgttaatgatagccatccagctgctttctcgaatggaatacgtgcactcaaagaacctcatttaccgagatgtcaagccagagaacttcctgattggtcgacaaggcaataagaaagagcatgttatacacattatagactttggactggccaaggaatacattgaccccgaaaccaaaaaacacataccttatagggaacacaaaagtttaactggaactgcaagatatatgtctatcaacacgcatcttggcaaagagcaaagccggagagatgatttggaagccctaggccatatgttcatgtatttccttcgaggcagcctcccctggcaaggactcaaggctgacacattaaaagagagatatcaaaaaattggtgacaccaaaaggaatactcccattgaagctctctgtgagaactttccagaggagatggcaacctaccttcgatatgtcaggcgactggacttctttgaaaaacctgattatgagtatttacggaccctcttcacagacctctttgaaaagaaaggctacacctttgactatgcctatgattgggttgggagacctattcctactccagtagggtcagttcacgtagattctggtgcatctgcaataactcgagaaagccacacacatagggatcggccatcacaacagcagcctcttcgaaatcagccaaggtctttaacaagcagagtgttttgtccagcagtgaggccccttttcccacttcccagcacccacataaacaggaataatgtgctggaaatgaaaccaggtggcagaagcagctacacatgcaagagaagcctgattgggtccacattaaccagatgacaggagtgagagccttcacttacatttcggggaccatcagtgagaactgggatggcagtgaacctgaaataaagatcgttgaaataaga

SEQ ID NO: 114555 - DNA, 814 bp, Homo sapiens
  Payload ID: 2394
  Gene Symbol: CSNK1G1
  Gene Name: casein kinase 1, gamma 1
  ENST ID: ENST00000635529
  CDS Start-End: 370-603
cttccccctcccgtccgccttctcccctccctcccgctcctgggaaagagagaaaccaccgctgcgggtgggtagagaagcacttggcgcctcggggaggggaccgcgcccgcctcatttgcgccttgcagcactgctggaccaggttacaagatgttcacctaagattgagacctagtgactacatttcctacgggaacaaataaatggtttttcatctcccggagatacattacaaacaaatatggtgctaaaagaactccttacctttctctgactacaatttatttggacatacttttgtattgaagagaggtatacatactgaagctacttgctgtactataggagactctgtcctgtaggatcatggaccatcctagtagggaaaaggatgaaagacaacggacaactaaacccatggcacaaaggagtgcacactgctctcgaccatctggctcctcatcgtcctctggggttcttatggtgggacccaacttcagggttggcaagaagataggatgtgggaacttcggagagctcagattaggaaccaataaaatcacgtgctccacagcttcatttagagtacagattttataaacagcttggcagtgcaggtgaaggtctcccacaggtgtattactttggaccatgtgggaaatataatgccatggtgctggagctccttggccctagcttggaggacttgtttgacctctgtgaccgaacatttactttgaagacggtgttaatgatagccatccagctgctttctcgaatggaatacgtgcactcaaagaacctcatttac

SEQ ID NO: 114556 - DNA, 2918 bp, Homo sapiens
  Payload ID: 2395
  Gene Symbol: CSNK1G2
  Gene Name: casein kinase 1, gamma 2
  Uniprot ID: P78368
  ENST ID: ENST00000255641
  CDS Start-End: 536-1783
tatggctgccgccccccgctggcagacgctggcggcgtaaggcgcgcgggccccggagcgggcgcggcggagcgcggcgagcccggcgcctcccgtcccgaacatgcggaggccggcccaggcggcgcgggagccggagcgggggcccaagcggcaccggagccggagcgcgagggggcgcggggcccggagcgggggtccgcgctgcgctgctgaggccgggccggccgcccagacgctgcccgcgggcccggccacggcggagccaagctgtgagccgtgagctttgaggcggtgggatgtgtcagcagaatgtctcctgcccccgagagcgaccccgaggccactgagaagagcagcgcggcctggccggcccgaacgcctgcgtctcagtagctgggagccacgggcccacgcccgcccaccggccgcagtgatgttctagccacagaggagccaagacctcaggtttccagagacttgggatttgcacggcagcagagtcaccgtggagaggccagggtatcacaaacttatggattttgacaagaaaggagggaaaggggagacggaggagggccggagaatgtccaaggccggcgggggccggagcagccacggcatccggagctcggggaccagctcgggggtcctgatggtgggccccaacttccgcgtcggcaagaagatcggctgcggcaacttcggggagctccgcctaggaaagaatctctatacaaatgaatacgtggctatcaaattggagccgatcaagtcccgggccccgcagctgcacctggagtaccggttctacaagcagctcagcgccacagagggcgtccctcaggtctactacttcggtccgtgcgggaagtacaacgccatggtgctggagctgctggggcccagcctggaggacctgttcgacctgtgcgaccggaccttcacgctcaagacggtgctgatgatcgccatccagctgatcacgcgcatggagtatgtgcacaccaagagcctaatctaccgggacgtgaagcccgagaacttcctggtgggccgcccggggaccaagcggcagcatgccatccacatcatcgacttcgggctggccaaggagtacatcgaccccgagaccaagaagcacatcccgtaccgcgagcacaagagcctgacgggcacggcgcgctacatgagcatcaacacgcacctgggcaaggagcagagccgccgcgacgacctggaggcgctgggccacatgttcatgtacttcctgcgcggcagcctcccctggcaggggctcaaggccgacacgctcaaggagcggtaccagaagatcggggacaccaaacgcgccacgcccatcgaggtgctctgcgagaacttcccagaggagatggccacgtacctgcgctatgtgcggcgcctggacttcttcgagaagcccgactatgactacctgcggaagctcttcaccgacctcttcgaccgcagtggcttcgtgttcgactatgagtacgactgggccgggaagcccctgccgacccccatcggcaccgtccacaccgacctgccctcccagcctcagctccgggacaaaacccagccgcacagcaaaaaccaggcgttgaactccaccaacggggagctgaatgcggacgaccccacggccggccactccaacgccccgatcacagcgcctgcagaggtggaggtggccgatgaaaccaaatgctgctgtttcttcaagaggagaaagagaaaatcgctgcagcgacacaagtgaccctgggcgcgtgcagccccctgaatcttctccgtgcagccccttggggcgcgaccttgtgcgaggccctcggggcccacccacagcggcccagggccagaccctggctggaagccagaacgcagactgcaggggccgcgcctggctcaggcggccccacccccgggacgtggggtcacttccttcatgtaagactttggccgaaatttctacacctgtgtctagtcctcccctccaagagcattaactatttaaaacaaggaaaagaggaaaaaaaaaacagaggcccgccctaccccactcctgcccctccgtttctttgctgaagtgagtagtgtgatcctggaggccccccggcctggccccgccccgccagccgcccccgttagcgtcataaagtccagcttgtctccctcgatccaaaggccgttttctcgaggggagggcaggcccggcctggaggggtgctgtggagctgtcttgcccaggccctcctgggagggggacaggcattgttgccaggggtgaggccgtgccccaggcctccccgaaaccaaaggggaaggcaggggtggggccgtggctgaagccggctccccaaccaaaatgctgcaccaaagctcgggcgccgcgggcacggctgctgcagtctcttcccagcctggccctggcaaggggcgggtgggcgctgccaggcgggtgcttctcgacgcacttgctcccggaggctgcgccccggcgcctggaacccgaggtgggaggaccggttggtgtcaccctgctcggccctcagccctgccgcgtggggcgcgtgggcacggagcttcctgcctctctgctccgacacccggcaagcagccggagacaaaacgccttaaagcccccggcccagccctgcaggtatattgcaggggcctgggggcggccctggactggcgggcggttccccagtggggtgccctggaggctgccgggcagagtggagcagcttggggccgtgcccagggcggtggctgtgagtctagtttttgctttaccaagtgtacagaaatggcatttacgtttctctgatgctcccttgaagccatagaatttaggggcttttttaaaaaaataaaagaaaaatgaaaccaaa

SEQ ID NO: 114557 - DNA, 780 bp, Homo sapiens
  Payload ID: 2395
  Gene Symbol: CSNK1G2
  Gene Name: casein kinase 1, gamma 2
  ENST ID: ENST00000589350
  CDS Start-End: 530-780
agagaagggggctcccggggccctccccagggaactggccctgggcccagaccagatggaggaccccgaaaagaacagggcaggtttggttggtggcctccagtctcttgtcctcaacgagggttttggcagctccctctcagtggcctctccgctctgcaccgaaggggatgggtccgacccagcctggcatcatcacagcctcgagtggcgtccagcctgccccgctccaccagtggctgctggagaagaacccgagcctggctgtgagccgtgagctttgaggcggtgggatgtgtcagcagaatgtctcctgcccccgagagcgaccccgaggccactgagaagagcagcgcggcctggccggcccgaacgcctgcgtctcagtagctgggagccacgggcccacgcccgcccaccggccgcagtgatgttctagccacagaggagccaagacctcaggtttccagagacttgggatttgcacggcagcagagtcaccgtggagaggccagggtatcacaaacttatggattttgacaagaaaggagggaaaggggagacggaggagggccggagaatgtccaaggccggcgggggccggagcagccacggcatccggagctcggggaccagctcgggggtcctgatggtgggccccaacttccgcgtcggcaagaagatcggctgcggcaacttcggggagctccgcctaggttggtttcagcgttgctggggcaaggctgagggtaaacatgagcgactccaaggccagggagc

SEQ ID NO: 114558 - DNA, 648 bp, Homo sapiens
  Payload ID: 2395
  Gene Symbol: CSNK1G2
  Gene Name: casein kinase 1, gamma 2
  ENST ID: ENST00000591752
  CDS Start-End: 421-648
ccgttacgctccaccgtgtggcccagtgcgccggggcggtccacaaggccatgtggggctctgcctccccaccccaggacatgcaggagccttcttggtgtttcctggctcccggaggccctggtagctcgtgggtgtgggagctgagcaggaagctgtgagccgtgagctttgaggcggtgggatgtgtcagcagaatgtctcctgcccccgagagcgaccccgaggccactgagaagagcagcgcggcctggccggcccgaacgcctgcgtctcagtagctgggagccacgggcccacgcccgcccaccggccgcagtgatgttctagccacagaggagccaagacctcaggtttccagagacttgggatttgcacggcagcagagtcaccgtggagaggccagggtatcacaaacttatggattttgacaagaaaggagggaaaggggagacggaggagggccggagaatgtccaaggccggcgggggccggagcagccacggcatccggagctcggggaccagctcgggggtcctgatggtgggccccaacttccgcgtcggcaagaagatcggctgcggcaacttcggggagctccgcctaggaaagaatctctatacaaatgaatacgtggctatcaaattg

SEQ ID NO: 114559 - DNA, 896 bp, Homo sapiens
  Payload ID: 2395
  Gene Symbol: CSNK1G2
  Gene Name: casein kinase 1, gamma 2
  ENST ID: ENST00000589385
  CDS Start-End: 1-896
gtccaaggccggcgggggccggagcagccacggcatccggagctcggggaccagctcgggggtcctgatggtgggccccaacttccgcgtcggcaagaagatcggctgcggcaacttcggggagctccgcctaggaaagaatctctatacaaatgaatacgtggctatcaaattggtgagtcggcccctccaccccacccccgctgacgtgccccccagggatttcagggcagcgacccggtcccctggtgactcgctcttgtgcccccaggagccgatcaagtcccgggccccgcagctgcacctggagtaccggttctacaagcagctcagcgccacagagggcgtccctcaggtctactacttcggtccgtgcgggaagtacaacgccatggtgctggagctgctggggcccagcctggaggacctgttcgacctgtgcgaccggaccttcacgctcaagacggtgctgatgatcgccatccagctgatcacgcgcatggagtatgtgcacaccaagagcctaatctaccgggacgtgaagcccgagaacttcctggtgggccgcccggggaccaagcggcagcatgccatccacatcatcgacttcgggctggccaaggagtacatcgaccccgagaccaagaagcacatcccgtaccgcgagcacaagagcctgacgggcacggcgcgctacatgagcatcaacacgcacctgggcaaggagcagagccgccgcgacgacctggaggcgctgggccacatgttcatgtacttcctgcgcggcagcctcccctggcaggggctcaaggccgacacgctcaaggagcggtaccagaagatcggggacaccaaacgcgccacgcccatcgaggtgctctgcgagaacttcccag

SEQ ID NO: 114560 - DNA, 300 bp, Homo sapiens
  Payload ID: 2395
  Gene Symbol: CSNK1G2
  Gene Name: casein kinase 1, gamma 2
  ENST ID: ENST00000585957
  CDS Start-End: 1-300
gaggccgggcaggcgggcggggacgcagggcgggagcaaggctgaccacagacccccgcaggccgacacgctcaaggagcggtaccagaagatcggggacaccaaacgcgccacgcccatcgaggtgctctgcgagaacttcccagaggagatggccacgtacctgcgctatgtgcggcgcctggacttcttcgagaagcccgactatgactacctgcggaagctcttcaccgacctcttcgaccgcagtggcttcgtgttcgactatgagtacgactgggccgggaagcccctgccgac

SEQ ID NO: 114561 - DNA, 704 bp, Homo sapiens
  Payload ID: 2395
  Gene Symbol: CSNK1G2
  Gene Name: casein kinase 1, gamma 2
  ENST ID: ENST00000585959
  CDS Start-End: 1-704
gtcccgggccccgcagctgcacctggagtaccggttctacaagcagctcagcgccacaggtaccgggcggcccgcgggtggggcgggggctgcgcaggggcagggagggggctgccgccgcacgcccgtgcgtctgtcctccgccgcagagggcgtccctcaggtctactacttcggtccgtgcgggaagtacaacgccatggtgctggagctgctggggcccagcctggaggacctgttcgacctgtgcgaccggaccttcacgctcaagacggtgctgatgatcgccatccagctgatcacgcgcatggagtatgtgcacaccaagagcctaatctaccgggacgtgaagcccgagaacttcctggtgggccgcccggggaccaagcggcagcatgccatccacatcatcgacttcgggctggccaaggagtacatcgaccccgagaccaagaagcacatcccgtaccgcgagcacaagagcctgacgggcacggcgcgctacatgagcatcaacacgcacctgggcaaggagcagagccgccgcgacgacctggaggcgctgggccacatgttcatgtacttcctgcgcggcagcctcccctggcaggggctcaaggccgacacgctcaaggagcggtaccagaagatcggggacaccaaacgcgccacgcccatcgaggtgctctgcgagaacttcccag

SEQ ID NO: 114562 - DNA, 617 bp, Homo sapiens
  Payload ID: 2395
  Gene Symbol: CSNK1G2
  Gene Name: casein kinase 1, gamma 2
  ENST ID: ENST00000591002
  CDS Start-End: 1-617
gtcccgggccccgcagctgcacctggagtaccggttctacaagcagctcagcgccacaggtaccgggcggcccgcgggtggggcgggggctgcgcaggggcagggagggggctgccgccgcacgcccgtgcgtctgtcctccgccgcagagggcgtccctcaggtctactacttcggtccgtgcgggaagtacaacgccatggtgctggagctgctggggcccagcctggaggacctgttcgacctgtgcgaccggaccttcacgctcaagacggtgctgatgatcgccatccagctgatcacgcgcatggagtatgtgcacaccaagagcctaatctaccgggacgtgaagcccgagaacttcctggtgggccgcccggggaccaagcggcagcatgccatccacatcatcgacttcgggctggccaaggagtacatcgaccccgagaccaagaagcacatcccgtaccgcgagcacaagagcctgacgggcacggcgcgctacatgagcatcaacacgcacctgggcaagggccgacacgctcaaggagcggtaccagaagatcggggacaccaaacgcgccacgcccatcgaggtgctctgcgagaacttccca

SEQ ID NO: 114563 - DNA, 964 bp, Homo sapiens
  Payload ID: 2395
  Gene Symbol: CSNK1G2
  Gene Name: casein kinase 1, gamma 2
  ENST ID: ENST00000615564
  CDS Start-End: 1-345
ttcatgtacttcctgcgcggcagcctcccctggcaggggctcaaggccgacacgctcaaggagcggtaccagaagatcggggacaccaaacgcgccacgcccatcgaggtgctctgcgagaacttcccagaggagatggccacgtacctgcgctatgtgcggcgcctggacttcttcgagaagcccgactatgactacctgcggaagctcttcaccgacctcttcgaccgcagtggcttcgtgttcgactatgaccgacccccatcggcaccgtccacaccgacctgccctcccagcctcagctccgggacaaaacccagccgcacagcaaaaaccaggcgttgaactccaccaacggggagctgaatgcggacgaccccacggccggccactccaacgccccgatcacagcgcctgcagaggtggaggtggccgatgaaaccaaatgctgctgtttcttcaagaggagaaagagaaaatcgctgcagcgacacaagtgaccctgggcgcgtgcagccccctgaatcttctccgtgcagccccttggggcgcgaccttgtgcgaggccctcggggcccacccacagcggcccagggccagaccctggctggaagccagaacgcagactgcaggggccgcgcctggctcaggcggccccacccccgggacgtggggtcacttccttcatgtaagactttggccgaaatttctacacctgtgtctagtcctcccctccaagagcattaactatttaaaacaaggaaaagaggaaaaaaaaaacagaggcccgccctaccccactcctgcccctccgtttctttgctgaagtgagtagtgtgatcctggaggccccccggcctggccccgccccgccagccgcccccgttagcgtcataaagtccagcttgtctccctcgatccaaaggccgttttctcgaggggagggcaggcccggcctggaggg

SEQ ID NO: 114564 - DNA, 4635 bp, Homo sapiens
  Payload ID: 2396
  Gene Symbol: CSNK1G3
  Gene Name: casein kinase 1, gamma 3
  Uniprot ID: Q9Y6M4
  ENST ID: ENST00000345990
  CDS Start-End: 720-1991
actcggctgttttcgctgatgcgggcagcttgggggccgccgccgctaaacagacgctttcctttttaattttttttccatgtgttcacttccgggtccggcgtcgatccggatgcccgaggcagaaggatgtttgacctccggataagcgaggcgctgctgtgcattcattccgggctgcatcggtggcgacagcagaggctcgggcggcgactctccggccagcggcggcggtaggaggcaccagcggcagtgcagggaccgaatccgagcagcgctgcgttacctctctctctcgctccttcccccctacctcgctcgctcgctcgctcgctccctgcgtggctcgctttcctcctccggccgccggcgggtgtgatgtgccgccgccgctgcccccgccggcgctgacggactgggggcgccgcccgcgcccgggaccgacccctctgctcgcggccgcgcctttgagctctctatcaatatcagctcacatcattgaaaagataattttgaagacatgttttgctgaaaagacactaagaaaaattttacgaatgggatgaacatgctccagttaattgactacctactgcaatttgaatgttaacattacccatctggtacagttacctagtgatgtacctattttcacaataccctgtttcagtgtgcttgtcttgattaaagaattcaaagtggagtaccgcaaacttgatatggaaaataaaaagaaagacaaggacaaatcagatgatagaatggcacgacctagtggtcgatcgggacacaacactcgaggaactgggtcttcatcgtctggagttttaatggttggacctaactttagagttggaaaaaaaattggatgtggcaattttggagaattacgattagggaaaaatttatacacaaatgaatatgtggcaattaagttggagcccatgaaatcaagagcaccacagctacatttggaatacagattctataagcagttaggatctggagatggtatacctcaagtttactatttcggcccttgtggtaaatacaatgctatggtgctggaactgctgggacctagtttggaagacttgtttgacttgtgtgacagaacattttctcttaaaacagttctcatgatagctatacaactgatttctcgcatggaatatgtccattcaaagaacttgatatacagagatgtaaaacctgagaacttcttaataggacgaccaggaaacaaaacccagcaagttattcacattatagattttggtttggcaaaggaatatattgatccggagacaaagaaacacataccatacagagaacacaagagccttacaggaacagctagatatatgagcataaacacacatttaggaaaagaacaaagtagaagagacgatttagaagctttaggtcatatgttcatgtattttctgagaggcagtcttccttggcaaggcttaaaggctgacacattaaaggagaggtatcagaaaattggagatacaaaacgggctacaccaatagaagtgttatgtgaaaattttccagaaatggcaacatatcttcgttatgtaagaaggctagatttttttgaaaaaccagactatgactacttaagaaagctttttactgacttgtttgatcgaaaaggatatatgtttgattatgaatatgactggattggtaaacagttgcctactccagtgggtgcagttcagcaagatcctgctctgtcatcaaacagagaagcacatcaacacagagataagatgcaacaatccaaaaaccaggttgtaagttctacaaatggagagttaaacacagatgaccccaccgcaggacgttcaaatgcacccatcacagcccctactgaagtagaagtgatggatgaaaccaactgccagaaagtgttgaacatgtggtgctgctgttttttcaaacgaaggaaaaggaaaaccatacagcgccacaaatgactctggacacagacagatcctggggagttacttacatgttcatctgctgtcttgtgattaaaatcatctctgtagtgaccacgtatattttcaaggactcactcttagaaacaaaaatgtcatactttcatacttcattttgtggttgtcttacattctttttctttttttttttttctctaatttaacctttatggaagctttaaagttttgtcaaaacatgagtgctttgcccatcagtgaatggaatggaccaatgaggtggtatcaatgaatatagttccatagaacattttccagaagttcttctgttgtagaaagcagtacagtatcttaagtgtcaaccagttatatacctaatctggttttttataacttctgtaagagcataatcaaacaggaattttcttttctcagtggataatacaacagagaaaacagagttgcccaaatatttaaaagaagttattccttgagaagttcatattttgtgacatctgcattgatttcagtattactgatggtactgttattcataagtcatattaacattctctccgtgaaatcatggtacagtcactgcccagaggtactgaggaaaaagcaatatgggttcggcagatggtggtggtaaaatgaatcttaaggagtgtggtaaatatgtgctccgcttttgttgcatcactatgtgaagtactgtgttgcagaagtggcaaaagcgcttatttttaaaaatgcaaaatatttgtacaatgtaactttatgcttccaaataataatgtatgttagacagcaagaaatgaatactttaaaaagtgatgtatgttggagttataaagaaatacactaaggagaggtagtaaatgtgaaccttgttgcagtgtataaggtggaagcctaaagaaatctcaccgaaacttactgctgaatgattacattctcccttaagcagaaaactttggatgtgccatgcaatggtgtctgtgtaattattttgctctttgattaaaaaaaagacccccagcaataaaaagtgggtcactctatgccctctgtgcacattagtctcttgtattcaactttgctgattctctggaattttcctactctttagcataattttgatgattgaaaaatattttggaaaggatgggtcaggtgctttgcctccatagtcttttgaagtgcctgcatatgaacaacaacaacaacaacaaaaaattctgtaaaaaaggaagcccattccacttttcaagtatgctttgttttaagccataaagacacacatgtagttttgtcacattctactagccaaaattttcaagaagggttaaaacaaagactggctagaaagataattattttgaataaatctcatattcatctttcatttatataattgttacttattcctcccatgcagtctcttcgttgtctttaagtgtgtgcctccaggcatgcttatttatttttattgtctcaaggtaacatttaagatgtatattaaagtaaagctacatttttttacttcattattgcatttacagggatttaattgtactttgtaatttatttttcttattagccaaaagtttaatgcatttttttttgatgaattaggcacccacatgaacaccacaaatcaggacattgtttatcattgttgctatgaatcctatgaatgatcttttttttattttaaagacctacacttaacctacaaaacatttgctgtataatttggtcaacagtttctatctatctgtatactgtcatgatgtcttaaactgcaggagttacatactgagtttatatttttatttgctttgagcaaggtagataaacattttggccattataatgtgaaaccacttcttctttctttacagtatttgaccaaacttgtgtgtctatgatatttgtaaatacatgcgaatatctgtatttcttatcataagcctatttagttttattctcagtagggttttttggattgtacagtgtttatatgatctgaactccttatacataagaaggtgtgtatattaatccaattatggacttaaaatattttaaaagtataaatacccttatttgctgcaaagaccagtgtgtaggcatttgctttttagcaatatttttaagtgctccattttaatgccgaggaataagtcttttggcaacacaaactggtcaataataggtaatgcaggtatgttcaggttaagccaacaatgttttgcatttttatgcttattttctgtcaacactaatgaagtcaacattgcctgaatgtctgaataatgaaacacatccctgtttaaaagtatgtaactgaaaaagaaataaaaaaaaataaaagtagtttttttaaacttgctctttcccatttcctctaaagatgggtaaaataatgtcactccctaatttaagataggaattataaaaatttggtttatttagtctgttatatatgagaagcagagctaaaggaatatgcttttgttattttatgttttgttttgctttcttgaaatccagtggtaaaaagcacacactaggaaggatctaagctttctttaatataaaaaaaattatacttctctgaactgtttaatagagcaataattaaatacatcttctg

SEQ ID NO: 114565 - DNA, 4047 bp, Homo sapiens
  Payload ID: 2396
  Gene Symbol: CSNK1G3
  Gene Name: casein kinase 1, gamma 3
  Uniprot ID: Q9Y6M4
  ENST ID: ENST00000360683
  CDS Start-End: 31-1398
gaattcaaagtggagtaccgcaaacttgatatggaaaataaaaagaaagacaaggacaaatcagatgatagaatggcacgacctagtggtcgatcgggacacaacactcgaggaactgggtcttcatcgtctggagttttaatggttggacctaactttagagttggaaaaaaaattggatgtggcaattttggagaattacgattagggaaaaatttatacacaaatgaatatgtggcaattaagttggagcccatgaaatcaagagcaccacagctacatttggaatacagattctataagcagttaggatctggagatggtatacctcaagtttactatttcggcccttgtggtaaatacaatgctatggtgctggaactgctgggacctagtttggaagacttgtttgacttgtgtgacagaacattttctcttaaaacagttctcatgatagctatacaactgatttctcgcatggaatatgtccattcaaagaacttgatatacagagatgtaaaacctgagaacttcttaataggacgaccaggaaacaaaacccagcaagttattcacattatagattttggtttggcaaaggaatatattgatccggagacaaagaaacacataccatacagagaacacaagagccttacaggaacagctagatatatgagcataaacacacatttaggaaaagaacaaagtagaagagacgatttagaagctttaggtcatatgttcatgtattttctgagaggcagtcttccttggcaaggcttaaaggctgacacattaaaggagaggtatcagaaaattggagatacaaaacgggctacaccaatagaagtgttatgtgaaaattttccagaaatggcaacatatcttcgttatgtaagaaggctagatttttttgaaaaaccagactatgactacttaagaaagctttttactgacttgtttgatcgaaaaggatatatgtttgattatgaatatgactggattggtaaacagttgcctactccagtgggtgcagttcagcaagatcctgctctgtcatcaaacagagaagcacatcaacacagagataagatgcaacaatccaaaaaccagtcggcagaccacagggcagcttgggactcccagcaggcaaatccccaccatttgagagctcaccttgcagcagacagacatggtggctcggtacaggttgtaagttctacaaatggagagttaaacacagatgaccccaccgcaggacgttcaaatgcacccatcacagcccctactgaagtagaagtgatggatgaaaccaactgccagaaagtgttgaacatgtggtgctgctgttttttcaaacgaaggaaaaggaaaaccatacagcgccacaaatgactctggacacagacagatcctggggagttacttacatgttcatctgctgtcttgtgattaaaatcatctctgtagtgaccacgtatattttcaaggactcactcttagaaacaaaaatgtcatactttcatacttcattttgtggttgtcttacattctttttctttttttttttttctctaatttaacctttatggaagctttaaagttttgtcaaaacatgagtgctttgcccatcagtgaatggaatggaccaatgaggtggtatcaatgaatatagttccatagaacattttccagaagttcttctgttgtagaaagcagtacagtatcttaagtgtcaaccagttatatacctaatctggttttttataacttctgtaagagcataatcaaacaggaattttcttttctcagtggataatacaacagagaaaacagagttgcccaaatatttaaaagaagttattccttgagaagttcatattttgtgacatctgcattgatttcagtattactgatggtactgttattcataagtcatattaacattctctccgtgaaatcatggtacagtcactgcccagaggtactgaggaaaaagcaatatgggttcggcagatggtggtggtaaaatgaatcttaaggagtgtggtaaatatgtgctccgcttttgttgcatcactatgtgaagtactgtgttgcagaagtggcaaaagcgcttatttttaaaaatgcaaaatatttgtacaatgtaactttatgcttccaaataataatgtatgttagacagcaagaaatgaatactttaaaaagtgatgtatgttggagttataaagaaatacactaaggagaggtagtaaatgtgaaccttgttgcagtgtataaggtggaagcctaaagaaatctcaccgaaacttactgctgaatgattacattctcccttaagcagaaaactttggatgtgccatgcaatggtgtctgtgtaattattttgctctttgattaaaaaaaagacccccagcaataaaaagtgggtcactctatgccctctgtgcacattagtctcttgtattcaactttgctgattctctggaattttcctactctttagcataattttgatgattgaaaaatattttggaaaggatgggtcaggtgctttgcctccatagtcttttgaagtgcctgcatatgaacaacaacaacaacaacaaaaaattctgtaaaaaaggaagcccattccacttttcaagtatgctttgttttaagccataaagacacacatgtagttttgtcacattctactagccaaaattttcaagaagggttaaaacaaagactggctagaaagataattattttgaataaatctcatattcatctttcatttatataattgttacttattcctcccatgcagtctcttcgttgtctttaagtgtgtgcctccaggcatgcttatttatttttattgtctcaaggtaacatttaagatgtatattaaagtaaagctacatttttttacttcattattgcatttacagggatttaattgtactttgtaatttatttttcttattagccaaaagtttaatgcatttttttttgatgaattaggcacccacatgaacaccacaaatcaggacattgtttatcattgttgctatgaatcctatgaatgatcttttttttattttaaagacctacacttaacctacaaaacatttgctgtataatttggtcaacagtttctatctatctgtatactgtcatgatgtcttaaactgcaggagttacatactgagtttatatttttatttgctttgagcaaggtagataaacattttggccattataatgtgaaaccacttcttctttctttacagtatttgaccaaacttgtgtgtctatgatatttgtaaatacatgcgaatatctgtatttcttatcataagcctatttagttttattctcagtagggttttttggattgtacagtgtttatatgatctgaactccttatacataagaaggtgtgtatattaatccaattatggacttaaaatattttaaaagtataaatacccttatttgctgcaaagaccagtgtgtaggcatttgctttttagcaatatttttaagtgctccattttaatgccgaggaataagtcttttggcaacacaaactggtcaataataggtaatgcaggtatgttcaggttaagccaacaatgttttgcatttttatgcttattttctgtcaacactaatgaagtcaacattgcctgaatgtctgaataatgaaacacatccctgtttaaaagtatgtaactgaaaaagaaataaaaaaaaataaaagtagtttttttaaacttgctctttcccatttcctctaaagatgggtaaaataatgtcactccctaatttaagataggaattataaaaatttggtttatttagtctgttatatatgagaagcagagctaaaggaatatgcttttgttattttatgttttgttttgctttcttgaaatccagtggtaaaaagcacacactaggaaggatctaagctttctttaatataaaaaaaattatacttctctgaactgtttaatagagcaataattaaatacatcttctgataaa

SEQ ID NO: 114566 - DNA, 2424 bp, Homo sapiens
  Payload ID: 2396
  Gene Symbol: CSNK1G3
  Gene Name: casein kinase 1, gamma 3
  Uniprot ID: Q9Y6M4
  ENST ID: ENST00000361991
  CDS Start-End: 31-1374
gaattcaaagtggagtaccgcaaacttgatatggaaaataaaaagaaagacaaggacaaatcagatgatagaatggcacgacctagtggtcgatcgggacacaacactcgaggaactgggtcttcatcgtctggagttttaatggttggacctaactttagagttggaaaaaaaattggatgtggcaattttggagaattacgattagggaaaaatttatacacaaatgaatatgtggcaattaagttggagcccatgaaatcaagagcaccacagctacatttggaatacagattctataagcagttaggatctggagatggtatacctcaagtttactatttcggcccttgtggtaaatacaatgctatggtgctggaactgctgggacctagtttggaagacttgtttgacttgtgtgacagaacattttctcttaaaacagttctcatgatagctatacaactgatttctcgcatggaatatgtccattcaaagaacttgatatacagagatgtaaaacctgagaacttcttaataggacgaccaggaaacaaaacccagcaagttattcacattatagattttggtttggcaaaggaatatattgatccggagacaaagaaacacataccatacagagaacacaagagccttacaggaacagctagatatatgagcataaacacacatttaggaaaagaacaaagtagaagagacgatttagaagctttaggtcatatgttcatgtattttctgagaggcagtcttccttggcaaggcttaaaggctgacacattaaaggagaggtatcagaaaattggagatacaaaacgggctacaccaatagaagtgttatgtgaaaattttccagaaatggcaacatatcttcgttatgtaagaaggctagatttttttgaaaaaccagactatgactacttaagaaagctttttactgacttgtttgatcgaaaaggatatatgtttgattatgaatatgactggattggtaaacagttgcctactccagtgggtgcagttcagcaagatcctgctctgtcatcaaacagagaagcacatcaacacagagataagatgcaacaatccaaaaaccagtcggcagaccacagggcagcttgggactcccagcaggcaaatccccaccatttgagagctcaccttgcagcagacagacatggtggctcggtacaggttgtaagttctacaaatggagagttaaacacagatgaccccaccgcaggacgttcaaatgcacccatcacagcccctactgaagtagaagtgatggatgaaaccaagtgctgctgttttttcaaacgaaggaaaaggaaaaccatacagcgccacaaatgactctggacacagacagatcctggggagttacttacatgttcatctgctgtcttgtgattaaaatcatctctgtagtgaccacgtatattttcaaggactcactcttagaaacaaaaatgtcatactttcatacttcattttgtggttgtcttacattctttttctttttttttttttctctaatttaacctttatggaagctttaaagttttgtcaaaacatgagtgctttgcccatcagtgaatggaatggaccaatgaggtggtatcaatgaatatagttccatagaacattttccagaagttcttctgttgtagaaagcagtacagtatcttaagtgtcaaccagttatatacctaatctggttttttataacttctgtaagagcataatcaaacaggaattttcttttctcagtggataatacaacagagaaaacagagttgcccaaatatttaaaagaagttattccttgagaagttcatattttgtgacatctgcattgatttcagtattactgatggtactgttattcataagtcatattaacattctctccgtgaaatcatggtacagtcactgcccagaggtactgaggaaaaagcaatatgggttcggcagatggtggtggtaaaatgaatcttaaggagtgtggtaaatatgtgctccgcttttgttgcatcactatgtgaagtactgtgttgcagaagtggcaaaagcgcttatttttaaaaatgcaaaatatttgtacaatgtaactttatgcttccaaataataatgtatgttagacagcaagaaatgaatactttaaaaagtgatgtatgttggagttataaagaaatacactaaggagaggtagtaaatgtgaaccttgttgcagtgtataaggtggaagcctaaagaaatctcaccgaaacttactgctgaatgattacattctcccttaagcagaaaactttggatgtgccatgcaatggtgtctgtgtaattattttgctctttgattaaaaaaaagacccccagcaataaaaagtgggtcactctatgcc

SEQ ID NO: 114567 - DNA, 1356 bp, Homo sapiens
  Payload ID: 2396
  Gene Symbol: CSNK1G3
  Gene Name: casein kinase 1, gamma 3
  Uniprot ID: Q9Y6M4
  ENST ID: ENST00000511130
  CDS Start-End: 362-1297
gtgcattcattccgggctgcatcggtggcgacagcagaggctcgggcggcgactctccggccagcggcggcggtaggaggcaccagcggcagtgcagggaccgaatccgagcagcgctgcgttacctctctctctcgctccttcccccctacctcgctcgctcgctcgctcgctccctgcgtggctcgctttcctcctccggccgccggcgggtgtgatgtgccgccgccgctgcccccgccggcgctgacggactgggggcgccgcccgcgcccgggaccgacccctctgctcgcggccgcgcctttgagatggtatacctcaagtttactatttcggcccttgtggtaaatacaatgctatggtgctggaactgctgggacctagtttggaagacttgtttgacttgtgtgacagaacattttctcttaaaacagttctcatgatagctatacaactgatttctcgcatggaatatgtccattcaaagaacttgatatacagagatgtaaaacctgagaacttcttaataggacgaccaggaaacaaaacccagcaagttattcacattatagattttggtttggcaaaggaatatattgatccggagacaaagaaacacataccatacagagaacacaagagccttacaggaacagctagatatatgagcataaacacacatttaggaaaagaacaaagtagaagagacgatttagaagctttaggtcatatgttcatgtattttctgagaggcagtcttccttggcaaggcttaaaggctgacacattaaaggagaggtatcagaaaattggagatacaaaacgggctacaccaatagaagtgttatgtgaaaattttccagaagaaatggcaacatatcttcgttatgtaagaaggctagatttttttgaaaaaccagactatgactacttaagaaagctttttactgacttgtttgatcgaaaaggatatatgtttgattatgaatatgactggattggtaaacagttgcctactccagtgggtgcagttcagcaagatcctgctctgtcatcaaacagagaagcacatcaacacagagataagatgcaacaatccaaaaaccaggttgtaagttctacaaatggagagttaaacacagatgaccccaccgcaggacgttcaaatgcacccatcacagcccctactgaagtagaagtgatggatgaaaccaactgccagaaagtgttgaacatgtggtgctgctgttttttcaaacgaaggaaaaggaaaaccatacagcgccacaaatgactctggacacagacagatcctggggagttacttacatgttcatctgctgtcttgtgatt

SEQ ID NO: 114568 - DNA, 1569 bp, Homo sapiens
  Payload ID: 2396
  Gene Symbol: CSNK1G3
  Gene Name: casein kinase 1, gamma 3
  Uniprot ID: Q9Y6M4
  ENST ID: ENST00000512718
  CDS Start-End: 359-1405
gtgcattcattccgggctgcatcggtggcgacagcagaggctcgggcggcgactctccggccagcggcggcggtaggaggcaccagcggcagtgcagggaccgaatccgagcagcgctgcgttacctctctctctcgctccttcccccctacctcgctcgctcgctcgctcgctccctgcgtggctcgctttcctcctccggccgccggcgggtgtgatgtgccgccgccgctgcccccgccggcgctgacggactgggggcgccgcccgcgcccgggaccgacccctctgctcgcggccgcgcctttgagggaaaaatttatacacaaatgaatatgtggcaattaagttggagcccatgaaatcaagagcaccacagctacatttggaatacagattctataagcagttaggatctggagatggtatacctcaagtttactatttcggcccttgtggtaaatacaatgctatggtgctggaactgctgggacctagtttggaagacttgtttgacttgtgtgacagaacattttctcttaaaacagttctcatgatagctatacaactgatttctcgcatggaatatgtccattcaaagaacttgatatacagagatgtaaaacctgagaacttcttaataggacgaccaggaaacaaaacccagcaagttattcacattatagattttggtttggcaaaggaatatattgatccggagacaaagaaacacataccatacagagaacacaagagccttacaggaacagctagatatatgagcataaacacacatttaggaaaagaacaaagtagaagagacgatttagaagctttaggtcatatgttcatgtattttctgagaggcagtcttccttggcaaggcttaaaggctgacacattaaaggagaggtatcagaaaattggagatacaaaacgggctacaccaatagaagtgttatgtgaaaattttccagaaatggcaacatatcttcgttatgtaagaaggctagatttttttgaaaaaccagactatgactacttaagaaagctttttactgacttgtttgatcgaaaaggatatatgtttgattatgaatatgactggattggtaaacagttgcctactccagtgggtgcagttcagcaagatcctgctctgtcatcaaacagagaagcacatcaacacagagataagatgcaacaatccaaaaaccaggttgtaagttctacaaatggagagttaaacacagatgaccccaccgcaggacgttcaaatgcacccatcacagcccctactgaagtagaagtgatggatgaaaccaactgccagaaagtgttgaacatgtggtgctgctgttttttcaaacgaaggaaaaggaaaaccatacagcgccacaaatgactctggacacagacagatcctggggagttacttacatgttcatctgctgtcttgtgattaaaatcatctctgtagtgaccacgtatattttcaaggactcactcttagaaacaaaaatgtcatactttcatacttcattttgtggttgtcttacattctttttc

SEQ ID NO: 114569 - DNA, 1979 bp, Homo sapiens
  Payload ID: 2396
  Gene Symbol: CSNK1G3
  Gene Name: casein kinase 1, gamma 3
  Uniprot ID: Q9Y6M4
  ENST ID: ENST00000510842
  CDS Start-End: 248-1522
ctctctatcaatatcagctcacatcattgaaaagataattttgaagacatgttttgctgaaaagacactaagaaaaattttacgaatgggatgaacatgctccagttaattgactacctactgcaatttgaatgttaacattacccatctggtacagttacctagtgatgtacctattttcacaataccctgtttcagtgtgcttgtcttgattaaagaattcaaagtggagtaccgcaaacttgatatggaaaataaaaagaaagacaaggacaaatcagatgatagaatggcacgacctagtggtcgatcgggacacaacactcgaggaactgggtcttcatcgtctggagttttaatggttggacctaactttagagttggaaaaaaaattggatgtggcaattttggagaattacgattagggaaaaatttatacacaaatgaatatgtggcaattaagttggagcccatgaaatcaagagcaccacagctacatttggaatacagattctataagcagttaggatctggagatggtatacctcaagtttactatttcggcccttgtggtaaatacaatgctatggtgctggaactgctgggacctagtttggaagacttgtttgacttgtgtgacagaacattttctcttaaaacagttctcatgatagctatacaactgatttctcgcatggaatatgtccattcaaagaacttgatatacagagatgtaaaacctgagaacttcttaataggacgaccaggaaacaaaacccagcaagttattcacattatagattttggtttggcaaaggaatatattgatccggagacaaagaaacacataccatacagagaacacaagagccttacaggaacagctagatatatgagcataaacacacatttaggaaaagaacaaagtagaagagacgatttagaagctttaggtcatatgttcatgtattttctgagaggcagtcttccttggcaaggcttaaaggctgacacattaaaggagaggtatcagaaaattggagatacaaaacgggctacaccaatagaagtgttatgtgaaaattttccagaagaaatggcaacatatcttcgttatgtaagaaggctagatttttttgaaaaaccagactatgactacttaagaaagctttttactgacttgtttgatcgaaaaggatatatgtttgattatgaatatgactggattggtaaacagttgcctactccagtgggtgcagttcagcaagatcctgctctgtcatcaaacagagaagcacatcaacacagagataagatgcaacaatccaaaaaccaggttgtaagttctacaaatggagagttaaacacagatgaccccaccgcaggacgttcaaatgcacccatcacagcccctactgaagtagaagtgatggatgaaaccaactgccagaaagtgttgaacatgtggtgctgctgttttttcaaacgaaggaaaaggaaaaccatacagcgccacaaatgactctggacacagacagatcctggggagttacttacatgttcatctgctgtcttgtgattaaaatcatctctgtagtgaccacgtatattttcaaggactcactcttagaaacaaaaatgtcatactttcatacttcattttgtggttgtcttacattctttttctttttttttttttctctaatttaacctttatggaagctttaaagttttgtcaaaacatgagtgctttgcccatcagtgaatggaatggaccaatgaggtggtatcaatgaatatagttccatagaacattttccagaagttcttctgttgtagaaagcagtacagtatcttaagtgtcaaccagttatatacctaatctggttttttataacttctgtaagagcataatcaaacaggaattttcttttctcagtggataatacaacagagaaaacagagttgcccaaatattt

SEQ ID NO: 114570 - DNA, 2580 bp, Homo sapiens
  Payload ID: 2396
  Gene Symbol: CSNK1G3
  Gene Name: casein kinase 1, gamma 3
  Uniprot ID: Q9Y6M4
  ENST ID: ENST00000521364
  CDS Start-End: 250-1521
agctctctatcaatatcagctcacatcattgaaaagataattttgaagacatgttttgctgaaaagacactaagaaaaattttacgaatgggatgaacatgctccagttaattgactacctactgcaatttgaatgttaacattacccatctggtacagttacctagtgatgtacctattttcacaataccctgtttcagtgtgcttgtcttgattaaagaattcaaagtggagtaccgcaaacttgatatggaaaataaaaagaaagacaaggacaaatcagatgatagaatggcacgacctagtggtcgatcgggacacaacactcgaggaactgggtcttcatcgtctggagttttaatggttggacctaactttagagttggaaaaaaaattggatgtggcaattttggagaattacgattagggaaaaatttatacacaaatgaatatgtggcaattaagttggagcccatgaaatcaagagcaccacagctacatttggaatacagattctataagcagttaggatctggagatggtatacctcaagtttactatttcggcccttgtggtaaatacaatgctatggtgctggaactgctgggacctagtttggaagacttgtttgacttgtgtgacagaacattttctcttaaaacagttctcatgatagctatacaactgatttctcgcatggaatatgtccattcaaagaacttgatatacagagatgtaaaacctgagaacttcttaataggacgaccaggaaacaaaacccagcaagttattcacattatagattttggtttggcaaaggaatatattgatccggagacaaagaaacacataccatacagagaacacaagagccttacaggaacagctagatatatgagcataaacacacatttaggaaaagaacaaagtagaagagacgatttagaagctttaggtcatatgttcatgtattttctgagaggcagtcttccttggcaaggcttaaaggctgacacattaaaggagaggtatcagaaaattggagatacaaaacgggctacaccaatagaagtgttatgtgaaaattttccagaaatggcaacatatcttcgttatgtaagaaggctagatttttttgaaaaaccagactatgactacttaagaaagctttttactgacttgtttgatcgaaaaggatatatgtttgattatgaatatgactggattggtaaacagttgcctactccagtgggtgcagttcagcaagatcctgctctgtcatcaaacagagaagcacatcaacacagagataagatgcaacaatccaaaaaccaggttgtaagttctacaaatggagagttaaacacagatgaccccaccgcaggacgttcaaatgcacccatcacagcccctactgaagtagaagtgatggatgaaaccaactgccagaaagtgttgaacatgtggtgctgctgttttttcaaacgaaggaaaaggaaaaccatacagcgccacaaatgactctggacacagacagatcctggggagttacttacatgttcatctgctgtcttgtgattaaaatcatctctgtagtgaccacgtatattttcaaggactcactcttagaaacaaaaatgtcatactttcatacttcattttgtggttgtcttacattctttttctttttttttttttctctaatttaacctttatggaagctttaaagttttgtcaaaacatgagtgctttgcccatcagtgaatggaatggaccaatgaggtggtatcaatgaatatagttccatagaacattttccagaagttcttctgttgtagaaagcagtacagtatcttaagtgtcaaccagttatatacctaatctggttttttataacttctgtaagagcataatcaaacaggaattttcttttctcagtggataatacaacagagaaaacagagttgcccaaatatttaaaagaagttattccttgagaagttcatattttgtgacatctgcattgatttcagtattactgatggtactgttattcataagtcatattaacattctctccgtgaaatcatggtacagtcactgcccagaggtactgaggaaaaagcaatatgggttcggcagatggtggtggtaaaatgaatcttaaggagtgtggtaaatatgtgctccgcttttgttgcatcactatgtgaagtactgtgttgcagaagtggcaaaagcgcttatttttaaaaatgcaaaatatttgtacaatgtaactttatgcttccaaataataatgtatgttagacagcaagaaatgaatactttaaaaagtgatgtatgttggagttataaagaaatacactaaggagaggtagtaaatgtgaaccttgttgcagtgtataaggtggaagcctaaagaaatctcaccgaaacttactgctgaatgattacattctcccttaagcagaaaactttggatgtgccatgcaatggtgtctgtgtaattattttgctctttgattaaaaaaaagacccccagcaataaaaagtgggtcactctatgccctctgtgca

SEQ ID NO: 114571 - DNA, 1115 bp, Homo sapiens
  Payload ID: 2396
  Gene Symbol: CSNK1G3
  Gene Name: casein kinase 1, gamma 3
  ENST ID: ENST00000515322
  CDS Start-End: 1-494
aggctgacacattaaaggagaggtatcagaaaattggagatacaaaacgggctacaccaatagaagtgttatgtgaaaattttccagaagaaatggcaacatatcttcgttatgtaagaaggctagatttttttgaaaaaccagactatgactacttaagaaagctttttactgacttgtttgatcgaaaaggatatatgtttgattatgaatatgactggattggtaaacagttgcctactccagtgggtgcagttcagcaagatcctgctctgtcatcaaacagagaagcacatcaacacagagataagatgcaacaatccaaaaaccaggttgtaagttctacaaatggagagttaaacacagatgaccccaccgcaggacgttcaaatgcacccatcacagcccctactgaagtagaagtgatggatgaaaccaagtgctgctgttttttcaaacgaaggaaaaggaaaaccatacagcgccacaaatgactctggacacagacagatcctggggagttacttacatgttcatctgctgtcttgtgattaaaatcatctctgtagtgaccacgtatattttcaaggactcactcttagaaacaaaaatgtcatactttcatacttcattttgtggttgtcttacattctttttctttttttttttttctctaatttaacctttatggaagctttaaagttttgtcaaaacatgagtgctttgcccatcagtgaatggaatggaccaatgaggtggtatcaatgaatatagttccatagaacattttccagaagttcttctgttgtagaaagcagtacagtatcttaagtgtcaaccagttatatacctaatctggttttttataacttctgtaagagcataatcaaacaggaattttcttttctcagtggataatacaacagagaaaacagagttgcccaaatatttaaaagaagttattccttgagaagttcatattttgtgacatctgcattgatttcagtattactgatggtactgttattcataagtcatattaacattctctccgtgaaatcatggtacagtcactgcccagaggtactgaggaaaaagcaatatgggttcggcag

SEQ ID NO: 114572 - DNA, 4416 bp, Homo sapiens
  Payload ID: 2397
  Gene Symbol: CSNK2A1
  Gene Name: casein kinase 2, alpha 1 polypeptide
  Uniprot ID: P68400
  ENST ID: ENST00000217244
  CDS Start-End: 377-1552
gggggtttccgcttccggcagcagcggctgcagcctcgctctggtccctgcggctggcggccgagccgtgtgtctcctcctccatcgccgccatattgtctgtgtgagcagaggggagagcggccgccgccgctgccgcttccaccacagctctatcaaggcttgtcaagcagtgtgctcatcacatggtaaatcatgcagcgtggaacctcataaaatctccaagaaacatcattcacccatactgactagtttcacatctctttgtttgaagaaaacaggtctgaaacaaggtcttacccccagctgcttctgaacacagtgactgccagatctccaaacatcaagtccagctttgtccgccaacctgtctgacatgtcgggacccgtgccaagcagggccagagtttacacagatgttaatacacacagacctcgagaatactgggattacgagtcacatgtggtggaatggggaaatcaagatgactaccagctggttcgaaaattaggccgaggtaaatacagtgaagtatttgaagccatcaacatcacaaataatgaaaaagttgttgttaaaattctcaagccagtaaaaaagaagaaaattaagcgtgaaataaagattttggagaatttgagaggaggtcccaacatcatcacactggcagacattgtaaaagaccctgtgtcacgaacccccgccttggtttttgaacacgtaaacaacacagacttcaagcaattgtaccagacgttaacagactatgatattcgattttacatgtatgagattctgaaggccctggattattgtcacagcatgggaattatgcacagagatgtcaagccccataatgtcatgattgatcatgagcacagaaagctacgactaatagactggggtttggctgagttttatcatcctggccaagaatataatgtccgagttgcttcccgatacttcaaaggtcctgagctacttgtagactatcagatgtacgattatagtttggatatgtggagtttgggttgtatgctggcaagtatgatctttcggaaggagccatttttccatggacatgacaattatgatcagttggtgaggatagccaaggttctggggacagaagatttatatgactatattgacaaatacaacattgaattagatccacgtttcaatgatatcttgggcagacactctcgaaagcgatgggaacgctttgtccacagtgaaaatcagcaccttgtcagccctgaggccttggatttcctggacaaactgctgcgatatgaccaccagtcacggcttactgcaagagaggcaatggagcacccctatttctacactgttgtgaaggaccaggctcgaatgggttcatctagcatgccagggggcagtacgcccgtcagcagcgccaatatgatgtcagggatttcttcagtgccaaccccttcaccccttggacctctggcaggctcaccagtgattgctgctgccaacccccttgggatgcctgttccagctgccgctggcgctcagcagtaacggccctatctgtctcctgatgcctgagcagaggtgggggagtccaccctctccttgatgcagcttgcgcctggcggggaggggtgaaacacttcagaagcaccgtgtctgaaccgttgcttgtggatttatagtagttcagtcataaaaaaaaaattataataggctgattttcttttttctttttttttttaactcgaacttttcataactcaggggattccctgaaaaattacctgcaggtggaatatttcatggacaaatttttttttctcccctcccaaatttagttcctcatcacaaaagaacaaagataaaccagcctcaatcccggctgctgcatttaggtggagacttcttcccattcccaccattgttcctccaccgtcccacactttagggggttggtatctcgtgctcttctccagagattacaaaaatgtagcttctcaggggaggcaggaagaaaggaaggaaggaaagaaggaagggaggacccaatctataggagcagtggactgcttgctggtcgcttacatcactttactccataagcgcttcagtggggttatcctagtggctcttgtggaagtgtgtcttagttacatcaagatgttgaaaatctacccaaaatgcagacagatactaaaaacttctgttcagtaagaatcatgtcttactgatctaaccctaaatccaactcatttatacttttatttttagttcagtttaaaatgttgataccttccctcccaggctccttaccttggtcttttccctgttcatctcccaacatgctgtgctccatagctggtaggagagggaaggcaaaatctttcttagttttctttgtcttggccattttgaattcatttagttactgggcataacttactgctttttacaaaagaaacaaacattgtctgtacaggtttcatgctagagctaatgggagatgtggccacactgacttccattttaagctttctaccttcttttcctccgaccgtccccttccctcacatgccatccagtgagaagacctgctcctcagtcttgtaaatgtatcttgagaggtaggagcagagccactatctccattgaagctgaaatggtagacctgtaattgtgggaaaactataaactctcttgttacagccccgccaccccttgctgtgtgtatatatataatactttgtccttcatatgtgaaagatccagtgttggaattctttggtgtaaataaacgtttggttttatttatcaaggttagatttaagttccctgtgtaaaggtcttgctgggtgggtgtctcatgttcacatctgaggggcctgcagccctgtaccgtggaggcttcccaaggcccccattttatacacccctcgttcgacccatggtaccgggcagagcagagaggccttaaaaaaaaagcaccacaagccaaagcgtctctggggattaaggatcctttgccataaaactcattttgtgtctcagcagtgcagggattggggatggaaaaagtcgccagtttttgtgtgtttgtgtgtgtgtgtaaagtggactttccactgtaatccaaccacctaagtttatcaggtgcttcactgaggaagcctagttttttaagcacaatagcaaaaccatcagctctgtattttctcctgttatttcattacagtagctgcttgtgggaactaggaaaaattcttccaacatattttaaggcctaaaatcttagttccccattctcctaccttatagattcacaggcctttctcgcctaggcatcatagataaacgtaattgtttggggagttgaatttaatgaacttatctaactttgtaacccatcttggctttagtaactttatcaaggtggtggctttagtgaatataatggtaaactttagaggacgctaaagcctccttttatagcgcttctcaacggtagggagagctgaagggaaaacattctgactgtgtggcagggtgattttcttccttatgaccacttacagtggatatttattgtacttgacccttttatgccctagaatgctgtgagggttaccatgttgaatttgtgcagaagctaaaagcaccagatgtgccagagatgcaatttgtgattatgtttgcactggattgtgatttgaacaggacacttataactaatgagttctttcttttgaggtggggagagggttgtaaatcaagacttcataccctatccttgtagctcggaaattgaggtgtagcttaggctgatgcggagagctgcagacagctggacctccttacacccatcagaccttggaataaaccgaaggtgaatgcagaggactctgaggtgccacccaagagccttttaaaataaatagaagtttttaaaaatgctacttaagagtcactgcagaagcatggagagagagaaaaaaaaaaaagacccaattgggtggggggtgggggggaggcaagggtttacagagtaacaacttacgtgttgttgtaaattacctcatctgtataccttgtattgggacactatttctcagcactacctgtgtctgcattgcttagatggcaggaaatggaatggccaacatgaaaggttatgttggcaattactctgaaagattttttaaagtatttttaaactttgtttgaagtggtccctcccctcttcctctgcttttttttaagtttgaagccagaaggccctccccaccttgctttattggttgtaattgtattgtaattggtatgactaaaccataactgtgctgggaagaagttgtgccatgaaggtctttaattttttttaataaaaacatttaaataaatgaaatgtccctgca

SEQ ID NO: 114573 - DNA, 4299 bp, Homo sapiens
  Payload ID: 2397
  Gene Symbol: CSNK2A1
  Gene Name: casein kinase 2, alpha 1 polypeptide
  Uniprot ID: P68400
  ENST ID: ENST00000349736
  CDS Start-End: 260-1435
gggggtttccgcttccggcagcagcggctgcagcctcgctctggtccctgcggctggcggccgagccgtgtgtctcctcctccatcgccgccatattgtctgtgtgagcagaggggagagcggccgccgccgctgccgcttccaccacagtttgaagaaaacaggtctgaaacaaggtcttacccccagctgcttctgaacacagtgactgccagatctccaaacatcaagtccagctttgtccgccaacctgtctgacatgtcgggacccgtgccaagcagggccagagtttacacagatgttaatacacacagacctcgagaatactgggattacgagtcacatgtggtggaatggggaaatcaagatgactaccagctggttcgaaaattaggccgaggtaaatacagtgaagtatttgaagccatcaacatcacaaataatgaaaaagttgttgttaaaattctcaagccagtaaaaaagaagaaaattaagcgtgaaataaagattttggagaatttgagaggaggtcccaacatcatcacactggcagacattgtaaaagaccctgtgtcacgaacccccgccttggtttttgaacacgtaaacaacacagacttcaagcaattgtaccagacgttaacagactatgatattcgattttacatgtatgagattctgaaggccctggattattgtcacagcatgggaattatgcacagagatgtcaagccccataatgtcatgattgatcatgagcacagaaagctacgactaatagactggggtttggctgagttttatcatcctggccaagaatataatgtccgagttgcttcccgatacttcaaaggtcctgagctacttgtagactatcagatgtacgattatagtttggatatgtggagtttgggttgtatgctggcaagtatgatctttcggaaggagccatttttccatggacatgacaattatgatcagttggtgaggatagccaaggttctggggacagaagatttatatgactatattgacaaatacaacattgaattagatccacgtttcaatgatatcttgggcagacactctcgaaagcgatgggaacgctttgtccacagtgaaaatcagcaccttgtcagccctgaggccttggatttcctggacaaactgctgcgatatgaccaccagtcacggcttactgcaagagaggcaatggagcacccctatttctacactgttgtgaaggaccaggctcgaatgggttcatctagcatgccagggggcagtacgcccgtcagcagcgccaatatgatgtcagggatttcttcagtgccaaccccttcaccccttggacctctggcaggctcaccagtgattgctgctgccaacccccttgggatgcctgttccagctgccgctggcgctcagcagtaacggccctatctgtctcctgatgcctgagcagaggtgggggagtccaccctctccttgatgcagcttgcgcctggcggggaggggtgaaacacttcagaagcaccgtgtctgaaccgttgcttgtggatttatagtagttcagtcataaaaaaaaaattataataggctgattttcttttttctttttttttttaactcgaacttttcataactcaggggattccctgaaaaattacctgcaggtggaatatttcatggacaaatttttttttctcccctcccaaatttagttcctcatcacaaaagaacaaagataaaccagcctcaatcccggctgctgcatttaggtggagacttcttcccattcccaccattgttcctccaccgtcccacactttagggggttggtatctcgtgctcttctccagagattacaaaaatgtagcttctcaggggaggcaggaagaaaggaaggaaggaaagaaggaagggaggacccaatctataggagcagtggactgcttgctggtcgcttacatcactttactccataagcgcttcagtggggttatcctagtggctcttgtggaagtgtgtcttagttacatcaagatgttgaaaatctacccaaaatgcagacagatactaaaaacttctgttcagtaagaatcatgtcttactgatctaaccctaaatccaactcatttatacttttatttttagttcagtttaaaatgttgataccttccctcccaggctccttaccttggtcttttccctgttcatctcccaacatgctgtgctccatagctggtaggagagggaaggcaaaatctttcttagttttctttgtcttggccattttgaattcatttagttactgggcataacttactgctttttacaaaagaaacaaacattgtctgtacaggtttcatgctagagctaatgggagatgtggccacactgacttccattttaagctttctaccttcttttcctccgaccgtccccttccctcacatgccatccagtgagaagacctgctcctcagtcttgtaaatgtatcttgagaggtaggagcagagccactatctccattgaagctgaaatggtagacctgtaattgtgggaaaactataaactctcttgttacagccccgccaccccttgctgtgtgtatatatataatactttgtccttcatatgtgaaagatccagtgttggaattctttggtgtaaataaacgtttggttttatttatcaaggttagatttaagttccctgtgtaaaggtcttgctgggtgggtgtctcatgttcacatctgaggggcctgcagccctgtaccgtggaggcttcccaaggcccccattttatacacccctcgttcgacccatggtaccgggcagagcagagaggccttaaaaaaaaagcaccacaagccaaagcgtctctggggattaaggatcctttgccataaaactcattttgtgtctcagcagtgcagggattggggatggaaaaagtcgccagtttttgtgtgtttgtgtgtgtgtgtaaagtggactttccactgtaatccaaccacctaagtttatcaggtgcttcactgaggaagcctagttttttaagcacaatagcaaaaccatcagctctgtattttctcctgttatttcattacagtagctgcttgtgggaactaggaaaaattcttccaacatattttaaggcctaaaatcttagttccccattctcctaccttatagattcacaggcctttctcgcctaggcatcatagataaacgtaattgtttggggagttgaatttaatgaacttatctaactttgtaacccatcttggctttagtaactttatcaaggtggtggctttagtgaatataatggtaaactttagaggacgctaaagcctccttttatagcgcttctcaacggtagggagagctgaagggaaaacattctgactgtgtggcagggtgattttcttccttatgaccacttacagtggatatttattgtacttgacccttttatgccctagaatgctgtgagggttaccatgttgaatttgtgcagaagctaaaagcaccagatgtgccagagatgcaatttgtgattatgtttgcactggattgtgatttgaacaggacacttataactaatgagttctttcttttgaggtggggagagggttgtaaatcaagacttcataccctatccttgtagctcggaaattgaggtgtagcttaggctgatgcggagagctgcagacagctggacctccttacacccatcagaccttggaataaaccgaaggtgaatgcagaggactctgaggtgccacccaagagccttttaaaataaatagaagtttttaaaaatgctacttaagagtcactgcagaagcatggagagagagaaaaaaaaaaaagacccaattgggtggggggtgggggggaggcaagggtttacagagtaacaacttacgtgttgttgtaaattacctcatctgtataccttgtattgggacactatttctcagcactacctgtgtctgcattgcttagatggcaggaaatggaatggccaacatgaaaggttatgttggcaattactctgaaagattttttaaagtatttttaaactttgtttgaagtggtccctcccctcttcctctgcttttttttaagtttgaagccagaaggccctccccaccttgctttattggttgtaattgtattgtaattggtatgactaaaccataactgtgctgggaagaagttgtgccatgaaggtctttaattttttttaataaaaacatttaaataaatgaaatgtccctgca

SEQ ID NO: 114574 - DNA, 1451 bp, Homo sapiens
  Payload ID: 2397
  Gene Symbol: CSNK2A1
  Gene Name: casein kinase 2, alpha 1 polypeptide
  Uniprot ID: P68400
  ENST ID: ENST00000400217
  CDS Start-End: 424-1191
ctcgctctggtccctgcggctggcggccgagccgtgtgtctcctcctccatcgccgccatattgtctgtgtgagcagaggggagagcggccgccgccgctgccgcttccaccacagaaatcaagatgactaccagctggttcgaaaattaggccgaggtaaatacagtgaagtatttgaagccatcaacatcacaaataatgaaaaagttgttgttaaaattctcaagccagtaaaaaagaagaaaattaagcgtgaaataaagattttggagaatttgagaggaggtcccaacatcatcacactggcagacattgtaaaagaccctgtgtcacgaacccccgccttggtttttgaacacgtaaacaacacagacttcaagcaattgtaccagacgttaacagactatgatattcgattttacatgtatgagattctgaaggccctggattattgtcacagcatgggaattatgcacagagatgtcaagccccataatgtcatgattgatcatgagcacagaaagctacgactaatagactggggtttggctgagttttatcatcctggccaagaatataatgtccgagttgcttcccgatacttcaaaggtcctgagctacttgtagactatcagatgtacgattatagtttggatatgtggagtttgggttgtatgctggcaagtatgatctttcggaaggagccatttttccatggacatgacaattatgatcagttggtgaggatagccaaggttctggggacagaagatttatatgactatattgacaaatacaacattgaattagatccacgtttcaatgatatcttgggcagacactctcgaaagcgatgggaacgctttgtccacagtgaaaatcagcaccttgtcagccctgaggccttggatttcctggacaaactgctgcgatatgaccaccagtcacggcttactgcaagagaggcaatggagcacccctatttctacactgttgtgaaggaccaggctcgaatgggttcatctagcatgccagggggcagtacgcccgtcagcagcgccaatatgatgtcagggatttcttcagtgccaaccccttcaccccttggacctctggcaggctcaccagtgattgctgctgccaacccccttgggatgcctgttccagctgccgctggcgctcagcagtaacggccctatctgtctcctgatgcctgagcagaggtgggggagtccaccctctccttgatgcagcttgcgcctggcggggaggggtgaaacacttcagaagcaccgtgtctgaaccgttgcttgtggatttatagtagttcagtcataaaaaaaaaattataataggctgattttcttttttctttttttttttaactcgaacttttcataactcaggggattccctgaaaaattacctgcaggtggaatatttcatggac

SEQ ID NO: 114575 - DNA, 1499 bp, Homo sapiens
  Payload ID: 2397
  Gene Symbol: CSNK2A1
  Gene Name: casein kinase 2, alpha 1 polypeptide
  ENST ID: ENST00000400227
  CDS Start-End: 135-1292
gccgccgctgccgcttccaccacagtttgaagaaaacaggtctgaaacaaggtcttacccccagctgcttctgaacacagtgactgccagatctccaaacatcaagtccagctttgtccgccaacctgtctgacatgtcgggacccgtgccaagcagggccagagtttacacagatgttaatacacacagacctcgagaatactgggattacgagtcacatgtggtggaatggggaaatcaagatgactaccagctggttcgaaaattaggccgaggtaaatacagtgaagtatttgaagccatcaacatcacaaataatgaaaaagttgttgttaaaattctcaagccagtaaaaaagaagaaaattaagcgtgaaataaagattttggagaatttgagaggaggtcccaacatcatcacactggcagacattgtaaaagaccctgtgtcacgaacccccgccttggtttttgaacacgtaaacaacacagacttcaagcaattgtaccagacgttaacagactatgatattcgattttacatgtatgagattctgaaggccctggattattgtcacagcatgggaattatgcacagagatgtcaagccccataatgtcatgattgatcatgagcacagaaagctacgactaatagactggggtttggctgagttttatcatcctggccaagaatataatgtccgagttgcttcccgatacttcaaaggtcctgagctacttgtagactatcagatgtacgattatagtttggatatgtggagtttgggttgtatgctggcaagtatgatctttcggaaggagccatttttccatggacatgacaattatgatcagttggtgaggatagccaaggttctggggacagaagatttatatgactatattgacaaatacaacattgaattagatccacgtttcaatgatatcttgggcagacactctcgaaagcgatgggaacgctttgtccacagtgaaaatcagcaccttgtcagccctgaggccttggatttcctggacaaactgctgcgatatgaccaccagtcacggcttactgcaagagaggcaatggagcacccctatttctacactgttgtgaaggaccaggctcgaatgggttcatctagcatgccagggggcagtacgcccgtcagcagcgccaatatgatgtcagagatgaagttttgccgtgttgcccaggctggtcttgaactcctgagctcaacagtctacccgccttggcctcccaaagtgctgagattagaggcatgagccaccacacctggcccactagggattcttattggcctcaatgtgagaagcccttccccaggtacctccagatggaagcttacaggatggtcagtccatttcttagagaagttcctggggggattgagtatttctgagtcagcttcactcttgcatcatctgctttgacagttttcttggctcctgtaatgagaaaaagggaaaaaa

SEQ ID NO: 114576 - DNA, 577 bp, Homo sapiens
  Payload ID: 2397
  Gene Symbol: CSNK2A1
  Gene Name: casein kinase 2, alpha 1 polypeptide
  ENST ID: ENST00000608066
  CDS Start-End: 339-577
atattgtctgtgtgagcagaggggagagcggccgccgccgctgccgcttccaccacagccaggcatggtggcgcatgcctgtaatcccagctactcgggaggctgaggcaggagaatcacatgaacctgggaggcggcagaggttgtggtgagccaagatcacgccattgcactccagcctgagcaacaagagcgaaactccatctcaaaaaaaaaaaaaaaagaatagtttgaagaaaacaggtctgaaacaaggtcttacccccagctgcttctgaacacagtgactgccagatctccaaacatcaagtccagctttgtccgccaacctgtctgacatgtcgggacccgtgccaagcagggccagagtttacacagatgttaatacacacagacctcgagaatactgggattacgagtcacatgtggtggaatggggaaatcaagatgactaccagctggttcgaaaattaggccgaggtaaatacagtgaagtatttgaagccatcaacatcacaaataatgaaaaagttgttgttaaaattctcaagccagtaaaaaagaagaaaattaagcg

SEQ ID NO: 114577 - DNA, 581 bp, Homo sapiens
  Payload ID: 2397
  Gene Symbol: CSNK2A1
  Gene Name: casein kinase 2, alpha 1 polypeptide
  ENST ID: ENST00000609525
  CDS Start-End: 358-581
agaaggaatgtgggcagcctctagtggcaaagaccagtccctggctgacaaccagaaagaaatggggacctcagttgtgcaaccagaaggaacctgaatttggtcaacaacctgattgagcttggaagtgaatttcccagtttccaccaaggaatgcaaccttgagacaccttgatttttggcctcgtgagaccctaagcaaaagacctagctagccaagcccacccaacttctgacctacaataacttttgaagaaaacaggtctgaaacaaggtcttacccccagctgcttctgaacacagtgactgccagatctccaaacatcaagtccagctttgtccgccaacctgtctgacatgtcgggacccgtgccaagcagggccagagtttacacagatgttaatacacacagacctcgagaatactgggattacgagtcacatgtggtggaatggggaaatcaagatgactaccagctggttcgaaaattaggccgaggtaaatacagtgaagtatttgaagccatcaacatcacaaataatgaaaaagttgttgttaaaattctcaagccagtaaaaaa

SEQ ID NO: 114578 - DNA, 552 bp, Homo sapiens
  Payload ID: 2397
  Gene Symbol: CSNK2A1
  Gene Name: casein kinase 2, alpha 1 polypeptide
  ENST ID: ENST00000460062
  CDS Start-End: 472-552
atattgtctgtgtgagcagaggggagagcggccgccgccgctgccgcttccaccacagaaatcaagatgactaccagctggttcgaaaattaggccgaggtaaatacagtgaagtatttgaagccatcaacatcacaaataatgaaaaagttgttgttaaaattctcaagccagtaaaaaagaagaaaattaagcgtgaaataaagattttggagaatttgagaggaggtcccaacatcatcacactggcagacattgtaaaagaccctgtggctaagagactgatagcactggaaactgaaatgtgttaatccattttgcaaactcaggtccgatgccgatgggcgatgggcgcattgtcgggctgcctagagcctgtcacgaacccccgccttggtttttgaacacgtaaacaacacagacttcaagcaattgtaccagacgttaacagactatgatattcgattttacatgtatgagattctgaaggccctggattattgtcacagcatgggaattatgcacagagatgtcaagccccataatgtcatg

SEQ ID NO: 114579 - DNA, 2606 bp, Homo sapiens
  Payload ID: 2397
  Gene Symbol: CSNK2A1
  Gene Name: casein kinase 2, alpha 1 polypeptide
  ENST ID: ENST00000619188
  CDS Start-End: 168-1361
atattgtctgtgtgagcagaggggagagcggccgccgccgctgccgcttccaccacagtttgaagaaaacaggtctgaaacaaggtcttacccccagctgcttctgaacacagtgactgccagatctccaaacatcaagtccagctttgtccgccaacctgtctgacatgtcgggacccgtgccaagcagggccagagtttacacagatgttaatacacacagacctcgagaatactgggattacgagtcacatgtggtggaatggggaaatcaagatgactaccagctggttcgaaaattaggccgaggtaaatacagtgaagtatttgaagccatcaacatcacaaataatgaaaaagttgttgttaaaattctcaagccagtaaaaaagaagaaaattaagcgtgaaataaagattttggagaatttgagaggaggtcccaacatcatcacactggcagacattgtaaaagaccctgtgtcacgaacccccgccttggtttttgaacacgtaaacaacacagacttcaagcaattgtaccagacgttaacagactatgatattcgattttacatgtatgagattctgaaggccctggattattgtcacagcatgggaattatgcacagagatgtcaagccccataatgtcatgattgatcatgagcacagaaagctacgactaatagactggggtttggctgagttttatcatcctggccaagaatataatgtccgagttgcttcccgatacttcaaaggtcctgagctacttgtagactatcagatgtacgattatagtttggatatgtggagtttgggttgtatgctggcaagtatgatctttcggaaggagccatttttccatggacatgacaattatgatcagttggtgaggatagccaaggttctggggacagaagatttatatgactatattgacaaatacaacattgaattagatccacgtttcaatgatatcttgggcagacactctcgaaagcgatgggaacgctttgtccacagtgaaaatcagcaccttgtcagccctgaggccttggatttcctggacaaactgctgcgatatgaccaccagtcacggcttactgcaagagaggcaatggagcacccctatttctacactgttgtgaaggaccaggctcgaatgggttcatctagcatgccagggggcagtacgcccgtcagcagcgccaatatgatgtcagggatttcttcagtgccaaccccttcaccccttggacctctggcaggctcaccagtgattgctgctgccaacccccttggatgcctgttccagctgccgctgcgctcagcagtaacggccctatctgtctcctgatgcctgagcagaggtgggggagtccaccctctccttgatgcagcttgcgcctggcggggaggggtgaaacacttcagaagcaccgtgtctgaaccgttgcttgtggatttatagtagttcagtcataaaaaaaaaattataataggctgattttcttttttctttttttttttaactcgaacttttcataactcaggggattccctgaaaaattacctgcaggtggaatatttcatggacaaatttttttttctcccctcccaaatttagttcctcatcacaaaagaacaaagataaaccagcctcaatcccggctgctgcatttaggtggagacttcttcccattcccaccattgttcctccaccgtcccacactttagggggttggtatctcgtgctcttctccagagattacaaaaatgtagcttctcaggggaggcaggaagaaaggaaggaaggaaagaaggaagggaggacccaatctataggagcagtggactgcttgctggtcgcttacatcactttactccataagcgcttcagtggggttatcctagtggctcttgtggaagtgtgtcttagttacatcaagatgttgaaaatctacccaaaatgcagacagatactaaaaacttctgttcagtaagaatcatgtcttactgatctaaccctaaatccaactcatttatacttttatttttagttcagtttaaaatgttgataccttccctcccaggctccttaccttggtcttttccctgttcatctcccaacatgctgtgctccatagctggtaggagagggaaggcaaaatctttcttagttttctttgtcttggccattttgaattcatttagttactgggcataacttactgctttttacaaaagaaacaaacattgtctgtacaggtttcatgctagagctaatgggagatgtggccacactgacttccattttaagctttctaccttcttttcctccgaccgtccccttccctcacatgccatccagtgagaagacctgctcctcagtcttgtaaatgtatcttgagaggtaggagcagagccactatctccattgaagctgaaatggtagacctgtaattgtgggaaaactataaactctcttgttacagccccgccaccccttgctgtgtgtatatatataatactttgtccttcatatgtgaaagatccagtgttggaattctttggtgtaaataaacgtttggttttatttatc

SEQ ID NO: 114580 - DNA, 655 bp, Homo sapiens
  Payload ID: 2397
  Gene Symbol: CSNK2A1
  Gene Name: casein kinase 2, alpha 1 polypeptide
  ENST ID: ENST00000619801
  CDS Start-End: 1-357
gactatattgacaaatacaacattgaattagatccacgtttcaatgatatcttgggcagacactctcgaaagcgatgggaacgctttgtccacagtgaaaatcagcaccttgtcagccctgaggccttggatttcctggacaaactgctgcgatatgaccaccagtcacggcttactgcaagagaggcaatggagcacccctatttctacactgttgtgaaggaccaggctcgaatgggttcatctagcatgccagggggcagtacgcccgtcagcagcgccaatatgatgtcagagccccagtttgagggacagcgggatatccaccatgctgctgtgagactcgggcagttgtgactggtttagaagtggatacacagggagaggtcttctggaaaaggtcttctggagagctgagatcagaagacaatcaactggcttcaaatctaaggagagacaggcacaaaatggaagagatgacatgggcactggttacctggtaaacacaagtggacactggtgagggactgggtcatggagactgcagtagtctttacccttttcagcgtttttcaccatgaaccccactgggagcacacagaagattggagaaagttttaataaaatgtctcaagatctggaagaagacaatggc

SEQ ID NO: 114581 - DNA, 1416 bp, Homo sapiens
  Payload ID: 2398
  Gene Symbol: CSNK2A3
  Gene Name: casein kinase 2, alpha 3 polypeptide
  Uniprot ID: Q8NEV1
  ENST ID: ENST00000528848
  CDS Start-End: 239-1414
gactctcagattagagatgggaaggtttttatttggattttagaaaattgctccccactccatcgccgccatattgtctgtgtgagcagaagggagagcggccacagccgctgccgcttccaccacagtgtgaagaaaacaggtctgaaacaaggtcttacccccaagctgcttctgaacacagtgactgccagatctccaaacatcaagtccagctttgtccgccaacctgtctgacatgtcgggacccgtgccaagcagggccagagtttacacagatgttaatacacacagacctcgagaatactgggattacgagtcacatgtggtggaatggggaaatcaagatgactaccagctggttcgaaaattaggccgaggtaaatacagtgaagtatttgaagccatcaacatcacaaataatgaaaaagttgttgttaaaattctcaagccagtaaaaaagaagaaaattaagcgtgaaataaagattttggagaatttgagaggaggtcccaacatcatcacactggcagacattgtaaaagaccctgtgtcacgaacccccgccttggtttttgaacacgtaaacaacacagacttcaagcaattgtaccagacgttaacagactatgatattcgattttacatgtatgagattctgaaggccctggattattgtcacagcatgggaattatgcacagagatgtcaagccccataatgtcatgattgatcatgagcacagaaagctacgactaatagactggggtttggctgagttttatcatcctggccaagaatataatgtccgagttgcttcccgatacttcaaaggtcctgagctacttgtagactatcagatgtacgattatagtttggatatgtggagattgggttgtatgctggcaagtatgatctttcggaaggagccatttttccatggacgtgacaattatgatcagttggtgaggatagccaagtttctggggacagaagatttatatggctatattgacaaatacaacattgaattagatccacgtttcaatgatatcttgggcagacactctcgaaagcgatgggaacgctttgtccacagtgaaaatcagcaccttgtcagccctgaggccttggatttcctggacaaactgctgcgatatgaccaccagtcacggcttactgcaagagaggccatggagcacccctatttctacactgttgtgaaggaccaggctcgaatgggttcatctagcatgccagggggcagtacgcccgtcagcagcgccaatgtgatgtcagggatttcttcagtgccaactccttcaccccttggacctctggcaggctcaccagtgattgctgctgccaacccccttgggatgcctgttccagctgccactggcgctcagcagtaacg

SEQ ID NO: 114582 - DNA, 1701 bp, Homo sapiens
  Payload ID: 2399
  Gene Symbol: CSNK2A2
  Gene Name: casein kinase 2, alpha prime polypeptide
  Uniprot ID: P19784
  ENST ID: ENST00000262506
  CDS Start-End: 185-1237
cccgcgcccccagcccgcccgcccccgcgggcccggcctggcgcggccgcccgccgccgcgctcctcctcctcctcctccagcgcccggcggcccgctgcctcctccgcccgacgccccgcgtcccccgccgcgccgccgccgccaccctctgcgccccgcgccgccccccggtcccgcccgccatgcccggcccggccgcgggcagcagggcccgggtctacgccgaggtgaacagtctgaggagccgcgagtactgggactacgaggctcacgtcccgagctggggtaatcaagatgattaccaactggttcgaaaacttggtcggggaaaatatagtgaagtatttgaggccattaatatcaccaacaatgagagagtggttgtaaaaatcctgaagccagtgaagaaaaagaagataaaacgagaggttaagattctggagaaccttcgtggtggaacaaatatcattaagctgattgacactgtaaaggaccccgtgtcaaagacaccagctttggtatttgaatatatcaataatacagattttaagcaactctaccagatcctgacagactttgatatccggttttatatgtatgaactacttaaagctctggattactgccacagcaagggaatcatgcacagggatgtgaaacctcacaatgtcatgatagatcaccaacagaaaaagctgcgactgatagattggggtctggcagaattctatcatcctgctcaggagtacaatgttcgtgtagcctcaaggtacttcaagggaccagagctcctcgtggactatcagatgtatgattatagcttggacatgtggagtttgggctgtatgttagcaagcatgatctttcgaagggaaccattcttccatggacaggacaactatgaccagcttgttcgcattgccaaggttctgggtacagaagaactgtatgggtatctgaagaagtatcacatagacctagatccacacttcaacgatatcctgggacaacattcacggaaacgctgggaaaactttatccatagtgagaacagacaccttgtcagccctgaggccctagatcttctggacaaacttctgcgatacgaccatcaacagagactgactgccaaagaggccatggagcacccatacttctaccctgtggtgaaggagcagtcccagccttgtgcagacaatgctgtgctttccagtggtctcacggcagcacgatgaagactggaaagcgacgggtctgttgcggttctcccacttttccataagcagaacaagaaccaaatcaaacgtcttaacgcgtatagagagatcacgttccgtgagcagacacaaaacggtggcaggtttggcgagcacgaactagaccaagcgaagggcagcccaccaccgtatatcaaacctcacttccgaatgtaaaaggctcacttgcctttggcttcctgttgacttcttcccgacccagaaagcatggggaatgtgaagggtatgcagaatgttgttggttactgttgctccccgagcccctcgactcgtcccgtggccgcctgtttttccagcaaaccacgctaactagctgaccacagactccacagtggggggacgggcgcagtatgtggcatggcggcagttacatattattattttaaaagtatatattattgaataaaaggttttaaaagaaa

SEQ ID NO: 114583 - DNA, 547 bp, Homo sapiens
  Payload ID: 2399
  Gene Symbol: CSNK2A2
  Gene Name: casein kinase 2, alpha prime polypeptide
  ENST ID: ENST00000565188
  CDS Start-End: 143-547
gcggccgcccgccgccgcgctcctcctcctcctcctccagcgcccggcggcccgctgcctcctccgcccgacgccccgcgtcccccgccgcgccgccgccgccaccctctgcgccccgcgccgccccccggtcccgcccgccatgcccggcccggccgcgggcagcagggcccgggtctacgccgaggtgaacagtctgaggagccgcgagtactgggactacgaggctcacgtcccgagctggggtaatcaagatgattaccaactggttcgaaaacttggtcggggaaaatatagtgaagtatttgaggccattaatatcaccaacaatgagagagtggttgtaaaaatcctgaagccagtgaagaaaaagaagataaaacgagaggttaagattctggagaaccttcgtggtggaacaaatatcattaagctgattgacactgtaaaggaccccgtgtcaaagacaccagctttggtatttgaatatatcaataatacagattttaagcaactctaccagatcctgacagactttgatatccgg

SEQ ID NO: 114584 - DNA, 947 bp, Homo sapiens
  Payload ID: 2399
  Gene Symbol: CSNK2A2
  Gene Name: casein kinase 2, alpha prime polypeptide
  ENST ID: ENST00000567730
  CDS Start-End: 1-693
ccagtgaagaaaaagaagataaaacgagaggttaagattctggagaaccttcgtggtggaacaaatatcattaagctgattgacactgtaaaggaccccgtgtcaaagacaccagctttggtatttgaatatatcaataatacagattttaagctgcgactgatagattggggtctggcagaattctatcatcctgctcaggagtacaatgttcgtgtagcctcaaggtacttcaagggaccagagctcctcgtggactatcagatgtatgattatagcttggacatgtggagtttgggctgtatgttagcaagcatgatctttcgaagggaaccattcttccatggacaggacaactatgaccagcttgttcgcattgccaaggttctgggtacagaagaactgtatgggtatctgaagaagtatcacatagacctagatccacacttcaacgatatcctgggacaacattcacggaaacgctgggaaaactttatccatagtgagaacagacaccttgtcagccctgaggccctagatcttctggacaaacttctgcgatacgaccatcaacagagactgactgccaaagaggccatggagcacccatacttctaccctgtggtgaaggagcagtcccagccttgtgcagacaatgctgtgctttccagtggtctcacggcagcacgatgaagactggaaagcgacgggtctgttgcggttctcccacttttccataagcagaacaagaaccaaatcaaacgtcttaacgcgtatagagagatcacgttccgtgagcagacacaaaacggtggcaggtttggcgagcacgaactagaccaagcgaagggcagcccaccaccgtatatcaaacctcacttccgaatgtaaaaggctcacttgcctttggcttcctgttgacttcttcccgacccagaaagcatggg

SEQ ID NO: 114585 - DNA, 4978 bp, Homo sapiens
  Payload ID: 2399
  Gene Symbol: CSNK2A2
  Gene Name: casein kinase 2, alpha prime polypeptide
  ENST ID: ENST00000563307
  CDS Start-End: 1-458
agggaccagagctcctcgtggactatcagatgtatgattatagcttggacatgtggagtttgggctgtatgttagcaagcatgatctttcgaagggaaccattcttccatggacaggacaactatgaccagcttgttcgcattgccaaggttctgggtacagaagaactgtatgggtatctgaagaagtatcacatagacctagatccacacttcaacgatatcctgggacaacattcacggaaacgctgggaaaactttatccatagtgagaacagacaccttgtcagccctgaggccctagatcttctggacaaacttctgcgatacgaccatcaacagagactgactgccaaagaggccatggagcacccatacttctaccctgtggtgaaggagcagtcccagccttgtgcagacaatgctgtgctttccagtggtctcacggcagcacgatgaagactggaaagcgacgggtaatgcggcattgatgcttgccaataaaaccaaccaaccaaacacaaaccttgaaggaaaactacagtgtgataaaaagaaattcttatcattccttctaaatgcacagaagagtaaagacctaaaagtctgtcaaaaagcaagaaagaaactccccagtgctagtctccagggagctgtcactgtggcagcatggggatgcacctagttcaggatctgaaggagctctgcctttggaatgcatgggagatagagactcggagttgttgtacatttacctttgtttaacagggcaccactgttgaattaacccattcagtcaacaagctctgaatgtctgacttcctatctattccattgtggtctgggtttcctttggtgaaattcaggctcaagtcttagcgaaatgtcagcagtctatactgacacaccagcctcatttacaaaaaggagatattaaaacagtgacagtattttttttttaagctctttacaaatccacgttttatgtattttttaatgacatgagctctccaggaaatgtacctcatccccgcagttttcctccaagtggattcatttgggagcaaactgcagtcactttcacaagagtcctctttgatgtcaggagggatcacgaaaccttgcaatgccatgaactggtccatggttatcatcaaaagttccatgctaagtgcataacttggagctcactataacctttgttgatttccctaaccataaaatcttgttgctatttttttgttgctttttcttttttttttttttttttttttttggcagccttgtaaggagaacttcaccatttcccagcacatccctatgtgtgcgcctattttaatgcacctctctgaaacagagacctttttgttcacaaccataactaaagctggaaagtcagtcttcaggcaaggcgagggaggaaaacatcccattagaattttttcaggaaagacttatggaaaaaaatatctctctcccacctccttttatccccatgagacacagtttcccactgtaatcagggtaatatgcatttgtaagttctgatatgtgatacatttatgtgatggcaaagataagtctgtcttgcatgcaggtactagagttgtgtgggcagggtcatctgaaactcaagcaactcagaggaatatacaaggggcttggggaagaaaatggtgctcccggagcaagtgttggatccattttgcaaaccttcatgttagcagagaaagctagagtttgtttaaacaaaaatagggctgatttcattttggggactcaggagcaacatggtttgtaggcagtcccctcaccccagctgcagggccatgccacagctgtggggacttcacacacctaggctagaactagaggtgtctaccacatcaccctttaagatttctttattaactatttaataatgccatacatttttataaggttagatgtttgtttgaaacatttgtttacattccatattccaataaaatcttattggtattggtagcagatcctactctaaatgtagattctatttttgtcgtttggtctgtgggaacttaaaatacaaatgaaactcttctcttattatagagttgagtttatagagtaaaaaataaataagatcccaaagccaaggaatgcattcagttaaggttctcataccaatgctgcctgcttgcattgcacattctgtatactaatgtaaacatttgttctacctgaaaatcaaaagcaagatgtgagctctttggctaaacctgtattgatatgtcaggcagcaaaactcagtgtttgagattatcaaaagccttctaatatgcccttataggcaatcctgaagcattggttatcatcagggagatgtgccactgcgtgtctttcctgctccccctccaatctcctttatcaccccaccccactcctcagccctccctttttttttttaagttgcctgtctggaccaggcaagaggtgcctactggagggtcttggtgaagcggtaactccattcctttcccttgggtcccccaaaggtaataaaagtacctggaggagaatagtcaggtgattgacctctgcctgtctctctgacggtgatgtaggtgcagacaccgcctgcctgccttgtcctggggttttgtaactgcagctttgacacaggcattcttcctttgaagcacacagcttgcttttccagcacctagacttttacctctcttcatgccttagacttagaccataactgggcttgaaatgctcaccccttcctgggtctggtcttggcacctaggctattcctttccaaactgaagtgagtccagtttcagaccatctcttttcctgtctccaaaaaccatttttgtttccaaacctagctcccccgaaattttaagactatttacctagattcggagatggtcttggagagttccaaaaggggtgtgtgtgtgtctgtgtgtgtgtctgtgtgtgtgtctgtgtgtgtgtctgtgtgtgtgtctgtgtgtctaatatttagactaaaccatggtaaatgtacgcacccagtatccttttcagttagcatattctttcttaaactcatctcagtacttttcatttgtttgcttcattatcttaaacaggttaaaagtgcctatgataaggacttaattatttcctaaagaaaagcaaaaaatgtggggaacagggtagtgttatactatcatctcaggtactgcctatgttcaagaacatagacctggtatggtgagaacaaaaggttcctatgccaaatccagatggctatatcatttgttggctacaagtgagcctgactgcaaggtttgcttctgctgagaaatcccatggtgagagtagaactcatgaagtgctgagtcacatttgcacctctggtgtggtggcagttcactctcccctggatgctgtcagctggccttgctttcatcctatccctgtaggcagggtaggtggctgggtaggagaagctattgagtgtatgacgcagaccaagctttcctgggccttctcaccaactagagaagcgctgatgtcgttcattgaggcacttaaacaccagtcactcagccaggcctcctcccagacattctgtaacatgtcagcactcacaaggtttaaagcaaatgtgttcccttgcagagaggaaggtgctctcagactgatagattagaggagacagacaaactcgtaatccttggggacttgaagagagtggctaggggaagggctgttaaaagaaaagggaccaataagaaaatccatctaaaggtagctcttgaggaggaaattaacttcttgaggggataaattagagggtaccaagtttatgttctggaatgtaccctggggagggcgctgcccactggattggtcccagtggactgaaaggtggtgctctcgagtcaggcgcttagtcccagagagagctgggtgccgcggggctcgtggtctgtgcctactcagggaaatgacttaggttctcccaggtgctctgttgataaggatggaagcagaactactttgagacacaagcaacaattggaagagtttttttatatgaactgaaatagatctaagagagcctggttaacagtttcctttaataccagttcagattaaatggttactttaggaacctgtgttactgtgtgagcacccacagaaacaagcaaacttatttcctacaaaaaatgaggggataataaccgatcagagtcacagtcgtttcaatataaacccttccgaaagcaaaagcagggaccacatgagcacacaagaagccaaagtttgtcagtgatcttaataaattaagactgagtaacatcctgcctttagaaaaaaataaccccgaggtggagaccagggcaggggaggtggcggagaagcatcgggccagatcaaccgttaataacatgcttctgagctatgtggatgtataaatgaaaacacccccaactaggtattgtagaggctggaaaaagatgtgatgggattatacaggtgatgcatatttttgttttgagactcaacaatgtgctacaaatgtgatacttaaccctgaactgcatgtattggggattgttttttaaaaagaaaaaaaacaactttgaatcaataaattaacagtttttcacttgctggctcttcttgctgtaaatggtgactaagaggttgggacagaaatcttgacaactagtggaaaacttggataatcttcaaggaccatggagccttctgtttccttctgtttgcagaaaagcaacactgcctgggttgtgatcctttacaagtgactacttcagacacaattggccacctctttgtatcactggatgactgatgtatgatttatgtgctgctgcccttagagggaagaaaaatgccatgttaaatcctgttttcttaaataaaaatgttgacaataaccagccttcccaagtgggagacaaaccatt

SEQ ID NO: 114586 - DNA, 908 bp, Homo sapiens
  Payload ID: 2400
  Gene Symbol: CSNK2B
  Gene Name: casein kinase 2, beta polypeptide
  Uniprot ID: P67870
  ENST ID: ENST00000375865
  CDS Start-End: 117-764
ggaggaagcgaccaggtccggcacgaaggagggagaggtggcctgaggagcggaggggggatgtgtggattccggtgaaagggacctgacaatcgcccccaacccctgacgtgaagatgagcagctcagaggaggtgtcctggatttcctggttctgtgggctccgtggcaatgaattcttctgtgaagtggatgaagactacatccaggacaaatttaatcttactggactcaatgagcaggtccctcactatcgacaagctctagacatgatcttggacctggagcctgatgaagaactggaagacaaccccaaccagagtgacctgattgagcaggcagccgagatgctttatggattgatccacgcccgctacatccttaccaaccgtggcatcgcccagatgttggaaaagtaccagcaaggagactttggttactgtcctcgtgtgtactgtgagaaccagccaatgcttcccattggcctttcagacatcccaggtgaagccatggtgaagctctactgccccaagtgcatggatgtgtacacacccaagtcatcaagacaccatcacacggatggcgcctacttcggcactggtttccctcacatgctcttcatggtgcatcccgagtaccggcccaagagacctgccaaccagtttgtgcccaggctctacggtttcaagatccatccgatggcctaccagctgcagctccaagccgccagcaacttcaagagcccagtcaagacgattcgctgattccctcccccacctgtcctgcagtctttgacttttcctttcttttttgccaccctttcaggaaccctgtatggtttttagtttaaattaaaggagtcgttatcgtggtgggaatatgaaataaagtagaagaaaaggccatga

SEQ ID NO: 114587 - DNA, 936 bp, Homo sapiens
  Payload ID: 2400
  Gene Symbol: CSNK2B
  Gene Name: casein kinase 2, beta polypeptide
  Uniprot ID: P67870
  ENST ID: ENST00000375866
  CDS Start-End: 145-792
tgtggattccggtgaaagggacctgacaatcgcccccaacccgtgagaaaaggaggagcccagttcttgcttgagaatgataaacttggaaacccttgggaaaggcgtgggggtcatgcagagacttgtattgctgacgtgaagatgagcagctcagaggaggtgtcctggatttcctggttctgtgggctccgtggcaatgaattcttctgtgaagtggatgaagactacatccaggacaaatttaatcttactggactcaatgagcaggtccctcactatcgacaagctctagacatgatcttggacctggagcctgatgaagaactggaagacaaccccaaccagagtgacctgattgagcaggcagccgagatgctttatggattgatccacgcccgctacatccttaccaaccgtggcatcgcccagatgttggaaaagtaccagcaaggagactttggttactgtcctcgtgtgtactgtgagaaccagccaatgcttcccattggcctttcagacatcccaggtgaagccatggtgaagctctactgccccaagtgcatggatgtgtacacacccaagtcatcaagacaccatcacacggatggcgcctacttcggcactggtttccctcacatgctcttcatggtgcatcccgagtaccggcccaagagacctgccaaccagtttgtgcccaggctctacggtttcaagatccatccgatggcctaccagctgcagctccaagccgccagcaacttcaagagcccagtcaagacgattcgctgattccctcccccacctgtcctgcagtctttgacttttcctttcttttttgccaccctttcaggaaccctgtatggtttttagtttaaattaaaggagtcgttatcgtggtgggaatatgaaataaagtagaagaaaaggccatga

SEQ ID NO: 114588 - DNA, 948 bp, Homo sapiens
  Payload ID: 2400
  Gene Symbol: CSNK2B
  Gene Name: casein kinase 2, beta polypeptide
  Uniprot ID: P67870
  ENST ID: ENST00000375882
  CDS Start-End: 157-804
cttccccaccctccctaatttccactccccccaccccacttcgcctgccgcggtcgggtccgcggcctgcgctgtagcggtcgccgccgttccctggaagtagcaacttccctaccccaccccagtcctggtccccgtccagccgctgacgtgaagatgagcagctcagaggaggtgtcctggatttcctggttctgtgggctccgtggcaatgaattcttctgtgaagtggatgaagactacatccaggacaaatttaatcttactggactcaatgagcaggtccctcactatcgacaagctctagacatgatcttggacctggagcctgatgaagaactggaagacaaccccaaccagagtgacctgattgagcaggcagccgagatgctttatggattgatccacgcccgctacatccttaccaaccgtggcatcgcccagatgttggaaaagtaccagcaaggagactttggttactgtcctcgtgtgtactgtgagaaccagccaatgcttcccattggcctttcagacatcccaggtgaagccatggtgaagctctactgccccaagtgcatggatgtgtacacacccaagtcatcaagacaccatcacacggatggcgcctacttcggcactggtttccctcacatgctcttcatggtgcatcccgagtaccggcccaagagacctgccaaccagtttgtgcccaggctctacggtttcaagatccatccgatggcctaccagctgcagctccaagccgccagcaacttcaagagcccagtcaagacgattcgctgattccctcccccacctgtcctgcagtctttgacttttcctttcttttttgccaccctttcaggaaccctgtatggtttttagtttaaattaaaggagtcgttatcgtggtgggaatatgaaataaagtagaagaaaaggccatga

SEQ ID NO: 114589 - DNA, 1061 bp, Homo sapiens
  Payload ID: 2400
  Gene Symbol: CSNK2B
  Gene Name: casein kinase 2, beta polypeptide
  ENST ID: ENST00000375885
  CDS Start-End: 213-917
ccccacaatgcccttcgccttcctcaacgtggcccccgctccaagcccattttctggagccaggaatccactctgtgggttaggaaaggccctcaggaggcggagggaaacctgtggaatgccgagaagccgtgtaatgaaataacgtcacgcctgcccctcaccattactctgaccagggttcgaaggtcacacttagagcctaaggggaaatggagaagtgcaaagggacgagcagaatggctggcaccacctcagctgacgtgaagatgagcagctcagaggaggtgtcctggatttcctggttctgtgggctccgtggcaatgaattcttctgtgaagtggatgaagactacatccaggacaaatttaatcttactggactcaatgagcaggtccctcactatcgacaagctctagacatgatcttggacctggagcctgatgaagaactggaagacaaccccaaccagagtgacctgattgagcaggcagccgagatgctttatggattgatccacgcccgctacatccttaccaaccgtggcatcgcccagatgttggaaaagtaccagcaaggagactttggttactgtcctcgtgtgtactgtgagaaccagccaatgcttcccattggcctttcagacatcccaggtgaagccatggtgaagctctactgccccaagtgcatggatgtgtacacacccaagtcatcaagacaccatcacacggatggcgcctacttcggcactggtttccctcacatgctcttcatggtgcatcccgagtaccggcccaagagacctgccaaccagtttgtgcccaggctctacggtttcaagatccatccgatggcctaccagctgcagctccaagccgccagcaacttcaagagcccagtcaagacgattcgctgattccctcccccacctgtcctgcagtctttgacttttcctttcttttttgccaccctttcaggaaccctgtatggtttttagtttaaattaaaggagtcgttatcgtggtgggaatatgaaataaagtagaagaaaaggccatga

SEQ ID NO: 114590 - DNA, 908 bp, Homo sapiens
  Payload ID: 2400
  Gene Symbol: CSNK2B
  Gene Name: casein kinase 2, beta polypeptide
  Uniprot ID: P67870
  ENST ID: ENST00000383427
  CDS Start-End: 117-764
ggaggaagcgaccaggtccggcacgaaggagggagaggtggcctgaggagcggaggggggatgtgtggattccggtgaaagggacctgacaatcgcccccaacccctgacgtgaagatgagcagctcagaggaggtgtcctggatttcctggttctgtgggctccgtggcaatgaattcttctgtgaagtggatgaagactacatccaggacaaatttaatcttactggactcaatgagcaggtccctcactatcgacaagctctagacatgatcttggacctggagcctgatgaagaactggaagacaaccccaaccagagtgacctgattgagcaggcagccgagatgctttatggattgatccacgcccgctacatccttaccaaccgtggcatcgcccagatgttggaaaagtaccagcaaggagactttggttactgtcctcgtgtgtactgtgagaaccagccaatgcttcccattggcctttcagacatcccaggtgaagccatggtgaagctctactgccccaagtgcatggatgtgtacacacccaagtcatcaagacaccatcacacggatggcgcctacttcggcactggtttccctcacatgctcttcatggtgcatcccgagtaccggcccaagagacctgccaaccagtttgtgcccaggctctacggtttcaagatccatccgatggcctaccagctgcagctccaagccgccagcaacttcaagagcccagtcaagacgattcgctgattccctcccccacctgtcctgcagtctttgacttttcctttcttttttgccaccctttcaggaaccctgtatggtttttagtttaaattaaaggagtcgttattgtggtgggaatatgaaataaagtagaagaaaaggccatga

SEQ ID NO: 114591 - DNA, 2487 bp, Homo sapiens
  Payload ID: 2400
  Gene Symbol: CSNK2B
  Gene Name: casein kinase 2, beta polypeptide
  ENST ID: ENST00000383431
  CDS Start-End: 119-805
cttcgcctgccgcggtcgggtccgcggcctgcgctgtagcggtcgccgccgttccctggaagtagcaacttccctaccccaccccagtcctggtccccgtccagccgctgacgtgaagatgagcagctcagaggaggtgtcctggatttcctggttctgtgggctccgtggcaatgaattcttctgtgaagtggatgaagactacatccaggacaaatttaatcttactggactcaatgagcaggtccctcactatcgacaagctctagacatgatcttggacctggagcctgatgaagaactggaagacaaccccaaccagagtgacctgattgagcaggcagccgagatgctttatggattgatccacgcccgctacatccttaccaaccgtggcatcgcccagatgttggaaaagtaccagcaaggagactttggttactgtcctcgtgtgtactgtgagaaccagccaatgcttcccattggcctttcagacatcccaggtgaagccatggtgaagctctactgccccaagtgcatggatgtgtacacacccaagtcatcaagacaccatcacacggatggcgcctacttcggcactggtttccctcacatgctcttcatggtgcatcccgagtaccggcccaagagacctgccaaccagtttgtgcccagttcctgttcccgacatccggacgtgccacttctgcctcgtagaagacccttctgtaggatgcatttcaggctcagagaagtgtaccatcagcagctcatccctgtgcatggtgatcaccatctattatgatgtcaaggttcgcttcatcgttcgaggctgtggacagtacatttcctaccgctgccaagaaaaacgcaacacctactttgcagagtactggtatcaggcccagtgctgtcagtacgattattgcaactcctggtcaagcccccaactccagagctctctgccggagccccatgacaggcccctggccctgcctctgtctgactcccagattcagtggttctaccaggccctgaacctctccctgcccctccccaatttccatgctgggacggagcctgatggcctggaccccatggtcacactgtccctgaacctgggcttgtcttttgctgagctgtgccgcatgtacttgttcctcaatagttcaggacttttggttcttccccaggctggactcttgacacctcacccttcctgaattccacagtgcaaatatctttctgtaacaccctcagcatcctgcactgccctctctgaaaacacccacattctttggtcactgtgatttcttaggcctccgtctgttgtaccactagcatctatatgacttttgtgtaattttctctcttgaactctggtgctgtttttttgtttgtttgagacaaagtctcgctctgtcacccagggtggagtgcagtggcatgatctctgctcactacaacctccacctcccgggttccagcgattctcctgcctcagcctcccgagtagctgggactacaggcgtgcaccaccacgcctggctaattttttgtatttttagtagagacggggtttcaccatgttggtcaggctggtctcgaactcctgacctcgtaatctgccctcctcgacctcccaaagtgccgggattacaggtgtgagccactgtgcctggctgagctctggtgctgttcttccccctagaaaagaatctctagtgtggattctgcccagacaggctgacctgagaaaggcacagtggttcctccattccttccccatcatctgagtgttccagtatcccccatccctctcaatccagtcacctgcctattgacatctagctctgtttcccctgtcttgtccatgtctctaagacccagtaccagactgaactagcagcaagaaggacgaggaggccgggcatggtggctcacgccggtaatcccagcactttgggaggccgaggtgggcggatcacttgagattgggagtttgagaccagcctggccaacatggtaaaacccgctctctattaaaaatagaaaaatcagctgggtgtggtggcacacctctgtaatcccagctactcaggaggctgagacaggagaatcacttgaacccgggaggcagaggttgcagtgagccgagatcgcgccactgcactccagcctgggtgacacagtgagactccgtctccaaaaaaaaggatgaggaatagaattctgtgcagatgtcctgacttggcaattttgtgtccctgcctcactgtctccaccaacccccgcctgtcctagtgttgttctgcctcctgtcctctcttgctctcttgtcagtctctggcttcctcggccccatttcacttcactgagtcctgacacccatctccctaggggcctgtgagaggagagggaagggtctgttctgctcagctccatgtcccccattttcctccacaataaactgggactgggctaaaa

SEQ ID NO: 114592 - DNA, 948 bp, Homo sapiens
  Payload ID: 2400
  Gene Symbol: CSNK2B
  Gene Name: casein kinase 2, beta polypeptide
  Uniprot ID: P67870
  ENST ID: ENST00000383433
  CDS Start-End: 157-804
cttccccaccctccctaatttccactccccccaccccacttcgcctgccgcggtcgggtccgcggcctgcgctgtagcggtcgccgccgttccctggaagtagcaacttccctaccccaccccagtcctggtccccgtccagccgctgacgtgaagatgagcagctcagaggaggtgtcctggatttcctggttctgtgggctccgtggcaatgaattcttctgtgaagtggatgaagactacatccaggacaaatttaatcttactggactcaatgagcaggtccctcactatcgacaagctctagacatgatcttggacctggagcctgatgaagaactggaagacaaccccaaccagagtgacctgattgagcaggcagccgagatgctttatggattgatccacgcccgctacatccttaccaaccgtggcatcgcccagatgttggaaaagtaccagcaaggagactttggttactgtcctcgtgtgtactgtgagaaccagccaatgcttcccattggcctttcagacatcccaggtgaagccatggtgaagctctactgccccaagtgcatggatgtgtacacacccaagtcatcaagacaccatcacacggatggcgcctacttcggcactggtttccctcacatgctcttcatggtgcatcccgagtaccggcccaagagacctgccaaccagtttgtgcccaggctctacggtttcaagatccatccgatggcctaccagctgcagctccaagccgccagcaacttcaagagcccagtcaagacgattcgctgattccctcccccacctgtcctgcagtctttgacttttcctttcttttttgccaccctttcaggaaccctgtatggtttttagtttaaattaaaggagtcgttattgtggtgggaatatgaaataaagtagaagaaaaggccatga

SEQ ID NO: 114593 - DNA, 936 bp, Homo sapiens
  Payload ID: 2400
  Gene Symbol: CSNK2B
  Gene Name: casein kinase 2, beta polypeptide
  Uniprot ID: P67870
  ENST ID: ENST00000400110
  CDS Start-End: 145-792
tgtggattccggtgaaagggacctgacaatcgcccccaacccgtgagaaaaggaggagcccggttcttgcttgagaatgataaacttggaaacccttgggaaaggcgtgggggtcatgcagagacttgtattgctgacgtgaagatgagcagctcagaggaggtgtcctggatttcctggttctgtgggctccgtggcaatgaattcttctgtgaagtggatgaagactacatccaggacaaatttaatcttactggactcaatgagcaggtccctcactatcgacaagctctagacatgatcttggacctggagcctgatgaagaactggaagacaaccccaaccagagtgacctgattgagcaggcagccgagatgctttatggattgatccacgcccgctacatccttaccaaccgtggcatcgcccagatgttggaaaagtaccagcaaggagactttggttactgtcctcgtgtgtactgtgagaaccagccaatgcttcccattggcctttcagacatcccaggtgaagccatggtgaagctctactgccccaagtgcatggatgtgtacacacccaagtcatcaagacaccatcacacggatggcgcctacttcggcactggtttccctcacatgctcttcatggtgcatcccgagtaccggcccaagagacctgccaaccagtttgtgcccaggctctacggtttcaagatccatccgatggcctaccagctgcagctccaagccgccagcaacttcaagagcccagtcaagacgattcgctgattccctcccccacctgtcctgcagtctttgacttttcctttcttttttgccaccctttcaggaaccctgtatggtttttagtttaaattaaaggagtcgttattgtggtgggaatatgaaataaagtagaagaaaaggccatga

SEQ ID NO: 114594 - DNA, 1061 bp, Homo sapiens
  Payload ID: 2400
  Gene Symbol: CSNK2B
  Gene Name: casein kinase 2, beta polypeptide
  ENST ID: ENST00000400116
  CDS Start-End: 213-917
ccccacaatgcccttcgccttcctcaacgtggcccccgctccaagcccattttctggagccaggaatccactctgtgggttaggaaaggccctcaggaggcggagggaaacctgtggaatgccgagaagccgtgtaatgaaataacgtcacgcctgcccctcaccattactctgaccagggttcgaaggtcacacttagagcctaaggggaaatggagaagtgcaaagggacgagcagaatggctggcaccacctcagctgacgtgaagatgagcagctcagaggaggtgtcctggatttcctggttctgtgggctccgtggcaatgaattcttctgtgaagtggatgaagactacatccaggacaaatttaatcttactggactcaatgagcaggtccctcactatcgacaagctctagacatgatcttggacctggagcctgatgaagaactggaagacaaccccaaccagagtgacctgattgagcaggcagccgagatgctttatggattgatccacgcccgctacatccttaccaaccgtggcatcgcccagatgttggaaaagtaccagcaaggagactttggttactgtcctcgtgtgtactgtgagaaccagccaatgcttcccattggcctttcagacatcccaggtgaagccatggtgaagctctactgccccaagtgcatggatgtgtacacacccaagtcatcaagacaccatcacacggatggcgcctacttcggcactggtttccctcacatgctcttcatggtgcatcccgagtaccggcccaagagacctgccaaccagtttgtgcccaggctctacggtttcaagatccatccgatggcctaccagctgcagctccaagccgccagcaacttcaagagcccagtcaagacgattcgctgattccctcccccacctgtcctgcagtctttgacttttcctttcttttttgccaccctttcaggaaccctgtatggtttttagtttaaattaaaggagtcgttattgtggtgggaatatgaaataaagtagaagaaaaggccatga

SEQ ID NO: 114595 - DNA, 2487 bp, Homo sapiens; identical to SEQ ID NO: 114591
  Payload ID: 2400
  Gene Symbol: CSNK2B
  Gene Name: casein kinase 2, beta polypeptide
  ENST ID: ENST00000437010
  CDS Start-End: 119-805

SEQ ID NO: 114596 - DNA, 948 bp, Homo sapiens; identical to SEQ ID NO: 114588
  Payload ID: 2400
  Gene Symbol: CSNK2B
  Gene Name: casein kinase 2, beta polypeptide
  Uniprot ID: P67870
  ENST ID: ENST00000454382
  CDS Start-End: 157-804

SEQ ID NO: 114597 - DNA, 936 bp, Homo sapiens; identical to SEQ ID NO: 114587
  Payload ID: 2400
  Gene Symbol: CSNK2B
  Gene Name: casein kinase 2, beta polypeptide
  Uniprot ID: P67870
  ENST ID: ENST00000448596
  CDS Start-End: 145-792

SEQ ID NO: 114598 - DNA, 908 bp, Homo sapiens; identical to SEQ ID NO: 114586
  Payload ID: 2400
  Gene Symbol: CSNK2B
  Gene Name: casein kinase 2, beta polypeptide
  Uniprot ID: P67870
  ENST ID: ENST00000454511
  CDS Start-End: 117-764

SEQ ID NO: 114599 - DNA, 908 bp, Homo sapiens
  Payload ID: 2400
  Gene Symbol: CSNK2B
  Gene Name: casein kinase 2, beta polypeptide
  Uniprot ID: P67870
  ENST ID: ENST00000431476
  CDS Start-End: 117-764
ggaggaagcgaccaggtccggcacgaaggagggagaggtggcctgaggagcggaggggggatgtgtggattccggtgaaagggacctgacaatcgcccccaacccctgacgtgaagatgagcagctcagaggaggtgtcctggatttcctggttctgtgggctccgtggcaatgaattcttctgtgaagtggatgaagactacatccaggacaaatttaatcttactggactcaatgagcaggtccctcactatcgacaagctctagacatgatcttggacctggagcctgatgaagaactggaagacaaccccaaccagagtgacctgattgagcaggcagccgagatgctttatggattgatccacgcccgctacatccttaccaaccgtggcatcgcccagatgttggaaaagtaccagcaaggagactttggttactgtcctcgtgtgtactgtgagaaccagccaatgcttcccattggcctttcagacatcccaggtgaagccatggtgaagctctactgccccaagtgcatggatgtgtacacacccaagtcatcaagacaccatcacacggatggcgcctacttcggcactggtttccctcacatgctcttcatggtgcatcccgagtaccggcccaagagacctgccaaccagtttgtgcccaggctctacggtttcaagatccatccgatggcctaccagctgcagctccaagccgccagcaacttcaagagcccagtcaagacgattcgctgattccctcccccacctgtcctgcagtctttgtcttttcctttcttttttgccaccctttcaggaaccctgtatggtttttagtttaaattaaaggagtcgttatcgtggtgggaatatgaaataaagtagaagaaaaggccatga

SEQ ID NO: 114600 - DNA, 936 bp, Homo sapiens; identical to SEQ ID NO: 114593
  Payload ID: 2400
  Gene Symbol: CSNK2B
  Gene Name: casein kinase 2, beta polypeptide
  Uniprot ID: P67870
  ENST ID: ENST00000453234
  CDS Start-End: 145-792

SEQ ID NO: 114601 - DNA, 1061 bp, Homo sapiens; identical to SEQ ID NO: 114589
  Payload ID: 2400
  Gene Symbol: CSNK2B
  Gene Name: casein kinase 2, beta polypeptide
  ENST ID: ENST00000428483
  CDS Start-End: 213-917

SEQ ID NO: 114602 - DNA, 1061 bp, Homo sapiens; identical to SEQ ID NO: 114589
  Payload ID: 2400
  Gene Symbol: CSNK2B
  Gene Name: casein kinase 2, beta polypeptide
  ENST ID: ENST00000424502
  CDS Start-End: 213-917

SEQ ID NO: 114603 - DNA, 948 bp, Homo sapiens; identical to SEQ ID NO: 114588
  Payload ID: 2400
  Gene Symbol: CSNK2B
  Gene Name: casein kinase 2, beta polypeptide
  Uniprot ID: P67870
  ENST ID: ENST00000443673
  CDS Start-End: 157-804

SEQ ID NO: 114604 - DNA, 948 bp, Homo sapiens
  Payload ID: 2400
  Gene Symbol: CSNK2B
  Gene Name: casein kinase 2, beta polypeptide
  Uniprot ID: P67870
  ENST ID: ENST00000422567
  CDS Start-End: 157-804
cttccccaccctccctaatttccactccccccaccccacttcgcctgccgcggtcgggtccgcggcctgcgctgtagcggtcgccgccgttccctggaagtagcaacttccctaccccaccccagtcctggtccccgtccagccgctgacgtgaagatgagcagctcagaggaggtgtcctggatttcctggttctgtgggctccgtggcaatgaattcttctgtgaagtggatgaagactacatccaggacaaatttaatcttactggactcaatgagcaggtccctcactatcgacaagctctagacatgatcttggacctggagcctgatgaagaactggaagacaaccccaaccagagtgacctgattgagcaggcagccgagatgctttatggattgatccacgcccgctacatccttaccaaccgtggcatcgcccagatgttggaaaagtaccagcaaggagactttggttactgtcctcgtgtgtactgtgagaaccagccaatgcttcccattggcctttcagacatcccaggtgaagccatggtgaagctctactgccccaagtgcatggatgtgtacacacccaagtcatcaagacaccatcacacggatggcgcctacttcggcactggtttccctcacatgctcttcatggtgcatcccgagtaccggcccaagagacctgccaaccagtttgtgcccaggctctacggtttcaagatccatccgatggcctaccagctgcagctccaagccgccagcaacttcaagagcccagtcaagacgattcgctgattccctcccccacctgtcctgcagtctttgtcttttcctttcttttttgccaccctttcaggaaccctgtatggtttttagtttaaattaaaggagtcgttatcgtggtgggaatatgaaataaagtagaagaaaaggccatga

SEQ ID NO: 114605 - DNA, 936 bp, Homo sapiens; identical to SEQ ID NO: 114587
  Payload ID: 2400
  Gene Symbol: CSNK2B
  Gene Name: casein kinase 2, beta polypeptide
  Uniprot ID: P67870
  ENST ID: ENST00000455161
  CDS Start-End: 145-792

SEQ ID NO: 114606 - DNA, 2487 bp, Homo sapiens
  Payload ID: 2400
  Gene Symbol: CSNK2B
  Gene Name: casein kinase 2, beta polypeptide
  ENST ID: ENST00000413083
  CDS Start-End: 119-805
cttcgcctgccgcggtcgggtccgcggcctgcgctgtagcggtcgccgccgttccctggaagtagcaacttccctaccccaccccagtcctggtccccgtccagccgctgacgtgaagatgagcagctcagaggaggtgtcctggatttcctggttctgtgggctccgtggcaatgaattcttctgtgaagtggatgaagactacatccaggacaaatttaatcttactggactcaatgagcaggtccctcactatcgacaagctctagacatgatcttggacctggagcctgatgaagaactggaagacaaccccaaccagagtgacctgattgagcaggcagccgagatgctttatggattgatccacgcccgctacatccttaccaaccgtggcatcgcccagatgttggaaaagtaccagcaaggagactttggttactgtcctcgtgtgtactgtgagaaccagccaatgcttcccattggcctttcagacatcccaggtgaagccatggtgaagctctactgccccaagtgcatggatgtgtacacacccaagtcatcaagacaccatcacacggatggcgcctacttcggcactggtttccctcacatgctcttcatggtgcatcccgagtaccggcccaagagacctgccaaccagtttgtgcccagttcctgttcccgacatccggacgtgccacttctgcctcgtagaagacccttctgtaggatgcatttcaggctcagagaagtgtaccatcagcagctcatccctgtgcatggtgatcaccatctattatgatgtcaaggttcgcttcatcgttcgaggctgtggacagtacatttcctaccgctgccaagaaaaacgcaacacctactttgcagagtactggtatcaggcccagtgctgtcagtacgattattgcaactcctggtcaagcccccaactccagagctctctgccggagccccatgacaggcccctggccctgcctctgtctgactcccagattcagtggttctaccaggccctgaacctctccctgcccctccccaatttccatgctgggacggagcctgatggcctggaccccatggtcacactgtccctgaacctgggcttgtcttttgctgagctgcgccgcatgtacttgttcctcaatagttcaggacttttggttcttccccaggctggactcttgacacctcacccttcctgaattccacagtgcaaatatctttctgtaacaccctcagcatcctgcactgccctctctgaaaacacccacattctttggtcactgtgatttcttaggcctccgtctgttgtaccactagcatctatatgacttttgtgtaattttctctcttgaactctggtgctgtttttttgtttgtttgagacaaagtctcgctctgtcacccagggtggagtgcagtggcatgatctctgctcactacaacctccacctcccgggttccagcgattctcctgcctcagcctcccgagtagctgggactacaggcgtgcaccaccacgcctggctaattttttgtatttttagtagagacggggtttcaccatgttggtcaggctggtctcgaactcctgacctcgtaatctgccctcctcgacctcccaaagtgccgggattacaggtgtgagccactgtgcctggctgagctctggtgctgttcttccccctagaaaagaatctctagtgtggattctgcccagacaggctgacctgagaaaggcacagtggttcctccattccttccccatcatctgagtgttccagtatcccccatccctctcaatccagtcacctgcctattgacatctagctctgtttcccctgtcttgtccatgtctctaagacccagtaccagactgaactagcagcaagaaggacgaggaggccgggcatggtggctcacgccggtaatcccagcactttgggaggccgaggtgggcggatcacttgagattgggagtttgagaccagcctggccaacatggtaaaacccgctctctattaaaaatagaaaaatcagctgggtgtggtggcacacctctgtaatcccagctactcaggaggctgagacaggagaatcacttgaacccgggaggcagaggttgcagtgagccgagatcgcgccactgcactccagcctgggtgacacagtgagactccgtctccaaaaaaaaggatgaggaatagaattctgtgcagatgtcctgacttggcaattttgtgtccctgcctcactgtctccaccaacccccgcctgtcctagtgttgttctgcctcctgtcctctcttgctctcttgtcagtctctggcttcctcggccccatttcacttcactgagtcctgacacccatctccctaggggcctgtgagaggagagggaagggtctgttctgctcagctccatgtcccccattttcctccacaataaactgggactgggctaaaa

SEQ ID NO: 114607 - DNA, 2487 bp, Homo sapiens
  Payload ID: 2400
  Gene Symbol: CSNK2B
  Gene Name: casein kinase 2, beta polypeptide
  ENST ID: ENST00000416194
  CDS Start-End: 119-805
cttcgcctgccgcggtcgggtccgcggcctgcgctgtagcggtcgccgccgttccctggaagtagcaacttccctaccccaccccagtcctggtccccgtccagccgctgacgtgaagatgagcagctcagaggaggtgtcctggatttcctggttctgtgggctccgtggcaatgaattcttctgtgaagtggatgaagactacatccaggacaaatttaatcttactggactcaatgagcaggtccctcactatcgacaagctctagacatgatcttggacctggagcctgatgaagaactggaagacaaccccaaccagagtgacctgattgagcaggcagccgagatgctttatggattgatccacgcccgctacatccttaccaaccgtggcatcgcccagatgttggaaaagtaccagcaaggagactttggttactgtcctcgtgtgtactgtgagaaccagccaatgcttcccattggcctttcagacatcccaggtgaagccatggtgaagctctactgccccaagtgcatggatgtgtacacacccaagtcatcaagacaccatcacacggatggcgcctacttcggcactggtttccctcacatgctcttcatggtgcatcccgagtaccggcccaagagacctgccaaccagtttgtgcccagttcctgttcccgacatccggacgtgccacttctgcctcgtagaagacccttctgtaggatgcatttcaggctcagagaagtgtaccatcagcagctcatccctgtgcatggtgatcaccatctattatgatgtcaaggttcgcttcatcgttcgaggctgtggacagtacatttcctaccgctgccaagaaaaacgcaacacctactttgcagagtactggtatcaggcccagtgctgtcagtacgattattgcaactcctggtcaagcccccaactccagagctctctgccggagccccatgacaggcccctggccctgcctctgtctgactcccagattcagtggttctaccaggccctgaacctctccctgcccctccccaatttccatgctgggacggagcctgatggcctggaccccatggtcacactgtccctgaacctgggcttgtcttttgctgagctgcgccgcatgtacttgttcctcaatagttcaggacttttggttcttccccaggctggactcttgacacctcacccttcctgaattccacagtgcaaatatctttctgtaacaccctcagcatcctgcactgccctctctgaaaacacccacattctttggtcactgtgatttcttaggcctccgtctgttgtaccactagcatctatatgacttttgtgtaattttctctcttgaactctggtgctgtttttttgtttgtttgagacaaagtctcgctctgtcacccagggtggagtgcagtggcatgatctctgctcactacaacctccacctcccgggttccagcgattctcctgcctcagcctcccgagtagctgggactacaggcgtgcaccaccacgcctggctaattttttgtatttttagtagagacggggtttcaccatgttggtcaggctggtctcgaactcctgacctcgtaatctgccctcctcgacctcccaaagtgccgggattacaggtgtgagccactgtgcctgtctgagctctggtgctgttcttccccctagaaaagaatctctagtgtggattctgcccagacaggctgacctgagaaaggcacagtggttcctccattccttccccatcatctgagtgttccagtatcccccatccctctcaatccagtcacctgcctattgacatctagctctgtttcccctgtcttgtccatgtctctaagacccagtaccagactgaactagcagcaagaaggacgaggaggccgggcatggtggctcacgccggtaatcccagcactttgggaggccgaggtgggcggatcacttgagattgggagtttgagaccagcctggccaacatggtaaaacccgctctctattaaaaatagaaaaatcagctgggtgtggtggcacacctctgtaatcccagctactcaggaggctgagacaggagaatcacttgaacccgggaggcagaggttgcagtgagccgagatcgcgccactgcactccagcctgggtgacacagtgagactccgtctccaaaaaaaaggatgaggaatagaattctgtgcagatgtcctgacttggcaattttgtgtccctgcctcactgtctccaccaacccccgcctgtcctggtgttgttctgcctcctgtcctctcttgctctcttgtcagtctctggcttcctcggccccatttcacttcactgagtcctgacacccatctccctaggggcctgtgagaggagagggaagggtctgttctgctcagctccatgtcccccattttcctccacaataaactgggactgggctaaaa

SEQ ID NO: 114608 - DNA, 908 bp, Homo sapiens; identical to SEQ ID NO: 114586
  Payload ID: 2400
  Gene Symbol: CSNK2B
  Gene Name: casein kinase 2, beta polypeptide
  Uniprot ID: P67870
  ENST ID: ENST00000429633
  CDS Start-End: 117-764

SEQ ID NO: 114609 - DNA, 936 bp, Homo sapiens
  Payload ID: 2400
  Gene Symbol: CSNK2B
  Gene Name: casein kinase 2, beta polypeptide
  Uniprot ID: P67870
  ENST ID: ENST00000458330
  CDS Start-End: 145-792
tgtggattccggtgaaagggacctgacaatcgcccccaacccgtgagaaaaggaggagcccggttcttgcttgagaatgataaacttggaaacccttgggaaaggcgtgggggtcatgcagagacttgtattgctgacgtgaagatgagcagctcagaggaggtgtcctggatttcctggttctgtgggctccgtggcaatgaattcttctgtgaagtggatgaagactacatccaggacaaatttaatcttactggactcaatgagcaggtccctcactatcgacaagctctagacatgatcttggacctggagcctgatgaagaactggaagacaaccccaaccagagtgacctgattgagcaggcagccgagatgctttatggattgatccacgcccgctacatccttaccaaccgtggcatcgcccagatgttggaaaagtaccagcaaggagactttggttactgtcctcgtgtgtactgtgagaaccagccaatgcttcccattggcctttcagacatcccaggtgaagccatggtgaagctctactgccccaagtgcatggatgtgtacacacccaagtcatcaagacaccatcacacggatggcgcctacttcggcactggtttccctcacatgctcttcatggtgcatcccgagtaccggcccaagagacctgccaaccagtttgtgcccaggctctacggtttcaagatccatccgatggcctaccagctgcagctccaagccgccagcaacttcaagagcccagtcaagacgattcgctgattccctcccccacctgtcctgcagtctttgacttttcctttcttttttgccaccctttcaggaaccctgtatggtttttagtttaaattaaaggagtcgttatcgtggtgggaatatgaaataaagtagaagaaaaggccatga

SEQ ID NO: 114610 - DNA, 1061 bp, Homo sapiens; identical to SEQ ID NO: 114589
  Payload ID: 2400
  Gene Symbol: CSNK2B
  Gene Name: casein kinase 2, beta polypeptide
  ENST ID: ENST00000439572
  CDS Start-End: 213-917

SEQ ID NO: 114611 - DNA, 908 bp, Homo sapiens; identical to SEQ ID NO: 114586
  Payload ID: 2400
  Gene Symbol: CSNK2B
  Gene Name: casein kinase 2, beta polypeptide
  Uniprot ID: P67870
  ENST ID: ENST00000418230
  CDS Start-End: 117-764

SEQ ID NO: 114612 - DNA, 936 bp, Homo sapiens
  Payload ID: 2400
  Gene Symbol: CSNK2B
  Gene Name: casein kinase 2, beta polypeptide
  Uniprot ID: P67870
  ENST ID: ENST00000436169
  CDS Start-End: 145-792
tgtggattccggtgaaagggacctgacaatcgcccccaacccgtgagaaaaggaggagcccagttcttgcttgagaatgataaacttggaaacccttgggaaaggcgtgggggtcatgcagagacttgtattgctgacgtgaagatgagcagctcagaggaggtgtcctggatttcctggttctgtgggctccgtggcaatgaattcttctgtgaagtggatgaagactacatccaggacaaatttaatcttactggactcaatgagcaggtccctcactatcgacaagctctagacatgatcttggacctggagcctgatgaagaactggaagacaaccccaaccagagtgacctgattgagcaggcagccgagatgctttatggattgatccacgcccgctacatccttaccaaccgtggcatcgcccagatgttggaaaagtaccagcaaggagactttggttactgtcctcgtgtgtactgtgagaaccagccaatgcttcccattggcctttcagacatcccaggtgaagccatggtgaagctctactgccccaagtgcatggatgtgtacacacccaagtcatcaagacaccatcacacggatggcgcctacttcggcactggtttccctcacatgctcttcatggtgcatcccgagtaccggcccaagagacctgccaaccagtttgtgcccaggctctacggtttcaagatccatccgatggcctaccagctgcagctccaagccgccagcaacttcaagagcccagtcaagacgattcgctgattccctcccccacctgtcctgcagtctttgtcttttcctttcttttttgccaccctttcaggaaccctgtatggtttttagtttaaattaaaggagtcgttatcgtggtgggaatatgaaataaagtagaagaaaaggccatga

SEQ ID NO: 114613 - DNA, 1061 bp, Homo sapiens
  Payload ID: 2400
  Gene Symbol: CSNK2B
  Gene Name: casein kinase 2, beta polypeptide
  ENST ID: ENST00000422261
  CDS Start-End: 213-917
ccccacaatgcccttcgccttcctcaacgtggcccccgctccaagcccattttctggagccaggaatccactctgtgggttaggaaaggccctcaggaggcggagggaaacctgtggaatgccgagaagccgtgtaatgaaataacgtcacgcctgcccctcaccattactctgaccagggttcgaaggtcacacttagagcctaaggggaaatggagaagtgcaaagggacgagcagaatggctggcaccacctcagctgacgtgaagatgagcagctcagaggaggtgtcctggatttcctggttctgtgggctccgtggcaatgaattcttctgtgaagtggatgaagactacatccaggacaaatttaatcttactggactcaatgagcaggtccctcactatcgacaagctctagacatgatcttggacctggagcctgatgaagaactggaagacaaccccaaccagagtgacctgattgagcaggcagccgagatgctttatggattgatccacgcccgctacatccttaccaaccgtggcatcgcccagatgttggaaaagtaccagcaaggagactttggttactgtcctcgtgtgtactgtgagaaccagccaatgcttcccattggcctttcagacatcccaggtgaagccatggtgaagctctactgccccaagtgcatggatgtgtacacacccaagtcatcaagacaccatcacacggatggcgcctacttcggcactggtttccctcacatgctcttcatggtgcatcccgagtaccggcccaagagacctgccaaccagtttgtgcccaggctctacggtttcaagatccatccgatggcctaccagctgcagctccaagccgccagcaacttcaagagcccagtcaagacgattcgctgattccctcccccacctgtcctgcagtctttgtcttttcctttcttttttgccaccctttcaggaaccctgtatggtttttagtttaaattaaaggagtcgttatcgtggtgggaatatgaaataaagtagaagaaaaggccatga

SEQ ID NO: 114614 - DNA, 908 bp, Homo sapiens; identical to SEQ ID NO: 114590
  Payload ID: 2400
  Gene Symbol: CSNK2B
  Gene Name: casein kinase 2, beta polypeptide
  Uniprot ID: P67870
  ENST ID: ENST00000412802
  CDS Start-End: 117-764

SEQ ID NO: 114615 - DNA, 948 bp, Homo sapiens; identical to SEQ ID NO: 114588
  Payload ID: 2400
  Gene Symbol: CSNK2B
  Gene Name: casein kinase 2, beta polypeptide
  Uniprot ID: P67870
  ENST ID: ENST00000452985
  CDS Start-End: 157-804

SEQ ID NO: 114616 - DNA, 948 bp, Homo sapiens; identical to SEQ ID NO: 114592
  Payload ID: 2400
  Gene Symbol: CSNK2B
  Gene Name: casein kinase 2, beta polypeptide
  Uniprot ID: P67870
  ENST ID: ENST00000451917
  CDS Start-End: 157-804

SEQ ID NO: 114617 - DNA, 1061 bp, Homo sapiens; identical to SEQ ID NO: 114594
  Payload ID: 2400
  Gene Symbol: CSNK2B
  Gene Name: casein kinase 2, beta polypeptide
  ENST ID: ENST00000432290
  CDS Start-End: 213-917

SEQ ID NO: 114618 - DNA, 1181 bp, Homo sapiens
  Payload ID: 2400
  Gene Symbol: CSNK2B
  Gene Name: casein kinase 2, beta polypeptide
  ENST ID: ENST00000620798
  CDS Start-End: 13-699
gctgacgtgaagatgagcagctcagaggaggtgtcctggatttcctggttctgtgggctccgtggcaatgaattcttctgtgaagtggatgaagactacatccaggacaaatttaatcttactggactcaatgagcaggtccctcactatcgacaagctctagacatgatcttggacctggagcctgatgaagaactggaagacaaccccaaccagagtgacctgattgagcaggcagccgagatgctttatggattgatccacgcccgctacatccttaccaaccgtggcatcgcccagatgttggaaaagtaccagcaaggagactttggttactgtcctcgtgtgtactgtgagaaccagccaatgcttcccattggcctttcagacatcccaggtgaagccatggtgaagctctactgccccaagtgcatggatgtgtacacacccaagtcatcaagacaccatcacacggatggcgcctacttcggcactggtttccctcacatgctcttcatggtgcatcccgagtaccggcccaagagacctgccaaccagtttgtgcccagttcctgttcccgacatccggacgtgccacttctgcctcgtagaagacccttctgtaggatgcatttcaggctcagagaagtgtaccatcagcagctcatccctgtgcatggtgatcaccatctattatgatgtcaaggttcgcttcatcgttcgaggctgtggacagtacatttcctaccgctgccaagaaaaacgcaacacctactttgcagagtactggtatcaggcccagtgctgtcagtacgattattgcaactcctggtcaagcccccaactccagagctctctgccggagccccatgacaggcccctggccctgcctctgtctgactcccagattcagtggttctaccaggccctgaacctctccctgcccctccccaatttccatgctgggacggagcctgatggcctggaccccatggtcacactgtccctgaacctgggcttgtcttttgctgagctgtgccgcatgtacttgttcctcaatagttcaggacttttggttcttccccaggctggactcttgacacctcacccttcctgaattccacagtgcaaatatctttctgtaacaccctcagcatcctgcactgccctctctgaaaaca

SEQ ID NO: 114619 - DNA, 826 bp, Homo sapiens
  Payload ID: 2400
  Gene Symbol: CSNK2B
  Gene Name: casein kinase 2, beta polypeptide
  ENST ID: ENST00000621623
  CDS Start-End: 341-826
gcttctcgttgtgccccgcccgcaagcgccctcctccgggccttcgtgacagccaggtcgtgcgcgggtcatcctgggattggtagttcgctttctctcatttagccagtttctttctctaccggggactccgtgtcccggcatccaccgcggcacctgacccttggcgcttgcgtgttgccctcttccccaccctccctaatttccactccccccaccccacttcgcctgccgcggtcgggtccgcggcctgcgctgtagcggtcgccgccgttccctggaagtagcaacttccctaccccaccccagtcctggtccccgtccagccgctgacgtgaagatgagcagctcagaggaggtgtcctggatttcctggttctgtgggctccgtggcaatgaattcttctgtgaagtggatgaagactacatccaggacaaatttaatcttactggactcaatgagcaggtccctcactatcgacaagctctagacatgatcttggacctggagcctgatgaagaactggaagacaaccccaaccagagtgacctgattgagcaggcagccgagatgctttatggattgatccacgccctgcctctgtctgactcccagattcagtggttctaccaggccctgaacctctccctgcccctccccaatttccatgctgggacggagcctgatggcctggaccccatggtcacactgtccctgaacctgggcttgtcttttgctgagctgcgccgcatgtacttgttcctcaatagttcaggacttttggttcttccccaggctggactcttgacacctcacccttcctga

SEQ ID NO: 114620 - DNA, 1255 bp, Homo sapiens
  Payload ID: 2400
  Gene Symbol: CSNK2B
  Gene Name: casein kinase 2, beta polypeptide
  ENST ID: ENST00000621953
  CDS Start-End: 341-1255
gcttctcgttgtgccccgcccgcaagcgccctcctccgggccttcgtgacagccaggtcgtgcgcgggtcatcctgggattggtagttcgctttctctcatttagccagtttctttctctaccggggactccgtgtcccggcatccaccgcggcacctgacccttggcgcttgcgtgttgccctcttccccaccctccctaatttccactccccccaccccacttcgcctgccgcggtcgggtccgcggcctgcgctgtagcggtcgccgccgttccctggaagtagcaacttccctaccccaccccagtcctggtccccgtccagccgctgacgtgaagatgagcagctcagaggaggtgtcctggatttcctggttctgtgggctccgtggcaatgaattcttctgtgaagtggatgaagactacatccaggacaaatttaatcttactggactcaatgagcaggtccctcactatcgacaagctctagacatgatcttggacctggagcctgatgaagaactggaagacaaccccaaccagagtgacctgattgagcaggcagccgagatgctttatggattgatccacgcccgctacatccttaccaaccgtggcatcgcccagatgttggaaaagtaccagcaaggagactttggttactgtcctcgtgtgtactgtgagaaccagccaatgcttcccattgttcctgttcccgacatccggacgtgccacttctgcctcgtagaagacccttctgtaggatgcatttcaggctcagagaagtgtaccatcagcagctcatccctgtgcatggtgatcaccatctattatgatgtcaaggttcgcttcatcgttcgaggctgtggacagtacatttcctaccgctgccaagaaaaacgcaacacctactttgcagagtactggtatcaggcccagtgctgtcagtacgattattgcaactcctggtcaagcccccaactccagagctctctgccggagccccatgacaggcccctggccctgcctctgtctgactcccagattcagtggttctaccaggccctgaacctctccctgcccctccccaatttccatgctgggacggagcctgatggcctggaccccatggtcacactgtccctgaacctgggcttgtcttttgctgagctgtgccgcatgtacttgttcctcaatagttcaggacttttggttcttccccaggctggactcttgacacctcacccttcctga

SEQ ID NO: 114621 - DNA, 826 bp, Homo sapiens
  Payload ID: 2400
  Gene Symbol: CSNK2B
  Gene Name: casein kinase 2, beta polypeptide
  ENST ID: ENST00000615772
  CDS Start-End: 341-826
gcttctcgttgtgccccgcccgcaagcgccctcctccgggccttcgtgacagccaggtcgtgcgcgggtcatcctgggattggtagttcgctttctctcatttagccagtttctttctctaccggggactccgtgtcccggcatccaccgcggcacctgacccttggcgcttgcgtgttgccctcttccccaccctccctaatttccactccccccaccccacttcgcctgccgcggtcgggtccgcggcctgcgctgtagcggtcgccgccgttccctggaagtagcaacttccctaccccaccccagtcctggtccccgtccagccgctgacgtgaagatgagcagctcagaggaggtgtcctggatttcctggttctgtgggctccgtggcaatgaattcttctgtgaagtggatgaagactacatccaggacaaatttaatcttactggactcaatgagcaggtccctcactatcgacaagctctagacatgatcttggacctggagcctgatgaagaactggaagacaaccccaaccagagtgacctgattgagcaggcagccgagatgctttatggattgatccacgccctgcctctgtctgactcccagattcagtggttctaccaggccctgaacctctccctgcccctccccaatttccatgctgggacggagcctgatggcctggaccccatggtcacactgtccctgaacctgggcttgtcttttgctgagctgtgccgcatgtacttgttcctcaatagttcaggacttttggttcttccccaggctggactcttgacacctcacccttcctga

SEQ ID NO: 114622 - DNA, 1255 bp, Homo sapiens; identical to SEQ ID NO: 114620
  Payload ID: 2400
  Gene Symbol: CSNK2B
  Gene Name: casein kinase 2, beta polypeptide
  ENST ID: ENST00000615589
  CDS Start-End: 341-1255

SEQ ID NO: 114623 - DNA, 826 bp, Homo sapiens; identical to SEQ ID NO: 114619
  Payload ID: 2400
  Gene Symbol: CSNK2B
  Gene Name: casein kinase 2, beta polypeptide
  ENST ID: ENST00000613998
  CDS Start-End: 341-826

SEQ ID NO: 114624 - DNA, 1255 bp, Homo sapiens
  Payload ID: 2400
  Gene Symbol: CSNK2B
  Gene Name: casein kinase 2, beta polypeptide
  ENST ID: ENST00000619468
  CDS Start-End: 341-1255
gcttctcgttgtgccccgcccgcaagcgccctcctccgggccttcgtgacagccaggtcgtgcgcgggtcatcctgggattggtagttcgctttctctcatttagccagtttctttctctaccggggactccgtgtcccggcatccaccgcggcacctgacccttggcgcttgcgtgttgccctcttccccaccctccctaatttccactccccccaccccacttcgcctgccgcggtcgggtccgcggcctgcgctgtagcggtcgccgccgttccctggaagtagcaacttccctaccccaccccagtcctggtccccgtccagccgctgacgtgaagatgagcagctcagaggaggtgtcctggatttcctggttctgtgggctccgtggcaatgaattcttctgtgaagtggatgaagactacatccaggacaaatttaatcttactggactcaatgagcaggtccctcactatcgacaagctctagacatgatcttggacctggagcctgatgaagaactggaagacaaccccaaccagagtgacctgattgagcaggcagccgagatgctttatggattgatccacgcccgctacatccttaccaaccgtggcatcgcccagatgttggaaaagtaccagcaaggagactttggttactgtcctcgtgtgtactgtgagaaccagccaatgcttcccattgttcctgttcccgacatccggacgtgccacttctgcctcgtagaagacccttctgtaggatgcatttcaggctcagagaagtgtaccatcagcagctcatccctgtgcatggtgatcaccatctattatgatgtcaaggttcgcttcatcgttcgaggctgtggacagtacatttcctaccgctgccaagaaaaacgcaacacctactttgcagagtactggtatcaggcccagtgctgtcagtacgattattgcaactcctggtcaagcccccaactccagagctctctgccggagccccatgacaggcccctggccctgcctctgtctgactcccagattcagtggttctaccaggccctgaacctctccctgcccctccccaatttccatgctgggacggagcctgatggcctggaccccatggtcacactgtccctgaacctgggcttgtcttttgctgagctgcgccgcatgtacttgttcctcaatagttcaggacttttggttcttccccaggctggactcttgacacctcacccttcctga

SEQ ID NO: 114625 - DNA, 1181 bp, Homo sapiens
  Payload ID: 2400
  Gene Symbol: CSNK2B
  Gene Name: casein kinase 2, beta polypeptide
  ENST ID: ENST00000614974
  CDS Start-End: 13-699
gctgacgtgaagatgagcagctcagaggaggtgtcctggatttcctggttctgtgggctccgtggcaatgaattcttctgtgaagtggatgaagactacatccaggacaaatttaatcttactggactcaatgagcaggtccctcactatcgacaagctctagacatgatcttggacctggagcctgatgaagaactggaagacaaccccaaccagagtgacctgattgagcaggcagccgagatgctttatggattgatccacgcccgctacatccttaccaaccgtggcatcgcccagatgttggaaaagtaccagcaaggagactttggttactgtcctcgtgtgtactgtgagaaccagccaatgcttcccattggcctttcagacatcccaggtgaagccatggtgaagctctactgccccaagtgcatggatgtgtacacacccaagtcatcaagacaccatcacacggatggcgcctacttcggcactggtttccctcacatgctcttcatggtgcatcccgagtaccggcccaagagacctgccaaccagtttgtgcccagttcctgttcccgacatccggacgtgccacttctgcctcgtagaagacccttctgtaggatgcatttcaggctcagagaagtgtaccatcagcagctcatccctgtgcatggtgatcaccatctattatgatgtcaaggttcgcttcatcgttcgaggctgtggacagtacatttcctaccgctgccaagaaaaacgcaacacctactttgcagagtactggtatcaggcccagtgctgtcagtacgattattgcaactcctggtcaagcccccaactccagagctctctgccggagccccatgacaggcccctggccctgcctctgtctgactcccagattcagtggttctaccaggccctgaacctctccctgcccctccccaatttccatgctgggacggagcctgatggcctggaccccatggtcacactgtccctgaacctgggcttgtcttttgctgagctgcgccgcatgtacttgttcctcaatagttcaggacttttggttcttccccaggctggactcttgacacctcacccttcctgaattccacagtgcaaatatctttctgtaacaccctcagcatcctgcactgccctctctgaaaaca

SEQ ID NO: 114626 - DNA, 826 bp, Homo sapiens; identical to SEQ ID NO: 114621
  Payload ID: 2400
  Gene Symbol: CSNK2B
  Gene Name: casein kinase 2, beta polypeptide
  ENST ID: ENST00000614783
  CDS Start-End: 341-826

SEQ ID NO: 114627 - DNA, 1255 bp, Homo sapiens; identical to SEQ ID NO: 114624
  Payload ID: 2400
  Gene Symbol: CSNK2B
  Gene Name: casein kinase 2, beta polypeptide
  ENST ID: ENST00000617578
  CDS Start-End: 341-1255

SEQ ID NO: 114628 - DNA, 1181 bp, Homo sapiens; identical to SEQ ID NO: 114625
  Payload ID: 2400
  Gene Symbol: CSNK2B
  Gene Name: casein kinase 2, beta polypeptide
  ENST ID: ENST00000621203
  CDS Start-End: 13-699

SEQ ID NO: 114629 - DNA, 1181 bp, Homo sapiens; identical to SEQ ID NO: 114618
  Payload ID: 2400
  Gene Symbol: CSNK2B
  Gene Name: casein kinase 2, beta polypeptide
  ENST ID: ENST00000622139
  CDS Start-End: 13-699

SEQ ID NO: 114630 - DNA, 4695 bp, Homo sapiens
  Payload ID: 2401
  Gene Symbol: CLPX
  Gene Name: caseinolytic mitochondrial matrix peptidase chaperone subunit
  Uniprot ID: O76031
  ENST ID: ENST00000300107
  CDS Start-End: 190-2091
actctggtgaatagacggctgtggggcagagaagcgtgaaggcctggctgccgggcaggtgaactctccacggggtctagggcccgcgaaagggttcggaaccgagtcagcgcgccttgcgggcaggattcacgccgctgtgacccggaggtcctcagggggcgaagccccggcctaggcctcgcggagatgcccagctgcggtgcttgtacttgcggcgcggcggccgtccggctcatcacctcctcactcgcctccgcgcagagaggtatttctggtggtcgcattcatatgtcagttttaggaaggcttgggacatttgaaactcagattctgcaaagagctcctcttagatcctttacagaaacaccagcatactttgcctcaaaagatgggataagtaaagatggttctggagatggaaataagaaatcagcaagtgagggaagtagtaagaaatcaggctctgggaattctgggaaaggtggaaaccagctgcgctgtcctaaatgtggcgacttgtgcacacatgtagagacctttgtatcatccacccgttttgtcaagtgtgaaaagtgtcatcatttttttgttgtgctatctgaagcagactcaaagaaaagcataattaaagaacctgaatcagcagcagaagctgtaaaattggcattccaacagaaaccaccacctccccctaagaagatttataactacctcgacaagtatgttgttggccagtcatttgctaagaaggtgctttcagttgctgtgtacaatcattataagagaatatataataatatcccagctaatctgagacagcaagcagaggttgagaagcagacatcattaacaccaagagagttagaaataagaagacgggaggatgagtacagatttacaaaattgcttcagattgctggaattagcccacatggtaatgctttaggagcatcaatgcagcaacaggtaaatcaacaaatacctcaggaaaaacgaggaggtgaagtattggattcttctcatgatgacataaaacttgaaaaaagtaatattttgctgcttggaccaactgggtcaggtaaaactctgctggcacaaaccctagctaaatgccttgatgtcccttttgctatctgtgactgtacaactttgactcaggctggatatgtaggcgaagatattgaatctgtgattgcaaaactactccaagatgccaattataatgtggaaaaagcacaacaaggaattgtctttctggatgaagtagataagattggcagtgtgccaggcattcatcaattacgggatgtaggtggagaaggcgttcagcaaggcttattaaaactactagaaggcacaatagtcaatgttccagaaaagaattcccgaaagctccgtggagaaacagttcaagttgatacaacaaacatcctgtttgtggcatctggtgctttcaatggtttagacagaatcatcagcaggaggaaaaatgaaaagtatcttggatttggaacaccatctaatctgggaaaaggcagaagggctgcagctgctgcagaccttgctaatcgaagtggggaatcgaatactcaccaagacattgaagaaaaagatcggttattgcgtcatgtggaagccagagatctgattgagtttggcatgattcctgagtttgtgggacggttgcctgtggtggttccattgcatagcctagatgagaaaacacttgtacaaatattaactgagccacgaaatgctgttattcctcagtaccaggccttattcagcatggataagtgtgaactgaatgttactgaggatgctttgaaagctatagccagattggcactagaacgaaaaacaggtgcacgaggccttcggtccataatggaaaagctgttactagaaccaatgtttgaagtccctaattctgatatcgtatgtgtggaggttgacaaagaagtagtagaaggaaaaaaggaaccaggatacatccgggctccaacaaaagaatcctctgaagaggagtatgactctggagttgaagaagaaggatggccccgccaagcagatgctgcaaacagctaaactgtcatattgctgtcttgtatatacagcttttccttcttttgtttaggatcataattgtctctacagtctgatattaaaggcattggatctatcttggatatcatacatggtcagagaagcctttaggagaagaatcagatcatgtatataattgtaacatcacattgattttacggaagatgttatatggactttaatgacacaatgtttagagataaaatgtacattattttggttcagttttttaaaaaaaatatgctttaacaaaattcttaggaattcttttaagcaatgcaggtattgcgataactgtagattttacaataatgttactctacaaatgggaaaataaattctttaaaattgaatattgagataccattctttagtgttaccttttttacccacatgtgtttctgaaaatattggaattttattcatcttaaaaattggaccaggtaggccgggcgtggtggctcacgcctgtaatcccagcactttgggaggccaaggcgggtggatcacgaggtcaggagttcaagaccagcctggccaagatggtgaaaccccatctctactaaaaatatgaaaaattagctgggtgccgtggcaggtgcctgtaatcccagctactcgggaggctgaggcaggagaatcgcttgaactcggagggcagagtttacagtgagctgaggttgtgccactgcactccagcctgggcgacaaagtgagactccgtctcagggcgaaaacaaaaaattggaccaggtagttttcaagtagttaaacatttcattgaaaaataccctgaagaactatattttgataattggtttagctgtattcctagtcttatctgctaatgcatgacactaacttcccaattggttctgtaaaaaaggccattttcttaccaagttgtctgatttatttaccatcttttttttttttttttttttaattgagcggagtctcacgctgtcccaagctgaagtgcagtggtgcgatcttggctcactgcaacctccgcctcccaggttcaagcaattttcctgcctcagccttccaagtagctgggattataggcacgcaccaccacacctggctaatttttgtatttttagtagagacagggtttcaccctgttggccaggctagtctgtaactcctgaccttgtgatctgctggcctcagcctcccaaagtgctgggattgcaggcgtaagccaccacacccggccttatttaccatctttaatccattttagtactatgggtgagtacatggaattgaagtctggcttaaatcttcagaaagttatatatctattttattttatttttttgagacagagtctcgctgtgtcacccaggctggagtacagtgccacaatcttggctcactgcaacctctgagtcccaggttcaagcgatactcatgcctcagcctcctgagtagctgggactacaggcgtgcaccaccacacctggctaattttttgtatttttagtagagacggggtttcgccatgttgcccaggctggtctctcctgagctcaggcaatcggccaccttggcctctgaaagtgctagaattacgggcatgagccaccgcatccagccagaaagatacatatctaattctagaaatagcatgcagtatcagtcatagtaacagccatgtgctgacctaaataaaatttcttgatattgtgtatttaacctgaagtattgagctagtttttttgttttgttttttggtgctgaacattttggtctaattctttggcttcttagaacattttaaaaaatctatgttttgctatcagccaaagtaaatgtgttcacactaacatataagttactaaccttcattatacagcaaagctaaaaagtggtgggatatttggggtcttaatgaaaattgtatcatttaattccataaatattaaaatatttgggtaccttttaagctttttttctttccttctataatggtggtacaagttctatattcattcagtttaatctcatttgaaattgtttaaatcagagtacatgtaaatatttgtgggtttttttttttggtttatagactcgagctttccttttacacagttttttttagggaaaaactaaagctattaggaaattctaaatcttgttgatgaagagttgggctttctttgatataattaataaaagggatgtatggtatttatggctgggtaggaccagaaatgcactttgtattacagagtgttaaggctggttgctatagtatggaacagaaacacctctccttggtctccctagtaatggttcaagttcttcccaggaagtcttacatattataactttgttcattatctttcccttatagcatcattttcctttttgtagagtggaaatcagactagctgctaaacatattaaggttaatcctccagaaatgtactggggaggcattttagtcacaacaacttacatttggctttggaagttgttaacaaagcatagtcgatgtttttaaatcaaacataatttgtatcttggaacttacattttgacatttgaataaaacaaaaagactaaatgaaa

SEQ ID NO: 114631 - DNA, 533 bp, Homo sapiens
  Payload ID: 2401
  Gene Symbol: CLPX
  Gene Name: caseinolytic mitochondrial matrix peptidase chaperone subunit
  ENST ID: ENST00000559218
  CDS Start-End: 143-533
aagccccggggcccgcaggacagcggcgggagagatggggagaagtcccgcaggagttggttcggaagtacttgggtgtttcagcagtcctttgctggctttcccaacttgaccgggaggtatttctggtggtcgcattcatatgtcagttttaggaaggcttgggacatttgaaactcagattctgcaaagagctcctcttagatcctttacagaaacaccagcatactttgcctcaaaagatgggataagtaaagatggttctggagatggaaataagaaatcagcaagtgagggaagtagtaagaaatcaggctctgggaattctgggaaaggtggaaaccagctgcgctgtcctaaatgtggcgacttgtgcacacatgtagagacctttgtatcatccacccgttttgtcaagtgtgaaaagtgtcatcatttttttgttgtgctatctgaagcagactcaaagaaaagcataattaaagaacctgaatcagcagcagaagctgtaaaattggcattccaacagaaac

SEQ ID NO: 114632 - DNA, 2228 bp, Homo sapiens
  Payload ID: 2401
  Gene Symbol: CLPX
  Gene Name: caseinolytic mitochondrial matrix peptidase chaperone subunit
  ENST ID: ENST00000559152
  CDS Start-End: 64-870
gattcacgccgctgtgacccggaggtcctcagggggcgaagccccggcctaggcctcgcggagatgcccagctgcggtgcttgtacttgcggcgcggcggccgtccggctcatcacctcctcactcgcctccgcgcagagaggtatttctggtggtcgcattcatatgtcagttttaggaaggcttgggacatttgaaactcagattctgcaaagagctcctcttagatcctttacagaaacaccagcatactttgcctcaaaagatgggataagtaaagatggttctggagatggaaataagaaatcagcaagtgagggaagtagtaagaaatcaggctctgggaattctgggaaaggtggaaaccagctgcgctgtcctaaatgtggcgacttgtgcacacatgtagagacctttgtatcatccacccgttttgtcaagtgtgaaaagtgtcatcatttttttgttgtgctatctgaagcagactcaaagaaaagcataattaaagaacctgaatcagcagcagaagctgtaaaattggcattccaacagaaaccaccacctccccctaagaagatttataactacctcgacaagtatgttgttggccagtcatttgctaagaaggtgctttcagttgctgtgtacaatcattataagagaatatataataatatcccagctaatctgagacagcaagcagaggttgagaagcagacatcattaacaccaagagagttagaaataagaagacgggaggatgagtacagatttacaaaattgcttcagattgctggaattagcccacatggtaatgctttaggagcatcaatgcagcaacaggtaaaactctgctggcacaaaccctagctaaatgccttgatgtcccttttgctatctgtgactgtacaactttgactcaggctggatatgtaggcgaagatattgaatctgtgattgcaaaactactccaagatgccaattataatgtggaaaaagcacaacaaggaattgtctttctggatgaagtagataagattggcagtgtgccaggcattcatcaattacgggatgtaggtggagaaggcgttcagcaagtaagcagttgagtattttgttcaagcccactaaaaggaagggaatacatcaacctcccaaatattggcttattaaaactactagaaggcacaatagtcaatgttccagaaaagaattcccgaaagctccgtggagaaacagttcaagttgatacaacaaacatcctgtttgtggcatctggtgctttcaatggtttagacagaatcatcagcaggaggaaaaatgaaaagtatcttggatttggaacaccatctaatctgggaaaaggcagaagggctgcagctgctgcagaccttgctaatcgaagtggggaatcgaatactcaccaagacattgaagaaaaagatcggttattgcgtcatgtggaagccagagatctgattgagtttggcatgattcctgagtttgtgggacggttgcctgtggtggttccattgcatagcctagatgagaaaacacttgtacaaatattaactgagccacgaaatgctgttattcctcagtaccaggccttattcagcatggataagtgtgaactgaatgttactgaggatgctttgaaagctatagccagattggcactagaacgaaaaacaggtgcacgaggccttcggtccataatggaaaagctgttactagaaccaatgtttgaagtccctaattctgatatcgtatgtgtggaggttgacaaagaagtagtagaaggaaaaaaggaaccaggatacatccgggctccaacaaaagaatcctctgaagaggagtatgactctggagttgaagaagaaggatggccccgccaagcagatgctgcaaacagctaaactgtcatattgctgtcttgtatatacagcttttccttcttttgtttaggatcataattgtctctacagtctgatattaaaggcattggatctatcttggatatcatacatggtcagagaagcctttaggagaagaatcagatcatgtatataattgtaacatcacattgattttacggaagatgttatatggactttaatgacacaatgtttagagataaaatgtacattattttggttcagttttttaaaaaaaatatgctttaacaaaattcttaggaattcttttaagcaatgcaggtattgcga

SEQ ID NO: 114633 - DNA, 1155 bp, Homo sapiens
  Payload ID: 2402
  Gene Symbol: CLPP
  Gene Name: caseinolytic mitochondrial matrix peptidase proteolytic subunit
  Uniprot ID: Q16740
  ENST ID: ENST00000245816
  CDS Start-End: 124-957
ccttaatggcgcccgcccagactcctggaagtgagcggcctagcgagcgagctcccaggcgcaaagcacgccggaagctgtagttccgccatcggacggaagccgaccggggcgtgcggagggatgtggcccggaatattggtagggggggcccgggtggcgtcatgcaggtaccccgcgctggggcctcgcctcgccgctcactttccagcgcagcggccgccgcagcggacactccagaacggcctggccctgcagcggtgcctgcacgcgacggcgacccgggctctcccgctcattcccatcgtggtggagcagacgggtcgcggcgagcgcgcctatgacatctactcgcggctgctgcgggagcgcatcgtgtgcgtcatgggcccgatcgatgacagcgttgccagccttgttatcgcacagctcctcttcctgcaatccgagagcaacaagaagcccatccacatgtacatcaacagccctggtggtgtggtgaccgcgggcctggccatctacgacacgatgcagtacatcctcaacccgatctgcacctggtgcgtgggccaggccgccagcatgggctccctgcttctcgccgccggcaccccaggcatgcgccactcgctccccaactcccgtatcatgatccaccagccctcaggaggcgcccggggccaagccacagacattgccatccaggcagaggagatcatgaagctcaagaagcagctctataacatctacgccaagcacaccaaacagagcctgcaggtgatcgagtccgccatggagagggaccgctacatgagccccatggaggcccaggagtttggcatcttagacaaggttctggtccaccctccccaggacggtgaggatgagcccacgctggtgcagaaggagcctgtagaagcagcgccggcagcagaacctgtcccagctagcacctgagagctgggcctcctctccagaatcatgtggaggggccagaggcctgccagacccccagctgggccctgctcaccccttgttgctgggcttggaggggcctcttgaggaacttttaatttgcaggggtgcccgctatggacggggcattccagctgagacactgtgattttaaattaaatctttgtggtctttgctctg

SEQ ID NO: 114634 - DNA, 646 bp, Homo sapiens
  Payload ID: 2402
  Gene Symbol: CLPP
  Gene Name: caseinolytic mitochondrial matrix peptidase proteolytic subunit
  ENST ID: ENST00000596605
  CDS Start-End: 70-240
ccccagggtcgcggcgagcgcgcctatgacatctactcgcggctgctgcgggagcgcatcgtgtgcgtcatgggcccgatcgatgacagcgttgccagccttgttatcgcacagctcctcttcctgcaatccgagagcaacaagaagcccatccacatgtacatcaacagccctgggccaagccacagacattgccatccaggcagaggagatcatgaagctcaagaagcagctctataacatctacgccaagcacaccaaacagagcctgcaggtgatcgagtccgccatggagagggaccgctacatgagccccatggaggcccaggagtttggcatcttagacaaggttctggtccaccctccccaggacggtgaggatgagcccacgctggtgcagaaggagcctgtagaagcagcgccggcagcagaacctgtcccagctagcacctgagagctgggcctcctctccagaatcatgtggaggggccagaggcctgccagacccccagctgggccctgctcaccccttgttgctgggcttggaggggcctcttgaggaacttttaatttgcaggggtgcccgctatggacggggcattccagctgagacactgtgattttaaattaaatctttgtggtcttt

SEQ ID NO: 114635 - DNA, 480 bp, Homo sapiens
  Payload ID: 2402
  Gene Symbol: CLPP
  Gene Name: caseinolytic mitochondrial matrix peptidase proteolytic subunit
  ENST ID: ENST00000597326
  CDS Start-End: 1-480
tcattcccatcgtggtggagcagacgggtcgcggcgagcgcgcctatgacatctactcgcggctgctgcgggagcgcatcgtgtgcgtcatgggcccgatcgatgacagcgttgccagccttgttatcgcacagctcctcttcctgcaatccgagagcaacaagaagcccatccacatgtggtgtggtgaccgcgggcctggccatctacgacacgatgcagtacatcctcaacccgatctgcacctggtgcgtgggccaggccgccagcatgggctccctgcttctcgccgccggcaccccaggcatgcgccactcgctccccaactcccgtatcatgatccaccagccctcaggaggcgcccggggccaagccacagacattgccatccaggcagaggagatcatgaagctcaagaagcagctctataacatctacgccaagcacaccaaacagagcctgcaggtgatcgagtccgcc

SEQ ID NO: 114636 - DNA, 745 bp, Homo sapiens
  Payload ID: 2402
  Gene Symbol: CLPP
  Gene Name: caseinolytic mitochondrial matrix peptidase proteolytic subunit
  ENST ID: ENST00000596149
  CDS Start-End: 129-701
ggctccgggctgggtggggatcggctggctgccccggcccctcacctccatctttctacccccagggtcgcggcgagcgcgcctatgacatctactcgcggctgctgcgggagcgcatcgtgtgcgtcatgggcccgatcgatgacagcgttgccagccttgttatcgcacagctcctcttcctgcaatccgagagcaacaagaagcccatccacatgtacatcaacagccctggtggtgtggtgaccgcgggcctggccatctacgacacgatgcagtacatcctcaacccgatctgcacctggtgcgtgggccaggccgccagcatgggctccctgcttctcgccgccggcaccccaggcatgcgccactcgctccccaactcccgtatcatgatccaccagccctcaggaggcgcccggggccaagccacagacattgccatccaggcagaggagatcatgaagctcaagaagcagctctataacatctacgccaagcacaccaaacagagcctgcaggtgatcgagtccgccatggagagggaccgctacatgagccccatggaggcccaggagtttggcatcttagacaaggttctggtccaccctccccaggacggtgaggatgagcccacgctggtgcagaaggagcctgtagaagcagcgccggcagcagaacctgtcccagctagcacctgagagctgggcctcctctccagaatcatgtggaggggccagaggcc

SEQ ID NO: 114637 - DNA, 5759 bp, Homo sapiens
  Payload ID: 2403
  Gene Symbol: CASKIN1
  Gene Name: CASK interacting protein 1
  Uniprot ID: Q8WXD9
  ENST ID: ENST00000343516
  CDS Start-End: 94-4389
cgggggaggcggccggtgccgcggggccgccgccgcctctgagccgcgccgagctcacgagcgcagccgcgtcgctgcggccccggccgcgccatggggaaggagcaggagctggtgcaggcggtgaaggcggaggacgtagggaccgcgcagaggctgctgcagaggccgcggcccgggaaggccaagctcctgggttccaccaagaagatcaatgtcaacttccaggacccggatggcttctcggctctgcaccatgcggccctgaacggcaacacggaattgatcagcctgctgctggaggcccaggccgctgtggacatcaaggacaacaaaggcatgcggccgctgcactatgcggcctggcagggccggaaggagcccatgaagctggtgctgaaggcgggctcggccgtgaacatcccgtctgatgagggccacatccccctgcacctggcggcccagcatggtcactatgatgtgtctgagatgctgctacagcaccagtctaacccgtgcatggtggacaactcggggaagacgcccctggacctggcctgcgagttcggccgcgttggggtggtccagctgctcctcagcagcaatatgtgtgcggcgctgctggagccccggccgggagacgccaccgaccccaacggcaccagccctttgcacctcgcagctaaaaacggccacatcgacatcatcaggctcctcctccaagccggcatcgacattaaccgccagaccaagtccggcacggccctgcacgaggctgcgctctgcggaaagacagaggtggtgcggctgctgctggatagcgggatcaatgcccacgtgaggaacacctacagccagacagccctggacatcgtgcaccagttcaccacgtcccaggccagcagggagatcaagcagctgttgcgagaggcctcagcggccctgcaggtccgggcgaccaaggattattgcaacaattacgacctgaccagcctcaacgtgaaggcaggggacatcatcacagtcctcgagcagcatccggatggccggtggaagggctgcatccatgacaaccggacgggcaatgaccgggtgggctacttcccgtcctccctgggcgaggccattgtcaagcgagcaggttcccgagcaggcactgaaccaagcctgccccagggaagcagctcatcgggaccctctgcacccccagaggagatctgggtgctgaggaagccttttgcaggtggggaccgaagcggcagcattagcggcatggctggcggccggggcagcgggggtcacgccctacacgcgggctctgaaggcgtcaagctcctggcaacggtgctttcccagaagtccgtctctgagtccggcccgggggacagccccgccaagcctccggaaggctctgcaggtgtggcccggtcccagcctccagtggcccacgccgggcaggtctatggggagcagccgcccaagaagctggagccagcatcggagggcaagagctctgaggccgtgagccagtggctcaccgcgttccagctgcagctctacgcccccaacttcatcagcgccggctacgacctgcccaccatcagccgcatgactcccgaggacctcacggccattggtgtcaccaagccgggccaccggaagaagatcgcggcagagatcagcggcctaagcatccctgactggctgcctgagcacaaacccgctaacctggccgtgtggctgtccatgatcggcctggcccagtactacaaggtgttggtggacaatggctacgagaacattgatttcatcaccgacatcacctgggaggacctgcaggagatcggcatcaccaagctggggcaccagaagaagctgatgctcgctgtgaggaagctggcagagctgcagaaggctgaatacgccaagtatgaggggggccccctgcgccggaaggcgccccagtctcttgaagtgatggccatcgagtcgccgcccccgcctgagcccacaccggccgactgccagtcccctaaaatgaccaccttccaggacagcgagctcagtgacgagctgcaggctgccatgactggcccggctgaggtggggcccaccactgagaagccctccagccacctgccacccaccccgagggccaccacgcggcaggactccagcctgggtggtcgggcacggcacatgagcagctcgcaggagctgctgggagatgggccccctgggcccagcagccccatgtctcgaagccaggagtacctcctggatgagggccccgcccccggcaccccgcccagggaggcccggcccggccgccacggccacagcatcaagagggccagcgtgccccccgtgcctggcaagccacggcaggtcctcccaccaggcactagccacttcacgcccccccagacgcccaccaaaacccgaccaggctctccccaggcccttgggggacctcatggtccagccccagctacggccaaggtgaagcccaccccgcagctgctgccgccgacagagcgccccatgtcaccccgctccctgcctcagtcaccgacgcaccgcggctttgcctacgtgctgccccagcccgtggagggcgaggtggggccggctgccccggggcctgcgcccccacccgtgccgacggctgtgcccacactgtgcctgccccctgaggccgacgcggagccggggcggcccaagaagcgggcccacagcctgaatcgctatgcggcgtccgacagcgagccggagcgggacgagctgctggtgcctgcggctgccggcccctatgccacggtccagcggcgcgtgggccgcagccactcagtgagggcgcccgcaggtgccgacaagaacgtcaaccgcagccagtcctttgccgtgcggccccgaaagaaggggcccccgccgcccccacccaagcgctccagctcggccctggctagtgccaacctggcggatgagccggtgcctgacgccgagcctgaggatggcctgctgggggtccgggcacagtgccggcgggccagtgacctggccggcagcgtggacacgggtagtgccggcagtgtgaagagcatcgcggccatgctggagctgtcctccattgggggtgggggccgggctgcccgcaggcctcctgagggccaccccactccccgccctgccagcccagagccgggccgggtggccaccgtgctggcctcagtgaaacacaaagaggccatcgggcctggcggggaggtggtgaaccggcgccgcacgctcagcgggccagtcaccggacttctggccactgcccgccgggggcctggggagtcggcagacccaggcccctttgtggaggatggcactggccggcagcggcctcggggtccctccaagggcgaggcgggtgtcgaaggcccgcccttggccaaggtggaagccagcgccacactcaagaggcgcatccgggccaagcagaaccagcaggagaacgtcaagttcatcctgaccgagtctgacacggtcaagcgcaggcccaaggccaaggagcgggaggccgggcctgagccaccaccgccactgtccgtgtaccataatggcactggcaccgtgcgccgccgaccggcctcggagcaggctgggcctccggagctgcctccaccgcccccgcctgccgaacccccgcccaccgacctggcgcacctacccccattgcccccgcccgagggcgaagcccggaagccggccaagccgcctgtctctcccaagcccgtcctgacgcagcctgtgcccaagctccagggctcgcccacacccacctccaagaaggtgccgctgccaggccctggcagcccagaggtgaagcgcgcccacggcacgccaccgcccgtgtctcccaagccgccgccgccgcccacagcgcccaagcccgtcaaggcggtcgcggggctgccttcgggcagcgccggcccttcacccgcaccctcgcccgcgcgacagccgcccgccgccctcgccaagccgcccggtacgccgccctcgctgggcgccagccccgccaagcccccgtcccccggcgcgcccgcgctgcacgtgcccgccaagcccccgcgagccgccgccgccgccgccgccgccgccgccgcgccccccgccccgcccgaaggcgcctcgccaggggacagcgcccggcagaaactggaggagacaagcgcgtgcctggccgcggcgctgcaggcggtggaggagaagatccggcaggaggacgcgcagggcccgcgcgactcggcggcggaaaagagcactggcagcatcctggacgacatcggcagcatgttcgacgacctggccgaccagctggatgccatgctggagtgaacgccgcctggccgggccctcccgcgccgcccgggccctccccgcacactgacctatacctcaggatgggcgcgtctgggcgcggcgcgagcggccgggcagggccctgcagaagcacaactccggcccctggacccgggccggggcgcccaccggggaccgcctggccgggggctccaagggctctaggcagaccctgcgcccgcgggtcctccccacctgctgctccccgtgcaatacctgctgggcctcctgcccgcgcgggaggggagggcgccccgggaccagggatggggcagcgcacaggcccgggcccagcacagaactgcccatcgggacgcccggccagccgctcgggcgcagcacaagggacaggggaccaaggtcagggcccccctgccccaccgcacccccagaatataagctatcaagagtattaatttattgggaatgagctgaggcggatttccccagagaaacaaaaaggtataactttaacaaatatatatttaaagaaagaaatattattgattctatagaaaaccatttaccaactgaaaggacacgaagtctagctccggacaaaagctgttagaggcccaggctgtctgcctgcggtccttcctccggccagagtggaggccccaggctgctagcacaggtggaaggctggggcccgggggcgggtgctctgccgggggctcctccgtgcttctctcctaagttctctgcgccccaagaactcgaggttgtgccttgctctcggcggccgtgtcctcctcctggcgtggctgcgtcccagggcgcgggtgggtttggtgaatgtgggtgtgtcagcgtggcagccacgtggaagcagggcatgtagcaggccaggccacgggcttgcagctcctctgagggtgtgcctggccccctctccaggggctgtgcaggcagcccatccaccccagtggagttcccacggacgcttctgctcatggtccaaggctgtgttgtgtggtcattctcgccctcccttttcctctctcctcctgccccctccaagaagtactgactggtctcctctatcgtgtttgctgatccacagtgttgggcacaactttgacgtttcttaaaaaaaaaatttaaaaaatgccgaaaaccagcgattgtggtgtggggcgggtggaggcggctggcggaggtggcgtcccggcgtgcagggccccttcctgctgtctcaccccgtgtttccctgcgagtggacgtgcccagctgtccccccaggcctctcctcagagggcggcacaggctgggctccagcaggtgggcaggggaggtctgggcaaggcgctgccgtcggctgtcaataaacagcaggaaacaga

SEQ ID NO: 114638 - DNA, 5015 bp, Homo sapiens
  Payload ID: 2404
  Gene Symbol: CASKIN2
  Gene Name: CASK interacting protein 2
  Uniprot ID: Q8WXE0
  ENST ID: ENST00000321617
  CDS Start-End: 588-4196
gacggtccctccgttcccgatccggcgggagggaggggggaggggcgggatttcctgcgggaggcgccgagccggccttggaaaaggagaaggagaaaggggggcaggggggagtgggagccaccgtcctgagtgccagggaccgagcagggccagccggaccccggcgggcggccgggagagagccctgagaccagtgcaccgctgctgcctgaggcccaagggaatgctggctgctctctgggtgggcactggtgttccacagccaagccgggaagattggtgtgcccagtcccagcccatcctggagctgtcggaagccacaagctgatatccatccagatttccatgtagccttcaccccctcaaagattagctttccttcgtgtggtggcagttcacggagcacctttgggagtatccctcagtacctgacgaggagcccactgcctgggacacctgacttgctcccccggaaccgggagccctccaaggggctgtggcatggcgccctgacgccccagcttggacccgttgcctgcctttgccctggactcctgagtgtagagctcagcccaggagccagtatgggtcgtgaacaggacctgatcctcgccgtcaagaatggagatgtgaccggtgtgcagaaactggtggcgaaggtcaaggccacaaagacaaagctcctgggctccacaaagaggctcaacgtgaactaccaggatgctgatggattctctgccctccaccacgctgctttggggggcagcctggagctcatagccttgctgctagaggctcaggccactgttgacatcaaggacagcaatggcatgcgcccgctgcactacgcagcctggcagggccggctggagcctgtgaggctgctgctgcgcgcctctgcggctgtcaatgccgcctcgctggacggacagatccccctgcacctggctgcacagtatggacattatgaggtgtcagaaatgctcctccagcatcagtccaacccatgcctggtcaacaaggccaagaagacgcccctggacctggcctgtgaatttggccgactcaaggtggcccagctgcttctgaacagccacttatgtgtggcactgctggagggtgaggccaaagacccgtgtgaccccaactacaccacgcccctgcacttggctgccaagaatggccacagagaagtcatcaggcagctcctgagagctgggatcgagatcaaccgccagaccaagacgggtacggcgctccacgaggccgcactgtatggcaagaccgaggtggtgcggctgcttctggagggaggtgtggacgtgaacatccggaatacgtataaccagacggcgctggacatagtgaatcagttcaccacctcccaggccagccgggaaatcaagcagctactgcgggaggcctcagggatcctgaaggtccgagcgctcaaggatttctggaacctccacgatcccactgctctcaatgtccgggcaggggatgtcatcacggtgctagaacagcatcccgacggccgctggaagggccacatccacgagagccagaggggcacagaccgcataggctacttccccccgggcattgtcgaggtggtcagcaagcgggtgggcatccctgcagcccgcctcccctccgcacccacccccctgcgcccaggcttctcccggacaccgcagcctcctgccgaagaacccccgcaccctcttacctacagccagcttcctcgggtgggcctcagcccagacagcccagcaggtgacaggaatagtgtgggcagtgagggcagcgtgggcagcatccgcagtgccggcagcgggcagagctctgagggcactaatggccatggccctggcctcctgattgagaacgcccagccactgccctctgctggagaggaccaggtgctgccaggactccacccgccgtccctggcagacaacctgagccaccgccctctggccaactgccgctctggggagcagatcttcacccaggacgtgcggccagaacagctgctggaggggaaggacgcgcaggccattcataactggctaagcgagttccagctggagggctacactgcccactttctgcaggccggctatgatgtgcctaccatcagccgcatgacacctgaggacctgacggccatcggggtgaccaagcctgggcacaggaagaagatcgcctcagagatcgctcagctcagcatcgccgagtggctgcccagctacatcccaacggacctgctggagtggctgtgtgcactggggctgccacagtaccacaagcagctggtgagcagcggctacgactccatggggctggtggccgacctcacctgggaggagctgcaggagattggggtcaacaagctcgggcatcagaagaagctcatgctgggggtgaagcggctggcggagcttcggcggggcctgctgcagggggaggccctcagcgaaggcgggcgccggctggccaagggtccggagctgatggccatcgagggactggagaacggagaaggcccagctacagctggcccacggctcctcaccttccagggcagcgaactaagcccagagctacaggcggccatggcagggggtggccctgaaccactccccctcccacctgcccgctctcccagccaggagagcatcggggcacgctcacgggggtctggccactcacaggaacagcctgccccacagcccagcggtggagatcccagccccccccaggagaggaacctcccagagggcacagagcggccccctaagctttgttcttcacttcctggccaaggacccccaccctatgtttttatgtacccccagggctcaccctctagcccggccccagggccacctcctggcgcaccctgggccttctcctacttggccgggccccctgccactcccccagacccgcctcgacctaagcgccggtcccacagcctaagccgccctggccccacagagggggatgctgagggggaggccgaagggccagtgggcagcaccctaggcagttatgctacccttacccggcggccaggacgcagtgcccttgtccggaccagtcctagtgtgaccccaaccccagctcgggggactcctcgcagccagtcctttgccctgcgggcccggcgcaaaggccccccgcccccgccccccaagcgcctcagctccgtctctggccccagcccggagccacctccactagatgagagcccagggcccaaggaaggggccacagggccccgaaggcgaacactgagtgaacctgctggcccctcagagccccctggcccacctgccccggctgggcccgcgtcagacacggaggaggaggagccaggccctgaggggacgcccccatctcggggcagctctggggaagggctgccgtttgcagaggaagggaacctgaccatcaaacagcgcccgaagcccgctggccccccgccccgagagacacccgtgccccccggcctcgatttcaacctcacggaatcagacactgttaagcggaggcccaagtgccgggagagagagccactgcagaccgcactgctggccttcggagtggccagtgccacgcctggccccgctgccccactgccttccccaactcctggcgagtctcctccagcttctagccttccccagcccgagcccagcagccttccagcccaaggagttccaaccccccttgctcccagccccgccatgcagcctccagtgccgccctgcccagggccaggtctggaaagctcagcagctagtcggtggaatggggagacagaacccccggccgcccctgctgccctcctcaaggtgcccggagcaggaacagcccccaagcctgtgtcggtggcctgcacccagctggcattttctggccctaagctagcgccccggctcggcccccgcccagtgcctcctccacggcctgagagcactgggactgtgggcccaggccaggcccagcagagactggagcagaccagctcgtccctggcagctgcactgagagccgcagagaagagcattggcaccaaggagcaagagggcacccccagcgcctccaccaagcacattctggatgacatcagcaccatgttcgacgccctggctgaccagctggacgccatgctggactgagccctccagcagtgcccactgtgacctgccgaagtccactgcctttgccccagcacagaagaggcccctgccaccctagggacgggccaagggctggtcaggctgaagtgcccctcctagcagggccccttcccactcagcccgcggctgtgggcaccacagctcttgtggggcagcccaccttagaacctgactagcgagggacctccgctgcatctcagcaaagcccctcccagggtttgatcgattgagcaggacagccctgctcctggacagggaccctggtaagagctctctcctcagggaggaagtaggggtggggctttgggggtgctttctctgtaccccccagcccatgtcccaagttgtgccaagggaatgcctcttgccacccaccatcctgcccaggccctgagaggctggaggaggcgtgtgtctggccgggccccctctccgtaggtgtacagaggacatgtaaatacacagcggtggtgcccaggcagctcctgcccccgccttccctcactgaggcagggctagcaggggtgggaggcagtggggttaacagatcccacaagtcctaacttttcaattgtaaatgttattttctaagcagagagaaatgcatatattttaaatggaatttattctatcaactgcctgagaggacacaatgggggaggggcttcggaccacagcaggagccccgactgcccacctgagggcagggagagcctgaccccattggcccaggccctggctctgtaaccattaacctcttcccccaactaacaccaatgaaaacaccattccacgtga

SEQ ID NO: 114639 - DNA, 3950 bp, Homo sapiens
  Payload ID: 2404
  Gene Symbol: CASKIN2
  Gene Name: CASK interacting protein 2
  Uniprot ID: Q8WXE0
  ENST ID: ENST00000433559
  CDS Start-End: 317-3679
ttgtcctgctcctctcgggagggactgcatcccgccacccagctgcctcatcccaaactgtccaggctgttggaagaggagggctaatggaagagtgggcagcttgaagggtgctctgtgtctcttccctgctgaccgcattgtctccactggggctcagagagagctcctgggctccacaaagaggctcaacgtgaactaccaggatgctgatggattctctgccctccaccacgctgctttggggggcagcctggagctcatagccttgctgctagaggctcaggccactgttgacatcaaggacagcaatggcatgcgcccgctgcactacgcagcctggcagggccggctggagcctgtgaggctgctgctgcgcgcctctgcggctgtcaatgccgcctcgctggacggacagatccccctgcacctggctgcacagtatggacattatgaggtgtcagaaatgctcctccagcatcagtccaacccatgcctggtcaacaaggccaagaagacgcccctggacctggcctgtgaatttggccgactcaaggtggcccagctgcttctgaacagccacttatgtgtggcactgctggagggtgaggccaaagacccgtgtgaccccaactacaccacgcccctgcacttggctgccaagaatggccacagagaagtcatcaggcagctcctgagagctgggatcgagatcaaccgccagaccaagacgggtacggcgctccacgaggccgcactgtatggcaagaccgaggtggtgcggctgcttctggagggaggtgtggacgtgaacatccggaatacgtataaccagacggcgctggacatagtgaatcagttcaccacctcccaggccagccgggaaatcaagcagctactgcgggaggcctcagggatcctgaaggtccgagcgctcaaggatttctggaacctccacgatcccactgctctcaatgtccgggcaggggatgtcatcacggtgctagaacagcatcccgacggccgctggaagggccacatccacgagagccagaggggcacagaccgcataggctacttccccccgggcattgtcgaggtggtcagcaagcgggtgggcatccctgcagcccgcctcccctccgcacccacccccctgcgcccaggcttctcccggacaccgcagcctcctgccgaagaacccccgcaccctcttacctacagccagcttcctcgggtgggcctcagcccagacagcccagcaggtgacaggaatagtgtgggcagtgagggcagcgtgggcagcatccgcagtgccggcagcgggcagagctctgagggcactaatggccatggccctggcctcctgattgagaacgcccagccactgccctctgctggagaggaccaggtgctgccaggactccacccgccgtccctggcagacaacctgagccaccgccctctggccaactgccgctctggggagcagatcttcacccaggacgtgcggccagaacagctgctggaggggaaggacgcgcaggccattcataactggctaagcgagttccagctggagggctacactgcccactttctgcaggccggctatgatgtgcctaccatcagccgcatgacacctgaggacctgacggccatcggggtgaccaagcctgggcacaggaagaagatcgcctcagagatcgctcagctcagcatcgccgagtggctgcccagctacatcccaacggacctgctggagtggctgtgtgcactggggctgccacagtaccacaagcagctggtgagcagcggctacgactccatggggctggtggccgacctcacctgggaggagctgcaggagattggggtcaacaagctcgggcatcagaagaagctcatgctgggggtgaagcggctggcggagcttcggcggggcctgctgcagggggaggccctcagcgaaggcgggcgccggctggccaagggtccggagctgatggccatcgagggactggagaacggagaaggcccagctacagctggcccacggctcctcaccttccagggcagcgaactaagcccagagctacaggcggccatggcagggggtggccctgaaccactccccctcccacctgcccgctctcccagccaggagagcatcggggcacgctcacgggggtctggccactcacaggaacagcctgccccacagcccagcggtggagatcccagccccccccaggagaggaacctcccagagggcacagagcggccccctaagctttgttcttcacttcctggccaaggacccccaccctatgtttttatgtacccccagggctcaccctctagcccggccccagggccacctcctggcgcaccctgggccttctcctacttggccgggccccctgccactcccccagacccgcctcgacctaagcgccggtcccacagcctaagccgccctggccccacagagggggatgctgagggggaggccgaagggccagtgggcagcaccctaggcagttatgctacccttacccggcggccaggacgcagtgcccttgtccggaccagtcctagtgtgaccccaaccccagctcgggggactcctcgcagccagtcctttgccctgcgggcccggcgcaaaggccccccgcccccgccccccaagcgcctcagctccgtctctggccccagcccggagccacctccactagatgagagcccagggcccaaggaaggggccacagggccccgaaggcgaacactgagtgaacctgctggcccctcagagccccctggcccacctgccccggctgggcccgcgtcagacacggaggaggaggagccaggccctgaggggacgcccccatctcggggcagctctggggaagggctgccgtttgcagaggaagggaacctgaccatcaaacagcgcccgaagcccgctggccccccgccccgagagacacccgtgccccccggcctcgatttcaacctcacggaatcagacactgttaagcggaggcccaagtgccgggagagagagccactgcagaccgcactgctggccttcggagtggccagtgccacgcctggccccgctgccccactgccttccccaactcctggcgagtctcctccagcttctagccttccccagcccgagcccagcagccttccagcccaaggagttccaaccccccttgctcccagccccgccatgcagcctccagtgccgccctgcccagggccaggtctggaaagctcagcagctagtcggtggaatggggagacagaacccccggccgcccctgctgccctcctcaaggtgcccggagcaggaacagcccccaagcctgtgtcggtggcctgcacccagctggcattttctggccctaagctagcgccccggctcggcccccgcccagtgcctcctccacggcctgagagcactgggactgtgggcccaggccaggcccagcagagactggagcagaccagctcgtccctggcagctgcactgagagccgcagagaagagcattggcaccaaggagcaagagggcacccccagcgcctccaccaagcacattctggatgacatcagcaccatgttcgacgccctggctgaccagctggacgccatgctggactgagccctccagcagtgcccactgtgacctgccgaagtccactgcctttgccccagcacagaagaggcccctgccaccctagggacgggccaagggctggtcaggctgaagtgcccctcctagcagggccccttcccactcagcccgcggctgtgggcaccacagctcttgtggggcagcccaccttagaacctgactagcgagggacctccgctgcatctcagcaaagcccctcccagggtttgatcgattgagcaggacagccctgctcctg

SEQ ID NO: 114640 - DNA, 530 bp, Homo sapiens
  Payload ID: 2404
  Gene Symbol: CASKIN2
  Gene Name: CASK interacting protein 2
  ENST ID: ENST00000580075
  CDS Start-End: 454-530
tacctcgggcgcttggcccgcccggcttctcccgccgctttgttccccgagccctgagaccagtgcaccgctgctgcctgaggcccaagggaatgctggctgctctctgggtgggcactggtgttccacagccaagccgggaagattggtgtgcccagtcccagcccatcctggagctgtcggaagccacaagctgatatccatccagatttccatgtagccttcaccccctcaaagattagctttccttcgtgtggtggcagttcacggagcacctttgggagtatccctcagtacctgacgaggagcccactgcctgggacacctgacttgctcccccggaaccgggagccctccaaggggctgtggcatggcgccctgacgccccagcttggacccgttgcctgcctttgccctggactcctgagtgtagagctcagcccaggagccagtatgggtcgtgaacaggacctgatcctcgccgtcaagaatggagatgtgaccggtgtgcagaaactggtggcgaaggt

SEQ ID NO: 114641 - DNA, 1612 bp, Homo sapiens
  Payload ID: 2404
  Gene Symbol: CASKIN2
  Gene Name: CASK interacting protein 2
  ENST ID: ENST00000581870
  CDS Start-End: 445-1416
cgagcagggccagccggaccccggcgggcggccgggagagagccctgagaccagtgcaccgctgctgcctgaggcccaagggaatgctggctgctctctgggtgggcactggtgttccacagccaagccgggaagattggtgtgcccagtcccagcccatcctggagctgtcggaagccacaagctgatatccatccagatttccatgtagccttcaccccctcaaagattagctttccttcgtgtggtggcagttcacggagcacctttgggagtatccctcagtacctgacgaggagcccactgcctgggacacctgacttgctcccccggaaccgggagccctccaaggggctgtggcatggcgccctgacgccccagcttggacccgttgcctgcctttgccctggactcctgagtgtagagctcagcccaggagccagtatgggtcgtgaacaggacctgatcctcgccgtcaagaatggagatgtgaccggtgtgcagaaactggtggcgaaggtcaaggccacaaagacaaagctcctgggctccacaaagaggctcaacgtgaactaccaggatgctgatggattctctgccctccaccacgctgctttggggggcagcctggagctcatagccttgctgctagaggctcaggccactgttgacatcaaggacagcaatggcatgcgcccgctgcactacgcagcctggcagggccggctggagcctgtgaggctgctgctgcgcgcctctgcggctgtcaatgccgcctcgctggacggacagatccccctgcacctggctgcacagtatggacattatgaggtgtcagaaatgctcctccagcatcagtccaacccatgcctggtcaacaaggccaagaagacgcccctggacctggcctgtgaatttggccgactcaaggtggcccagctgcttctgaacagccacttatgtgtggcactgctggagggtgaggccaaagacccgtgtgaccccaactacaccacgcccctgcacttggctgccaagaatggccacagagaagtcatcaggcagctcctgagagctgggatcgagatcaaccgccagaccaagacgggtacggcgctccacgaggccgcactgtatggcaagaccgaggtggtgcggctgcttctggagggaggtgtggacgtgaacatccggaatacgtataaccagacggcgctggacatagtgaatcagttcaccacctcccaggccagccgggaaatcaagcagctactgcgggaggcctcagggatcctgaaggtccgagcgctcaaggatttctggaacctccacgatcccactgctctcaatgtccgggcaggggatgtcatcacggtgagggaccccaagcaggcattcctttgcaaatacaaatgattgctgttacttatttgggcacctgctatgttaccacgttctgctctgaggtctctatatgcaccctcatttaattcttcttaaagccagggaaggcagtgctgttagcatttcttctttacagatgacaaaattgagaattaaacaaaataaaatcaagagaaattcaagtgacttgcccaaggtcacacagcta

SEQ ID NO: 114642 - DNA, 1169 bp, Homo sapiens
  Payload ID: 2405
  Gene Symbol: CRADD
  Gene Name: CASP2 and RIPK1 domain containing adaptor with death domain
  Uniprot ID: P78560
  ENST ID: ENST00000332896
  CDS Start-End: 105-704
gccattaacaaagatggtgcttatggggcaggttccctaacagtcaggattccggttgcagtttttctcccccgccccaaagatacgtggttgcagacggagaaatggaggccagagacaaacaagtactccgctcacttcgcctggagctgggtgcagaggtattggtggagggactggttcttcagtacctctaccaggaaggaatcttgacggaaaaccatattcaagaaatcaatgctcaaaccacaggcctccggaaaacaatgctcctgctggatatcctaccttccaggggccctaaagcatttgatacattcctagattccctacaggagtttccctgggtcagggagaagctgaagaaggcaagggaagaggccatgaccgacctgcctgcaggtgacagattgactgggatcccctcgcacatcctcaacagctccccatcagaccggcagattaaccagctggcccagaggctgggccctgagtgggagcccatggtgctgtctctgggactgtcccagacggatatctaccgctgtaaggccaaccacccccacaacgtgcagtcgcaggtggtggaggccttcatccgttggcggcagcgcttcgggaagcaggccaccttccagagcctgcacaacgggctgcgggctgtggaggtggacccctcgctgctcctgcacatgttggagtgatggtgcctccagcaaccgctggggagtgtgtccctgagtcatgtgggctgaatcctgactttcactcagagcaggtggttttttgtgtaggtttgttttttatttttgatgatcttcagatggaaggagaaaacagggtttccactagacattacttgaaaggccagattactcagcagatctcccatgttggctcaacaattctttgtttttaattgcttgaagattgcattgttgtaattgttcagtttttaaatgtgtaatggcattttaatagactagtaaatcacagtggttcaaaatatatatccatatatatatatatccatatatatatctcatgtcatcacattacaggcaggtgtctcatatgtaaaacatttacctgaatgttgtctgaggactgaactgtggactttactattcataatgataaaataataaaatgcgaattactatatataa

SEQ ID NO: 114643 - DNA, 1403 bp, Homo sapiens
  Payload ID: 2405
  Gene Symbol: CRADD
  Gene Name: CASP2 and RIPK1 domain containing adaptor with death domain
  Uniprot ID: P78560
  ENST ID: ENST00000542893
  CDS Start-End: 319-918
aagggtttcagcggccgaagcagagcctttttaaatagttcccaatgggcgctcacggccaaacgtgaacacctcccctcctcacctgtcacctcctgaactttacagggttgcgagggggagtgtgggatcgggtgtcgcctagccgtggtcgtactgcccgggtgtgtctgaagccccatctgtcatccctgcctgccttcccggtcacttaaccttcactgccttacacacaaccaagccacagcacactggtgcaggggtggtggaactgcaccttcaaatcgtgcctggctactgaccagtgctgggggagaaatggaggccagagacaaacaagtactccgctcacttcgcctggagctgggtgcagaggtattggtggagggactggttcttcagtacctctaccaggaaggaatcttgacggaaaaccatattcaagaaatcaatgctcaaaccacaggcctccggaaaacaatgctcctgctggatatcctaccttccaggggccctaaagcatttgatacattcctagattccctacaggagtttccctgggtcagggagaagctgaagaaggcaagggaagaggccatgaccgacctgcctgcaggtgacagattgactgggatcccctcgcacatcctcaacagctccccatcagaccggcagattaaccagctggcccagaggctgggccctgagtgggagcccatggtgctgtctctgggactgtcccagacggatatctaccgctgtaaggccaaccacccccacaacgtgcagtcgcaggtggtggaggccttcatccgttggcggcagcgcttcgggaagcaggccaccttccagagcctgcacaacgggctgcgggctgtggaggtggacccctcgctgctcctgcacatgttggagtgatggtgcctccagcaaccgctggggagtgtgtccctgagtcatgtgggctgaatcctgactttcactcagagcaggtggttttttgtgtaggtttgttttttatttttgatgatcttcagatggaaggagaaaacagggtttccactagacattacttgaaaggccagattactcagcagatctcccatgttggctcaacaattctttgtttttaattgcttgaagattgcattgttgtaattgttcagtttttaaatgtgtaatggcattttaatagactagtaaatcacagtggttcaaaatatatatccatatatatatatatccatatatatatctcatgtcatcacattacaggcaggtgtctcatatgtaaaacatttacctgaatgttgtctgaggactgaactgtggactttactattcataatgataaaataataaaatgcgaattactatatataatgtgcctcactcatgagaaa

SEQ ID NO: 114644 - DNA, 1293 bp, Homo sapiens
  Payload ID: 2405
  Gene Symbol: CRADD
  Gene Name: CASP2 and RIPK1 domain containing adaptor with death domain
  Uniprot ID: P78560
  ENST ID: ENST00000551065
  CDS Start-End: 81-392
ggggcaggttccctaacagtcaggattccggttgcagtttttctcccccgccccaaagatacgtggttgcagacggagaaatggaggccagagacaaacaagtactccgctcacttcgcctggagctgggtgcagaggtattggtggagggactggttcttcagtacctctaccaggaaggaatcttgacggaaaaccatattcaagaaatcaatgctcaaaccacaggcctccggaaaacaatgctcctgctggatatcctaccttccaggggccctaaagcatttgatacattcctagattccctacaggagtttccctgggtcagggagaagctgaagaaggcaagggaagaggccatgaccgacctgcctgcagggtgttggccatgatccttatgatggggaggaagggaatcaccaattttctaccccatcccactgagcaacttagagatgacctaaggcctcgttacctgtgtggagtaactgggaattggaagagatgaggaaactgaggccaaaggattctgttacttgcctggcttcacagctcacctggagattctgaactggcatcttcctctctctgccatcaccccagaccctaccctctttcctctacaccagtggttctcaatcaagggcgattttgccttccaggggacatttgacaatgtctggaggcgtttttggttgtcacaattctgtgtatgtgtgtgggtgggcggggggcaggggattatgttggcatctagtgagtagataacagagatgctgctaaacctacaatgctcagatggcccctaacaaagaagtatgttgtccaaaatgtcaatggtgcagagggtgagaagccctggtctatacagagctcagcagtccagagcaattgcaacctctgggagttgccaagagctcctctgcccagcaacaggcttggcctctctcctgtggctgccacaagagttaaagccactgtctggaatgccctttggcagtggccaagtgtcccctgcagaactgactgcgggacatgcggtgcatcagccggagctgatgtgttttgtaatttatagtcacagggcgcctgtcttcatttagcagtaggcctgctggcagcttccctgccagggaggaagcaagttccacagaggcccacagcccccgccagctgccggcccgtggtatttggggacggctgttgctcagagacacctgggaataggccggggccgagatggcgctgagcactcggtctccccttcagacccatccatcagcagcggtccct

SEQ ID NO: 114645 - DNA, 1056 bp, Homo sapiens
  Payload ID: 2405
  Gene Symbol: CRADD
  Gene Name: CASP2 and RIPK1 domain containing adaptor with death domain
  ENST ID: ENST00000548483
  CDS Start-End: 81-446
ggggcaggttccctaacagtcaggattccggttgcagtttttctcccccgccccaaagatacgtggttgcagacggagaaatggaggccagagacaaacaagtactccgctcacttcgcctggagctgggtgcagaggtattggtggagggactggttcttcagtacctctaccaggaaggaatcttgacggaaaaccatattcaagaaatcaatgctcaaaccacaggcctccggaaaacaatgctcctgctggatatcctaccttccaggggccctaaagcatttgatacattcctagattccctacaggagtttccctgggtcagggagaagctgaagaaggcaagggaagaggccatgaccgacctgcctgcagagatgaggaaactgaggccaaaggattctgttacttgcctggcttcacagctcacctggagattctgaactggcatcttcctctctctgccatcaccccagaccctaccctctttcctctacaccagtggttctcaatcaagggcgattttgccttccaggggacatttgacaatgtctggaggcgtttttggttgtcacaattctgtgtatgtgtgtgggtgggcggggggcaggggattatgttggcatctagtgagtagataacagagatgctgctaaacctacaatgctcagatggcccctaacaaagaagtatgttgtccaaaatgtcaatggtgcagagggtgagaagccctggtctatacagagctcagcagtccagagcaattgcaacctctgggagttgccaagagctcctctgcccagcaacaggcttggcctctctcctgtggctgccacaagagttaaagccactgtctggaatgccctttggcagtggccaagtgtcccctgcagaactgactgcgggacatgcggtgcatcagccggagctgatgtgttttgtaatttatagtcacagggcgcctgtcttcatttagcagtaggcctgctggcagcttccctgccagggaggaagcaagttccacagaggcccacagcccccgccagctgccgg

SEQ ID NO: 114646 - DNA, 839 bp, Homo sapiens
  Payload ID: 2405
  Gene Symbol: CRADD
  Gene Name: CASP2 and RIPK1 domain containing adaptor with death domain
  ENST ID: ENST00000552983
  CDS Start-End: 105-497
gccattaacaaagatggtgcttatggggcaggttccctaacagtcaggattccggttgcagtttttctcccccgccccaaagatacgtggttgcagacggagaaatggaggccagagacaaacaagtactccgctcacttcgcctggagctgggtgcagaggtattggtggagggactggttcttcagtacctctaccaggaaggaatcttgacggaaaaccatattcaagaaatcaatgctcaaaccacaggcctccggaaaacaatgctcctgctggatatcctaccttccaggggccctaaagcatttgatacattcctagattccctacaggagtttccctgggtcagggagaagctgaagaaggcaagggaagaggccatgaccgacctgcctgcagggttagaggaaaaaggaaggactggccgaagaatggggtggggagctggagaagagaagggccaaaagtgtcagactgtggggatgaggacctgaaggaggcccatgagacctcaggcatgggccctggaactctgcctttttgaagcctgttgacaatctcaccctaatttaaccctttgtggaattcttccatgagatgcagttgccatcatcaggcttcctagagaattgagcctgcccactctgttatgaagtctacccagaagagctggcagagtaggccccttcactgggactgcagcaacactgaccaaagcaaatccttctcttggaagaaacaaactcattcctcacacctgcctcaccccgctcccaccgccaccccctgcaccacacgccagcccttaataaaaactaaaactgatgtcattgtaa

SEQ ID NO: 114647 - DNA, 622 bp, Homo sapiens
  Payload ID: 2405
  Gene Symbol: CRADD
  Gene Name: CASP2 and RIPK1 domain containing adaptor with death domain
  ENST ID: ENST00000552033
  CDS Start-End: 103-450
cattaacaaagatggtgcttatggggcaggttccctaacagtcaggattccggttgcagtttttctcccccgccccaaagatacgtggttgcagacggagaaatggaggccagagacaaacaagtactccgctcacttcgcctggagctgggtgcagaggtattggtggagggactggttcttcagtacctctaccaggaaggaatcttgacggaaaaccatattcaagaaatcaatgctcaaaccacaggcctccggaaaacaatgctcctgctggatatcctaccttccaggggccctaaagcatttgatacattcctagattccctacaggagtttccctgggtcagggagaagctgaagaaggcaagggaagaggccatgaccgacctgcctgcagttgccatcatcaggcttcctagagaattgagcctgcccactctgttatgaagtctacccagaagagctggcagagtaggccccttcactgggactgcagcaacactgaccaaagcaaatccttctcttggaagaaacaaactcattcctcacacctgcctcaccccgctcccaccgccaccccctgcaccacacgccagcccttaataaaaactaaaactga

SEQ ID NO: 114648 - DNA, 14672 bp, Homo sapiens
  Payload ID: 2406
  Gene Symbol: CFLAR
  Gene Name: CASP8 and FADD-like apoptosis regulator
  Uniprot ID: O15519
  ENST ID: ENST00000309955
  CDS Start-End: 516-1958
tttactcctaacgcgtggaacttgtgtcgacatccacccccggttactgcatactcagtcacacaagccatagcaggaaacagcgagcttgcagcctcaccgacgagtctcaactaaaagggactcccggagctaggggtggggactcggcctcacacagtgagtgccggctattggacttttgtccagtgacagctgagacaacaaggaccacgggaggaggtgtaggagagaagcgccgcgaacagcgatcgcccagcaccaagtccgcttccaggctttcggtttctttgcctccatcttgggtgcgccttcccggcgtctaggggagcgaaggctgaggtggcagcggcaggagagtccggccgcgacaggacgaactcccccactggaaaggattctgaaagaaatgaagtcagccctcagaaatgaagttgactgcctgctggctttctgttgactggcccggagctgtactgcaagacccttgtgagcttccctagtctaagagtaggatgtctgctgaagtcatccatcaggttgaagaagcacttgatacagatgagaaggagatgctgctctttttgtgccgggatgttgctatagatgtggttccacctaatgtcagggaccttctggatattttacgggaaagaggtaagctgtctgtcggggacttggctgaactgctctacagagtgaggcgatttgacctgctcaaacgtatcttgaagatggacagaaaagctgtggagacccacctgctcaggaaccctcaccttgtttcggactatagagtgctgatggcagagattggtgaggatttggataaatctgatgtgtcctcattaattttcctcatgaaggattacatgggccgaggcaagataagcaaggagaagagtttcttggaccttgtggttgagttggagaaactaaatctggttgccccagatcaactggatttattagaaaaatgcctaaagaacatccacagaatagacctgaagacaaaaatccagaagtacaagcagtctgttcaaggagcagggacaagttacaggaatgttctccaagcagcaatccaaaagagtctcaaggatccttcaaataacttcaggctccataatgggagaagtaaagaacaaagacttaaggaacagcttggcgctcaacaagaaccagtgaagaaatccattcaggaatcagaagcttttttgcctcagagcatacctgaagagagatacaagatgaagagcaagcccctaggaatctgcctgataatcgattgcattggcaatgagacagagcttcttcgagacaccttcacttccctgggctatgaagtccagaaattcttgcatctcagtatgcatggtatatcccagattcttggccaatttgcctgtatgcccgagcaccgagactacgacagctttgtgtgtgtcctggtgagccgaggaggctcccagagtgtgtatggtgtggatcagactcactcagggctccccctgcatcacatcaggaggatgttcatgggagattcatgcccttatctagcagggaagccaaagatgttttttattcagaactatgtggtgtcagagggccagctggaggacagcagcctcttggaggtggatgggccagcgatgaagaatgtggaattcaaggctcagaagcgagggctgtgcacagttcaccgagaagctgacttcttctggagcctgtgtactgcggacatgtccctgctggagcagtctcacagctcaccatccctgtacctgcagtgcctctcccagaaactgagacaagaaagaaaacgcccactcctggatcttcacattgaactcaatggctacatgtatgattggaacagcagagtttctgccaaggagaaatattatgtctggctgcagcacactctgagaaagaaacttatcctctcctacacataagaaaccaaaaggctgggcgtagtggctcacacctgtaatcccagcactttgggaggccaaggagggcagatcacttcaggtcaggagttcgagaccagcctggccaacatggtaaacgctgtccctagtaaaaatacaaaaattagctgggtgtgggtgtgggtacctgtattcccagttacttgggaggctgaggtgggaggatcttttgaacccaggagttcagggtcatagcatgctgtgattgtgcctacgaatagccactgcataccaacctgggcaatatagcaagatcccatctctttaaaaaaaaaaaaaaaggacaggaactatcttactcaatgtattagtcatgtttctctagagggacagaactaataggatacatgtatataaaaaggggagtttattaaggagtattgactcacatgatcacagggttaggtcccacaataggtcatctgcaagcaaggaagccaattcaagtcccaaagctgaagaacttggagtccaatgtttgagggcaggaagcattcagcatgagagaaagatggaggccagaagactacaccagtctagtctttccatgttttgcctgcttttattctggcagtgctggcagctgattagatggtgcccacccagattgaggatggtctgcctttcccagtccactgactcaaatgttaaatctcctttggcagcaccctcacagatgtacccgggaacactttgcatccttctattcaatcaagttgatactcagtattaaccatcacagtccatttgggcaactataccaaattaccatagaccaggtgacttaaacagcagttatttctcacagttccggaggctgggaaatccaacatctaagtggtagcatatctggtgtctggtaaggcatgcttccagatcttaccagatgtcagtcttttgatgttctcacatggcagaaaaagaggatgcaaactctcaagtatatctttaagggcacaaattccattcatgagggctctaccctcatcacctaattacctcccaaaggccccaccttctgatactgtcactttggggatactgtctcccctttgaattctggggggaatacaaacattcagtttgtaacaatagccttatgatttagaggttacttgttcattcacctagacctcaaattgcattttacagctagtcaagtatatctttctctgatttgatagtgtgacctaaaaggggaccattgtttgaaatatcattagagttgcttattattattattattattattattattattattattattattattgagacagagtttcattctgctgcccaggctggagtgcagtggcatcatcttggctcattgcaacctctgccttctgggttcaagcgattctcctgcctcagcctcccgagtagctgggattacaggctcctgccaccacacccggctaatttttgtatttttagtggagacagggtttccaccatgttggccagcgtggtcttgaactcctgacctcaggtgattcaccagcctcggcctcccaaagtgctgggattacaggtgtgagccactgcacctggcctattattatttttaaattttttttttttaattgatcattcttgggtgtttctcacagagggtgatttggcagggtcacaggacaatagtggagggaaggtcagcagataaacaagtgaacaaaggtctctggttttcctaggcagaggaccctgcggccttccgcagtgtttgtgtccctgggtacttgagattagggagtggtgatgactcttaaggagcatgctgccttcaagcatctgtttaacaaagcacatcttgcactgcccttaatccatttaaccctgagtggacacagcacatgtttcagagagcacagggttgggggtaaggtcatagatcaacagcatcctaaggcagaagaatttttcttagtacagaacaaaatgaagtctcccatgtctacttctttctacacagacacagcaacaatctgatttctctatcttttccccacctttcccccttttctattccacaaaaccgccatcgtcatcatggcctgttctcaatgagctgttgggtacacctcccagacggggtggcggctgggcagaggggctcctcacttcccagatggggcggccaggcggacgcgccccccacctccctcccggacgggatagctggccgggcgggggctgaccccccacctccctccccgacggggcggctggccgggcgggggctgacccccacgcctccctcccggacggggcggctgccaggcggaggggctcctcacttctcagacggggtggctgctgggcggagacgctcctcacttcccagacagggtggctgtcgggcggaggggctcctcacttctcagacggggcagctgcgggcggaggggctcctcacttctcagacggggtggccgggcagagaagctcctcacatcccagacgggggggcggggcagaggcgctccccacatctcagacgatgggcggccgggcagagacgctcctcacttcatcccagacggggtggcggccgggcagaagctgtaatctcggcaccctggggggccaaggcaggcggctgggaggcggaggccgtagccagctgagatcacaccactgcactccagcctgggcaacattgagcactgagtggacgagactctgcccgcaatcccggcacctcgggaggccgaggctggcagatcactcgcagtcaggagctggagaccagcccggccaacacagtgaaaccctgtctccaccaaaaaaatacgaaaaccagtcaggcgtggcggcgcccgcaatggcaggcacgcggcaggccgaggcgggagaatcaggcagggaggctgcagtgagccgagatggcagcagtacagtccagcttcggctcggcatcagagggagaccgtggggagagggagaagagagggagggggagagggctatttttaaaattttttaaaattgctgaacaggggtacctctgggcagtgtgtcagaataccactttttaaatattttatgatttatttatttttctatttcttgaggttttaactgatgtgtatctgtatgtctatttgtgtatattttgtcatgatcatgtaacagagtctgaaaagtgtcgaagagacagttttcaggaacaacaagcaattattcctactttccaagttattttgatgccatggtggctcatacctataatctgagtactttgggaggctgaggtggactgatcacttgagcccaggagtttgagaccagcctgggcaacatagcaagactccatctctacaaaaaaagacaaaatttagctgagcgtggtggcgtgttcctgtagtcccagctacttgggaggctgaagtgagtggatcccctgagcccagagaggtcaaggttgtgatgagctgtgatcacaccactgcacttcagcatgggagacagagtgagaccctgtttcagaaaaaataaataaataaaaccaccagcaccacaaacaacaacaaaaagttattttgtacttgttttgagcacaggactcctgagggtatctttgcatttaatattacataggggtgccagtgggaagtaatgtgtatgcttggcctcatgagctaaaaccctgtgttaattatgacagaaggaaagtgtgtgagagagatcttaactacctagcagctctagctgccatcttgaaccatgaagatacgggccacacgtaggggtagctgggtagtgagcagcaagaagccttgttggatgagggcacgaaggagcagaatcactggaatcactgtgtcagccctaattacctacctctggacttttatgtgaggggaaaaaaaattgacagtttatatttatctcaacctagttaacccaagtgatgcattgttatgagattaaaatgtttggaggccgggtgcggtggctcacgcctataatcccagccctttgggaggccaaggcgggcggatcacgaggtcaggagatcaagaccatcctggctaacatgtaaaaccccgtctctactaaaaatacaaaaaattagccaggcgttgtggcggtcgcctgtagtccctgctatttgggaggccgaggcaagagaacggcatgaacctgggaggtggagcttgcagcgagctgagatcttgccactgcactccagcctgggcgacagtgcgagactctgtctcaaaaataaataaataaataaataataaataaaatgtttggaatgttggcttcatccctgggatgcaaggctggttcaacatacgcaaatcaagaaacataattcatcacataaacagaactaaagacaaaaaccacatgattatctcaatagatacagaaaaggccttcaataaaattcaacgttgcttcatgttaaaaactctcaataaactaggtattgatggaaaatatctcaaaataataaccatttatgacaaacccacagccattatcatactgaatgggcaaaagctggaagcattccccttgaaaactggcacaagacagggatgccgtctcaccactcctatttaacatagtattggaagttctggccaagaaaatcaggcaagagaaacaaataaggggtattcaaataggaaaagaggaagtaaaactgtgtttgcagatgacatgatactatatctagaaaaccccattatctccacccaaaagttccttaagctgataagcaacttcagcaaagtctcaggatacaaaatcaatgtgcagaaatcacaagcattctatacaccaacaatacacaagcagagagccaaatcatgaatgaactcccattcacagttgctagaaagagaataaaatacctaggaatacagctaataagatgtgaaggatctcttcaaggagaactacaaaccactgctcaaggaaataagagaggacacaaatgaaaaaacattccattctcgtggataggaagaatcaatatcatgaaaatggccatactacccaaagtaatttataggttcattgctattcccattaaactactattgacattcttcacagaattagaaaaaaactactttaaaattcaaatggaaccaaaaaagagcccgtataaccaagacaacaataagcaaaaagaacaaagctggaagcatcacactacccaacttcaaagtatactgcaaggctacagtagccaaaatggcatggtactggtacaaaaacagacacatagaccaatggaacagaatagagaccagagaaagaagaccacacatctacagccatctgatcatcgacaaacctgacaaaaacaagcaatggggaaaagattccctatttaataaatggtgctgggaaaactggctagccatatgcagaaaattgaaactgaccccttccttacaccttatacaaaaattaactcaagattaaagacttaatgtaaaacctaaaactataaaaaccctagaagaaaatctatttaataccattcaagacataggcacaagcaaaggtttcatgacaaaaacatcaaaagcaattgcaacaaaagcaaaaattacaaatgggatctaattaaactaaagagctcctgcacagcaaaagaaactatcattagagtgaacaggcaacctacagaatgggagaacatttttgcaatctatccatctgacaaaggtctaatatccagaacctacaaggaacttaaaacaaatttacaaggaaaaaaacaaccccatcaaaaagtggacaaaggacatgaacagacacttctcaaaagaagacatttatgtggccaacaaacatataaaaaaaagctcaaccttactgatcattagagaaatgcaaaggagaaccacaatgagataccatctcatgccggtcagaatggtgattattaaaaagtcaaaaaacaacagatgctggcgaggctgtggagaagtaggaacacttttacattgttggtgggaatgtaaattagttcaaccgttgtggaagtgtgtgtggctattcctcaaagatctagaactagaaatactatttgtcccagcaatcccattactgggtatatacccaaaggaatataaaccattttattataaagatacatgcacatttttgttcattgcagcactcttcacaatagcaaagacacaatagcaaatgcccatcaaagatagactggataaagaaaatgtggtacatatacaccatggaatactgtgcagtgcagccattacagcttttggtgatacagtgaatcagatttttcattaattcttttaattggttattactgaacgtgaaaaagtaatgtttgtattgaaatcttgagtctggccatgtttctattttaaattcataaagaattctaacaagaggaattccaagaatgtcataaatggatgtttctccatggatgaaggaactgttttattcacttgctgataattcagcctaatccagtttgacatcatatagataagtagttgaattatggatttaaaatacatatcattttctaactccaaaggtaatacttatttaaatggttttgaaaatatagaaaggcacaatttctttttaaatctgttattctccaccaccactcaatctgtctatcatctatctctccattcattcttccatttgtttatatctgttaatctttgtatgtgttcatgtatagcttttacatgattggaatcataatgcatattccattttgaagtctgcttttttttacacaaaaatatgttgtgaatattttcctatattatgaaatatcattagctgagcttttagaattgactgcatgttttggtaccatttagatatagtttaagatacttagaagttatgtggctttgccactatggatgaatcttatttactcaatattaattacttacaaataacctcacctaaacactactcagccataaaaaggaatgaattaatgacattcacagcaacctggagactattactctaaaggaagtaactgaggaatggaaaaccaaacattgtatgttctcactcataagtgggagataagctatgaggatgcaaaggcataagaaggatacaatggactttggggacttaggggaaagggtgggaggggggtgaaggataaaagaatacaaattgggttcagtgtatactgctcaggtgatgggtgcaccagaatctcacaagtaaccacttaattacttacgcatgtaaccagataccacctgttccccaaacacctatggaaataattttgtttttttttttaaaaaaggaatgagatcatgtcctttgcagggacatggatgaagctggaagccattatcctcagcaaactaacagaggagcaggaaaccaaacaccacatgttctcacttgtaagcggaagctgaacaatgagaacacacggacacagggatgagatcaacacacactggggcctgatgcaggggccgtagcggggagagcatcaggataactagctaatgcatgtggggcttaatacctaggtgataggttgataggtgcagcaaaccaccatgggacacgtttacctatgtaacaaacccgcacatcctgcacttgtatccagaacttaaaatattttaaaaatctttagagaatacaaaaaaaaaaaaaaagattcttcaatgcatacacaataaaattgcagttcagtcaaacattggaagtctttctctgactgtctagttggtatcttcattttcagcttcttcaagatcccactccaaacactgttagctcagccaaattgaacagctcatatctcctacctctggatctttggttctggtgattgtatatttctggaccatctggaaccccagcatatcaccctaccccacatctccacatccccaaaatataaccatacttcaagggcagttcaaataccatctccttctatcctccatgaagtcagttatctcttccattggaattatcgccccctctcctgaacagtactatttcgtgtgaatctcctccaagccttcttttcattttatatctcatgctgtaattcttggaaagtatgctgtagctcaagtgcagaattctcatcagttttatctttatatctctcctaaacactttacctgatgaagagcctggcatacacataaatatatattgaatgaatcagtgatggattgaaaagagaaatgatggatctcctaaattttaacttttataaaatattttgatacattcatgaccttactttagcaagcaatgaacgtgatgtaaactattgttgatatagtttttatattggaagtgtaagtagtttgtggcatgggattgtgacatatcctaggtttcctcatcttctttttattgaaatgtaattcacaagccataaaatttgcccctttaaagtaaatgatgcagtggattttagtatatttacagagttgtgcaatcatcaccactatctaattccagaacatttccatctacctagaaactccataccagtgagctgccactctaatcctcctcttcccccagcctctagaaacaataatccattttctgtctctatgatttgcctgttctagatattttataaaaataaacatgtggcctttcgtgtctgacttccttcacttagcatgtttcaaggttcatctatgctatagagtgtaccagtgcttcattacattttatggctgaataataccctattgtgtggatataccgcatttagtttattcatcagttgatcgaaatttagactgtttccacttttttgctattatggatgatgctgctatgaatattcgtatatgaatttttatatggatatatgttttcagttcttctgggcatataccttagaagtgagagtgctcatcatatagtaactctatgtttagccttttgaggaactgccaaactgcttttcaaagtagtagcatcattttatattcccaccagcagtgtatgaggttttttttatttttttgtttttgagacggagtctcactctgtcgcccagggtggagtgcagtggcgttatcttgattcactgtaacctctgccttctgggttcaagccattctcctgcctcagcctccctagtagttgggagtagctgggtttacaggagctcgccaccatgcccaactaatttttgtattgttttttgagacggagtctcgctctgtggcccaggctggagtgcagtggtgcaatctcagctcactgcaagctccgcctcctgggttcatgccattctcctgcctcagcctcccaagtatctgggactacagccgccctccaccacgcccggctaattttttgtatttttagtagagacagggtttcaccgtgttagccaggatggtctctatctcctgacctcgtgatccgcctgccttggcctcccaaagtgctgggattacaggcgtgagccaccgcgcccagccaatttttgtatttttagtaaagacagggtttcaccatgttggccaggctggtctcgaactcctggcctcaggtgatctgactgccttggcttcccaaagtgctggcattacagacattagctactgtgcctggcctcaagtcctttctcattttaaaactgcgttattttattttatttttctgagatggaatctcactctgtcgcccaggttggagtgcagtggtgcaatctcggctcactgcaacctccacctcctgagttcaagcgactctcctgcctcggcctccctagtaactgggattacaggcacccaccatcacgcctggctaatttttgtatttttagtagagacagggtttcgccatgttggccaggctggtcttgaactcctgaactcaggtgatctgcctgcctcggcctcccaaaatgctaggattacaggcgtgagccaccacacccggtgggttgtctttttattgttgagttgtaagcattctttttaatattctggatactagtttcttatcaggtacaatctttgtgaatatattctcccattccatggattgtcttctcactttctggatactatacagtacaagttttaaattttgatgaagttcacttgatttctgttttttatgttattgcttatgcttttggtgtcatacctaaaaaaccattgtctaaatcaattgcctatgaggtgttacccctatgttttcttctaaagttttatgattttagctctttgacccattttgagttatttttgtgtatgcagtgcgagataagcatccagcctcattcttttgcacataaatgttcacttgtcttagcattacttattgaaaatactattttttccctatagaattattttatacttatcacaaatcaactaactataagggtttatttctggactcaattctgttgctctatcttatggtagtaccacactgtcttgattattgtaacttcgtagtaagttttggaatccagaaatgtagtcctctaactttgttgttgttgttgttcttcttttttcttttgtagagatgaggccttgctatgttgcccaggctggtctcaaactcctggcctcaaacaatcctcccacctccacctcccaaagtgctgaggggtgagccactgcaactggcctgttctttttcaaaattgttagggctgtattgggtttacctttccctaaattttcatataactgttaggattcacttgcaaatttatgtaaaaagggcctctggaattttgatagtgattacactgaatgagaggagtttggcaggactggtttcccaagaccacaagaccctgtaagaccctgctgataagacaggatgtggtagaaaggccaacccaaaccagccaaaaccatgatggtgacagaagagacctctggttacctttgctgcccattctatggtaattataatacattagcacgctaaaagaaacttctacagcaccatgatagtttacaactgccatagcaactttcagaagttaccctgtatggtctaaaaggtccagacctccccacttctttcctggaaaactcatgaataagccacctcttgtttagcgtatagtcaagaagcaaccataaatatagccagtcagcagcccatcagggctactcttcctatggggtagccattcttttattcctttactttcttaatgaacttgctttcactttattctgtcagcatgctcttgaattctttcctgaacccacttgacctcttgggctgagccttaaccttggggtacttttgcctataacaaacatacaaagataagtttggctgggcgcagtggctcatgcctgtaatcccaggactttgggaggctgaggatggtggatcgcttgagccaaggaatttgaggccaccttgggcaacacggcaaaaccctgtctctactaaaaatacaaaaattagctgggtatggtagcatgcgcctgtagtaccagctactcggaaggctgaggtgggaggatcacttgagcccgggaggtggaggtttcagtgagctgagattgtgccactgtactccagcctggggaacagagtgagaccctgtctcaaaataaaaataaatttgaggtgtattgccatcttaacggaagttgttactggtggacggtatccaagttactggtggtaaatctgcagcaacctcaattctttcctcctcagaagaaagaatttgactgaggggcataaggcagaaggagggaccgaggcaagtttcagagcaacagtgaaagtttattacgctttaggctgggcacagtggctcatgcctgtaatcccagcattttgggaggctgaggcaggtggattacttgaggtcagtagttcgagaccagcctggccatcatgatgatgaaacctcgtctctactaaaaatagaaaaatcagctgggcatggtggtccatgcctctaatcccagctactcgggaggctgaggcaggcgaatcagttgaacctgggaggcggaggttgcagtgagccaagaaagtttattaagctttagaacagtaaggaaaggaaagaaaagaaggaaagtataacttggaagagggccaagcaggtgacctgagaaaccaggtgcagggcttgccctcttgacttggggttttatatgctggcatacttccgggatcttgtgttacttttccccactcctgagatctttttgagaagctgatgatcagtctcaggtgttttctattgcggggggggggggcgggcgggggagctgcctgtccctggcaccacctgtgaccaattattactttacagaaacatttaacaaccgcctgaccatcacctgatggttgcccaacactcttggtgtgtgtcgggggagccctctcctgccttgctcagacctgaatgtacccattgtaacaaaccccttctttgtatactttgatatggtgacatttcttgtcacttgcctcattgtgaatttttatagatgtggctaagtcatatgcttccttctgaaaaattatgtcaaatactagcagtttctcactgttttttgccctagaaacaacaaactaaccttgaagtgaaaggcctttctgcgtttatcttaccttttttgagcagcattaaaactgttttactcagaccaa

SEQ ID NO: 114649 - DNA, 963 bp, Homo sapiens
  Payload ID: 2406
  Gene Symbol: CFLAR
  Gene Name: CASP8 and FADD-like apoptosis regulator
  ENST ID: ENST00000340870
  CDS Start-End: 1-963
atggcagagattggtgaggatttggataaatctgatgtgtcctcattaattttcctcatgaaggattacatgggccgaggcaagataagcaaggagaagagtttcttggaccttgtggttgagttggagaaactaaatctggttgccccagatcaactggatttattagaaaaatgcctaaagaacatccacagaatagacctgaagacaaaaatccagaagtacaagcagtctgttcaaggagcagggacaagttacaggaatgttctccaagcagcaatccaaaagagtctcaaggatccttcaaataacttcagggaagaaccagtgaagaaatccattcaggaatcagaagcttttttgcctcagagcatacctgaagagagatacaagatgaagagcaagcccctaggaatctgcctgataatcgattgcattggcaatgagacagagcttcttcgagacaccttcacttccctgggctatgaagtccagaaattcttgcatctcagtatgcatggtatatcccagattcttggccaatttgcctgtatgcccgagcaccgagactacgacagctttgtgtgtgtcctggtgagccgaggaggctcccagagtgtgtatggtgtggatcagactcactcagggctccccctgcatcacatcaggaggatgttcatgggagattcatgcccttatctagcagggaagccaaagatgttttttattcagaactatgtggtgtcagagggccagctggaggacagcagcctcttggaggtggatgggccagcgatgaagaatgtggaattcaaggctcagaagcgagggctgtgcacagttcaccgagaagctgacttcttctggagcctgtgtactgcggacatgtccctgctggagcagtctcacagctcaccatccctgtacctgcagtgcctctcccagaaactgagacaagaaagg

SEQ ID NO: 114650 - DNA, 1283 bp, Homo sapiens
  Payload ID: 2406
  Gene Symbol: CFLAR
  Gene Name: CASP8 and FADD-like apoptosis regulator
  Uniprot ID: O15519
  ENST ID: ENST00000341222
  CDS Start-End: 453-1118
caagccatagcaggaaacagcgagcttgcagcctcaccgacgagtctcaactaaaagggactcccggagctaggggtggggactcggcctcacacagtgagtgccggctattggacttttgtccagtgacagctgagacaacaaggaccacgggaggaggtgtaggagagaagcgccgcgaacagcgatcgcccagcaccaagtccgcttccaggctttcggtttctttgcctccatcttgggtgcgccttcccggcgtctaggggagcgaaggctgaggtggcagcggcaggagagtccggccgcgacaggacgaactcccccactggaaaggattctgaaagaaatgaagtcagccctcagaaatgaagttgactgcctgctggctttctgttgactggcccggagctgtactgcaagacccttgtgagcttccctagtctaagagtaggatgtctgctgaagtcatccatcaggttgaagaagcacttgatacagatgagaaggagatgctgctctttttgtgccgggatgttgctatagatgtggttccacctaatgtcagggaccttctggatattttacgggaaagaggtaagctgtctgtcggggacttggctgaactgctctacagagtgaggcgatttgacctgctcaaacgtatcttgaagatggacagaaaagctgtggagacccacctgctcaggaaccctcaccttgtttcggactatagagtgctgatggcagagattggtgaggatttggataaatctgatgtgtcctcattaattttcctcatgaaggattacatgggccgaggcaagataagcaaggagaagagtttcttggaccttgtggttgagttggagaaactaaatctggttgccccagatcaactggatttattagaaaaatgcctaaagaacatccacagaatagacctgaagacaaaaatccagaagtacaagcagtctgttcaaggagcagggacaagttacaggaatgttctccaagcagcaatccaaaagagtctcaaggatccttcaaataacttcaggatgataacaccctatgcccattgtcctgatctgaaaattcttggaaattgttccatgtgattaacatggaactgcctctacttaatcattctgaatgattaaatcgtttcattttctaaatgtgttataatgtgtttagccctttcttgttgctgtatgtttagatgctttccaatcttttgttactactaataatgctataaaataaatatccttgtacttctt

SEQ ID NO: 114651 - DNA, 1613 bp, Homo sapiens
  Payload ID: 2406
  Gene Symbol: CFLAR
  Gene Name: CASP8 and FADD-like apoptosis regulator
  Uniprot ID: O15519
  ENST ID: ENST00000342795
  CDS Start-End: 381-1259
ggggtggggactcggcctcacacagtgagtgccggctattggacttttgtccagtgacagctgagacaacaaggaccacgggaggaggtgtaggagagaagcgccgcgaacagcgatcgcccagcaccaagtccgcttccaggctttcggtttctttgcctccatcttgggtgcgccttcccggcgtctaggggagcgaaggctgaggtggcagcggcaggagagtccggccgcgacaggacgaactcccccactggaaaggattctgaaagaaatgaagtcagccctcagaaatgaagttgactgcctgctggctttctgttgactggcccggagctgtactgcaagacccttgtgagcttccctagtctaagagtaggatgtctgctgaagtcatccatcaggttgaagaagcacttgatacagatgagaaggagatgctgctctttttgtgccgggatgttgctatagatgtggttccacctaatgtcagggaccttctggatattttacgggaaagaggtaagctgtctgtcggggacttggctgaactgctctacagagtgaggcgatttgacctgctcaaacgtatcttgaagatggacagaaaagctgtggagacccacctgctcaggaaccctcaccttgtttcggactatagagtgctgatggcagagattggtgaggatttggataaatctgatgtgtcctcattaattttcctcatgaaggattacatgggccgaggcaagataagcaaggagaagagtttcttggaccttgtggttgagttggagaaactaaatctggttgccccagatcaactggatttattagaaaaatgcctaaagaacatccacagaatagacctgaagacaaaaatccagaagtacaagcagtctgttcaaggagcagggacaagttacaggaatgttctccaagcagcaatccaaaagagtctcaaggatccttcaaataacttcaggctccataatgggagaagtaaagaacaaagacttaaggaacagcttggcgctcaacaagaaccagtgaagaaatccattcaggaatcagaagcttttttgcctcagagcatacctgaagagagatacaagatgaagagcaagcccctaggaatctgcctgataatcgattgcattggcaatgagacaggttggagtgcaatggcgcaatctcagctcaccgcaatctccacctcccaggttcaagcgattctcctgcctcagcctcctgagtaactgggattacaggcatgtgccaccatgcccagctaattttgtatttttagtagagacaaggtttcaccatgtcggccaggctggtctcgatctcctgaccttgtgatctgcccacctcagcctcccaaagtgctacgattacaggcgtcagccatcatgcctggcttattctctccattttcaaggtgaggaagctgagcagtgaactacactcctaccttctctagtactgattgagctgggattcaaaagctggactccaaaacctatgcttttaactactttgcctcaatataatttccatgaaggtgagggagtttatctatctcctactatgggtctccagtacctgga

SEQ ID NO: 114652 - DNA, 2056 bp, Homo sapiens
  Payload ID: 2406
  Gene Symbol: CFLAR
  Gene Name: CASP8 and FADD-like apoptosis regulator
  Uniprot ID: O15519
  ENST ID: ENST00000341582
  CDS Start-End: 413-1750
cgagtctcaactaaaagggactcccggagctaggggtggggactcggcctcacacagtgagtgccggctattggacttttgtccagtgacagctgagacaacaaggaccacgggaggaggtgtaggagagaagcgccgcgaacagcgatcgcccagcaccaagtccgcttccaggctttcggtttctttgcctccatcttgggtgcgccttcccggcgtctaggggagcgaaggctgaggtggcagcggcaggagagtccggccgcgacaggacgaactcccccactggaaaggattctgaaagaaatgaagtcagccctcagaaatgaagttgactgcctgctggctttctgttgactggcccggagctgtactgcaagacccttgtgagcttccctagtctaagagtaggatgtctgctgaagtcatccatcaggttgaagaagcacttgatacagatgagaaggagatgctgctctttttgtgccgggatgttgctatagatgtggttccacctaatgtcagggaccttctggatattttacgggaaagaggtaagctgtctgtcggggacttggctgaactgctctacagagtgaggcgatttgacctgctcaaacgtatcttgaagatggacagaaaagctgtggagacccacctgctcaggaaccctcaccttgtttcggactatagagtgctgatggcagagattggtgaggatttggataaatctgatgtgtcctcattaattttcctcatgaaggattacatgggccgaggcaagataagcaaggagaagagtttcttggaccttgtggttgagttggagaaactaaatctggttgccccagatcaactggatttattagaaaaatgcctaaagaacatccacagaatagacctgaagacaaaaatccagaagtacaagcagtctgttcaaggagcagggacaagttacaggaatgttctccaagcagcaatccaaaagagtctcaaggatccttcaaataacttcaggagcatacctgaagagagatacaagatgaagagcaagcccctaggaatctgcctgataatcgattgcattggcaatgagacagagcttcttcgagacaccttcacttccctgggctatgaagtccagaaattcttgcatctcagtatgcatggtatatcccagattcttggccaatttgcctgtatgcccgagcaccgagactacgacagctttgtgtgtgtcctggtgagccgaggaggctcccagagtgtgtatggtgtggatcagactcactcagggctccccctgcatcacatcaggaggatgttcatgggagattcatgcccttatctagcagggaagccaaagatgttttttattcagaactatgtggtgtcagagggccagctggaggacagcagcctcttggaggtggatgggccagcgatgaagaatgtggaattcaaggctcagaagcgagggctgtgcacagttcaccgagaagctgacttcttctggagcctgtgtactgcggacatgtccctgctggagcagtctcacagctcaccatccctgtacctgcagtgcctctcccagaaactgagacaagaaagaaaacgcccactcctggatcttcacattgaactcaatggctacatgtatgattggaacagcagagtttctgccaaggagaaatattatgtctggctgcagcacactctgagaaagaaacttatcctctcctacacataagaaaccaaaaggctgggcgtagtggctcacacctgtaatcccagcactttgggaggccaaggagggcagatcacttcaggtcaggagttcgagaccagcctggccaacatggtaaacgctgtccctagtaaaaatacaaaaattagctgggtgtgggtgtgggtacctgtattcccagttacttgggaggctgaggtgggaggatcttttgaacccaggagttcagggtcatagcatgctgtgattgtgcctacgaatagccactgcataccaacctgggcaatatagcaagatcccatctcttta

SEQ ID NO: 114653 - DNA, 4415 bp, Homo sapiens
  Payload ID: 2406
  Gene Symbol: CFLAR
  Gene Name: CASP8 and FADD-like apoptosis regulator
  ENST ID: ENST00000395148
  CDS Start-End: 213-965
gggtgcgccttcccggcgtctaggggagcgaaggctgaggtggcagcggcaggagagtccggccgcgacaggacgaactcccccactggaaaggattctgaaagaaatgaagtcagccctcagaaatgaagttgactgcctgctggctttctgttgactggcccggagctgtactgcaagacccttgtgagcttccctagtctaagagtaggatgtctgctgaagtcatccatcaggttgaagaagcacttgatacagatgagaaggagatgctgctctttttgtgccgggatgttgctatagatgtggttccacctaatgtcagggaccttctggatattttacgggaaagaggtaagctgtctgtcggggacttggctgaactgctctacagagtgaggcgatttgacctgctcaaacgtatcttgaagatggacagaaaagctgtggagacccacctgctcaggaaccctcaccttgtttcggactatagagtgctgatggcagagattggtgaggatttggataaatctgatgtgtcctcattaattttcctcatgaaggattacatgggccgaggcaagataagcaaggagaagagtttcttggaccttgtggttgagttggagaaactaaatctggttgccccagatcaactggatttattagaaaaatgcctaaagaacatccacagaatagacctgaagacaaaaatccagaagtacaagcagtctggtggatggaatggaacctggatgaccaaagcctcctttagcttgtggctagaaatcgcgtccctttatattcttcatatcccagatctgccaactccattgccctgtatattcatgatctctgcaaaatgctgccaagcagttcttaacatttcagtcttcaagaaagaatctgggatctgcacaggctggcagagctatggacattcaggggttttgcatgtatgctgaaccctactgccttgctctggtatttggcctcacaaccactgtccaacttcgggtgatgtcacttgggtctcataccttccttgcatgtgtcccaagtttcacaaaacctccttatggaaaagagcacattcgatttcttccttgataaaagggaccagattcacattggccttctgctttacttgcattcctcattgtcttttagactcagcctcagcttgggctttgttagcaagttcactgccaccatagcatcacagcctaaagggcatggctgagactcattgatctatagagcactcttttaccccaacatactctaaatgactgatcaaagatcaaaaacagaagagcatttatactccattcttgttttttgagacctgcttgatttattccgattatttaacacacagggacgcaacagtgatcccaaagtgtgtaaagttaaagccttcaactgcagctgaggagagggcaggaatggggacggtggtgagtcaggaatgacaggcaggcagccatgaccagggcagcctcctccccagggccagggactggggagtggcctaaggagcaggacctaagggtagcccagagctggggaagggggcagagacctccccttggcctaggtctggagctcagaagtgccacatgcctgagggggcagcggcctgggaagggccagaggcagggtcaggagagcaccatttcctggggggctggggacagggaggtgccctataggagaagccaggaggggccgtctgcccctgaggtgggggctgggctggagcaggctgcagcaagaaagacctgaggcaggcacagggcctgagagcccagctgcctgggttcaggggggctcccagggcagcctggcccagggagcagtcctgactctgcaggggatgcccagcaaggggggctgcagacccctcagagcctcccctcctctctccctggaaaggagctggggaacccatagtgcaaatctgtggaccactcagttatggagggaggctgtgcctgaaggtggacactggggtgcactccctccaccatctcgccctgcaccgctgtcctcagtacagccacttctcgtaagagtgcaggccatggatgccaccgtcgatctgggctgacatggtctgcttctcaaacttgagctcccctgagtacatcatggaccgaaggacagacaggctgtgggccccgatatcctggcagccatgctggatgcccactatgaggtagggcacgaacttctgaatggaccctttgtcctggatggagcccaagacatcctgcgtgatcttcgccttatccccgtcgttgaagtattgtttctggctgctgctgctcttctccatggcatccagtgagcccatgccctggtacttcttgagctgcattccgtctgagaagaagcactcgccgggggcctccatggtggcggccagcagggagcccatcatcactgtggaggctcctagggccagggccttgaccacatgccccatggtctggatgccaccatcggctatgatgggcacaccaaagttctgggtatgcttggccaccttgtacacagcagtgccctggggctgactgcaggctatcacttcctggttgatgtagatggagccgcgcagtccatgcccctgcccagcccatccacaccagcgtcaatcaggttgttggcctgggctgctgtcaccacgttccccccaatcacctggaggtggggttacttttgtttgatgtaatgcaccatggcgatctgatacaccgagttcccttgggacgagtccaagcctatgacattgacgcctacctgggtgagcaggtccaggtggtatttgtcatcctcatgggtacccacagctgccccgcccagcagctgctcatgggaatccttggaggccacagggtagtctcggttcttcagcgcggtgcaggtgataatggccaccagctcatcgcgatcattgacgataggcagcttcctttcttactaagctgcaggatctcatttgcctctttcaacctcacactgctggagccaccactagcttgatccttggcatcatcacctcactgaggagggtggtgtggtccttctcagcaagaaagtcgatgtctcgggaggtgacgatgcccaccagcttgctgcccatggtacccgtctcagtgatggggatgccagagaagccatgacgcatcttggcctccaacacatcacccacagtgtgcaaggggctcagcaccacggggtgtgtgataaagcccggttcaaacttcttgaccttctgcacctcactggcctggaactctggggtgcagttgtggtgaatgaaaccagtacctcccatcagagccatcacgatggccaggtcggcctctgtcacagtgtccatgggggaggagatcagcggcgtcttcagagtgaccattgggtcagggctgaggtcaggtccacctcatcagctatgaagtctatgaatcctgggagaatcaagaagtcgttgtaggtgagtccctggtcactggcgaagagctgctgcacggtgtggggaaaagaaagagagatcagattgttactgtgtctgtgtagaaagaagtagacataggagactccattttgttctgtactaagaaaaattcttctgcctcgagatgctgttaatctgtaaccttacccccaaccctgtgctccctgaaacatgtgctatgtcaactcagggttaagtggattaagggctgtgcaagatgtgctttgttaaacagatgcttgaaggcagcgtgctcgttaagagtcatcaccactccctaatctcaagtacccagggacacaaacactgcggaaggccgcagggacctctgcctaggaaagccaggtattgtccaaggtttctccccatgtgatagtctgaaatatggcctcatgggaagggaaagacctgaccgtcccccagcccgacacccataaagggtctgtgctgaggaggattagtaaaagaggaaggaacgcctgtttgcagttgagagaagaggaaggcatctgtctcctgccagtccctgggcaatggaatgtctcggtgtaaaacctgattgtatgttccatctgctgagataggggaaaaccgccttagggctggaggtgggacatgcgggcagcactactgctctttaagtcattgagatgtttatgtgtatgcatatctgaagcacagcacttaattctttaccttgttcttgatgcagagacctttgttcacgtgtttatctgctgaccttctctccactattattctatgaccctgccacacccccctctccgagaaacacctaaaaatgatcaataaatactaagggaactaagaggccggcgggatcctccgtatgctgaacgccggtcccctgggcccccttttttctttctct

SEQ ID NO: 114654 - DNA, 435 bp, Homo sapiens
  Payload ID: 2406
  Gene Symbol: CFLAR
  Gene Name: CASP8 and FADD-like apoptosis regulator
  ENST ID: ENST00000433445
  CDS Start-End: 242-435
cctttcgaaagttgttgggaacgtggactttcccaacaattgtgtatgcgctcgatctcactcagtgggagccgccgccctggagggaatttcacaatagcctgaactcccccactggaaaggattctgaaagaaatgaagtcagccctcagaaatgaagttgactgcctgctggctttctgttgactggcccggagctgtactgcaagacccttgtgagcttccctagtctaagagtaggatgtctgctgaagtcatccatcaggttgaagaagcacttgatacagatgagaaggagatgctgctctttttgtgccgggatgttgctatagatgtggttccacctaatgtcagggaccttctggatattttacgggaaagaggtaagctgtctgtcggggacttggctgaactgctctacagagtgaggcgatt

SEQ ID NO: 114655 - DNA, 1310 bp, Homo sapiens
  Payload ID: 2406
  Gene Symbol: CFLAR
  Gene Name: CASP8 and FADD-like apoptosis regulator
  ENST ID: ENST00000439154
  CDS Start-End: 376-1107
aacatttcagccggtgggtggcggggattaggcgtgaagcggttcagcaggcagaggttctcggacgccctccggcgaagccacctgttgatgcttttgactttctgtccttgttcctcgtcccatctggagcatttccaattctggttttgcggagcagcaggtctgagcttgtccggcgagggtgggagttggtcccggcggagatccagtgggaagagccggcggctgcccgggcaactcccccactggaaaggattctgaaagaaatgaagtcagccctcagaaatgaagttgactgcctgctggctttctgttgactggcccggagctgtactgcaagacccttgtgagcttccctagtctaagagtaggatgtctgctgaagtcatccatcaggttgaagaagcacttgatacagatgagaaggagatgctgctctttttgtgccgggatgttgctatagatgtggttccacctaatgtcagggaccttctggatattttacgggaaagaggtaagctgtctgtcggggacttggctgaactgctctacagagtgaggcgatttgacctgctcaaacgtatcttgaagatggacagaaaagctgtggagacccacctgctcaggaaccctcaccttgtttcggactatagagtgctgatggcagagattggtgaggatttggataaatctgatgtgtcctcattaattttcctcatgaaggattacatgggccgaggcaagataagcaaggagaagagtttcttggaccttgtggttgagttggagaaactaaatctggttgccccagatcaactggatttattagaaaaatgcctaaagaacatccacagaatagacctgaagacaaaaatccagaagtacaagcagtctgttcaaggagcagggacaagttacaggaatgttctccaagcagcaatccaaaagagtctcaaggatccttcaaataacttcagggctggagtgcaatggcgcgatcttggctcaccgcaacctccgcctcccgggttcaagcgattctcccacctcagcctcccaagtagctgggattacaggaatgtgccaccacgcccggctccataatgggagaagtaaagaacaaagacttaaggaacagcttggcgctcaacaagaaccagtgaagaaatccattcaggaatcagaagcttttttgcctcagagcatacctgaagagagatacaagatgaagagcaagcccctaggaatctgcctgataatcgattgcattggcaatgagacagagcttcttcgagacaccttcactt

SEQ ID NO: 114656 - DNA, 2128 bp, Homo sapiens
  Payload ID: 2406
  Gene Symbol: CFLAR
  Gene Name: CASP8 and FADD-like apoptosis regulator
  Uniprot ID: O15519
  ENST ID: ENST00000423241
  CDS Start-End: 549-1991
cactcagtcctggtggggtcgcacgtaacggtcctgagctatgcataagccgtttgaccacgcatggagaattttaccacccagagacacgcgagtggccctgtgcaagtttcaactgcgcggggggcggggaattccgcagacaggattctagaatttatgtcttgtgtggtaacatttcagccggtgggtggcggggattaggcgtgaagcggttcagcaggcagaggttctcggacgccctccggcgaagccacctgttgatgcttttgactttctgtccttgttcctcgtcccatctggagcatttccaattctggttttgcggagcagcaggtctgagcttgtccggcgagggtgggagttggtcccggcggagatccagtgggaagagccggcggctgcccgggcaactcccccactggaaaggattctgaaagaaatgaagtcagccctcagaaatgaagttgactgcctgctggctttctgttgactggcccggagctgtactgcaagacccttgtgagcttccctagtctaagagtaggatgtctgctgaagtcatccatcaggttgaagaagcacttgatacagatgagaaggagatgctgctctttttgtgccgggatgttgctatagatgtggttccacctaatgtcagggaccttctggatattttacgggaaagaggtaagctgtctgtcggggacttggctgaactgctctacagagtgaggcgatttgacctgctcaaacgtatcttgaagatggacagaaaagctgtggagacccacctgctcaggaaccctcaccttgtttcggactatagagtgctgatggcagagattggtgaggatttggataaatctgatgtgtcctcattaattttcctcatgaaggattacatgggccgaggcaagataagcaaggagaagagtttcttggaccttgtggttgagttggagaaactaaatctggttgccccagatcaactggatttattagaaaaatgcctaaagaacatccacagaatagacctgaagacaaaaatccagaagtacaagcagtctgttcaaggagcagggacaagttacaggaatgttctccaagcagcaatccaaaagagtctcaaggatccttcaaataacttcaggctccataatgggagaagtaaagaacaaagacttaaggaacagcttggcgctcaacaagaaccagtgaagaaatccattcaggaatcagaagcttttttgcctcagagcatacctgaagagagatacaagatgaagagcaagcccctaggaatctgcctgataatcgattgcattggcaatgagacagagcttcttcgagacaccttcacttccctgggctatgaagtccagaaattcttgcatctcagtatgcatggtatatcccagattcttggccaatttgcctgtatgcccgagcaccgagactacgacagctttgtgtgtgtcctggtgagccgaggaggctcccagagtgtgtatggtgtggatcagactcactcagggctccccctgcatcacatcaggaggatgttcatgggagattcatgcccttatctagcagggaagccaaagatgttttttattcagaactatgtggtgtcagagggccagctggaggacagcagcctcttggaggtggatgggccagcgatgaagaatgtggaattcaaggctcagaagcgagggctgtgcacagttcaccgagaagctgacttcttctggagcctgtgtactgcggacatgtccctgctggagcagtctcacagctcaccatccctgtacctgcagtgcctctcccagaaactgagacaagaaagaaaacgcccactcctggatcttcacattgaactcaatggctacatgtatgattggaacagcagagtttctgccaaggagaaatattatgtctggctgcagcacactctgagaaagaaacttatcctctcctacacataagaaaccaaaaggctgggcgtagtggctcacacctgtaatcccagcactttgggaggccaaggagggcagatcacttcaggtcaggagttcgagaccagcctggccaacatggtaaacgctgtccctagtaaaaatac

SEQ ID NO: 114657 - DNA, 1198 bp, Homo sapiens
  Payload ID: 2406
  Gene Symbol: CFLAR
  Gene Name: CASP8 and FADD-like apoptosis regulator
  Uniprot ID: O15519
  ENST ID: ENST00000440180
  CDS Start-End: 364-1029
tttcatttcctttacaatgtaggttttcttctctgtctttttggattagtctgtttttggttctgtctaccaaggatccctttctttagacttctatagatccctttctatagaacttaatctacttaagtcagggagaccacccagaaggaaagagcccatactttcaatcttaggcataagttagcttgataagattttcagaaaaattcccttttaaccacagaactcccccactggaaaggattctgaaagaaatgaagtcagccctcagaaatgaagttgactgcctgctggctttctgttgactggcccggagctgtactgcaagacccttgtgagcttccctagtctaagagtaggatgtctgctgaagtcatccatcaggttgaagaagcacttgatacagatgagaaggagatgctgctctttttgtgccgggatgttgctatagatgtggttccacctaatgtcagggaccttctggatattttacgggaaagaggtaagctgtctgtcggggacttggctgaactgctctacagagtgaggcgatttgacctgctcaaacgtatcttgaagatggacagaaaagctgtggagacccacctgctcaggaaccctcaccttgtttcggactatagagtgctgatggcagagattggtgaggatttggataaatctgatgtgtcctcattaattttcctcatgaaggattacatgggccgaggcaagataagcaaggagaagagtttcttggaccttgtggttgagttggagaaactaaatctggttgccccagatcaactggatttattagaaaaatgcctaaagaacatccacagaatagacctgaagacaaaaatccagaagtacaagcagtctgttcaaggagcagggacaagttacaggaatgttctccaagcagcaatccaaaagagtctcaaggatccttcaaataacttcaggatgataacaccctatgcccattgtcctgatctgaaaattcttggaaattgttccatgtgattaacatggaactgcctctacttaatcattctgaatgattaaatcgtttcattttctaaatgtgttataatgtgtttagccctttcttgttgctgtatgtttagatgctttccaatcttttgttactactaataatgctataaaataaatatccttgtacttctttgtg

SEQ ID NO: 114658 - DNA, 596 bp, Homo sapiens
  Payload ID: 2406
  Gene Symbol: CFLAR
  Gene Name: CASP8 and FADD-like apoptosis regulator
  ENST ID: ENST00000425030
  CDS Start-End: 409-596
caatgatgaccagtctgttcaagacccaagagggctgagattggcagccctggccattgtttaccacagcctaatgaagatgagtaaaagcctatctatccccaaggacctccacatatgacagtactcaactgagtctcacataggatagaataagataaaatgctggaagagaacacaaatagtgctacaaagcaggaagagagacttgatttggggatcaagacaagcttatagaagagacatcttgagagagaagatataatttcagaactcccccactggaaaggattctgaaagaaatgaagtcagccctcagaaatgaagttgactgcctgctggctttctgttgactggcccggagctgtactgcaagacccttgtgagcttccctagtctaagagtaggatgtctgctgaagtcatccatcaggttgaagaagcacttgatacagatgagaaggagatgctgctctttttgtgccgggatgttgctatagatgtggttccacctaatgtcagggaccttctggatattttacgggaaagaggtaagctgtctgtcggggacttggctgaactgctctacagagtgag

SEQ ID NO: 114659 - DNA, 1868 bp, Homo sapiens
  Payload ID: 2406
  Gene Symbol: CFLAR
  Gene Name: CASP8 and FADD-like apoptosis regulator
  Uniprot ID: O15519
  ENST ID: ENST00000457277
  CDS Start-End: 1-1389
atgtctgctgaagtcatccatcaggttgaagaagcacttgatacagatgagaaggagatgctgctctttttgtgccgggatgttgctatagatgtggttccacctaatgtcagggaccttctggatattttacgggaaagaggtaagctgtctgtcggggacttggctgaactgctctacagagtgaggcgatttgacctgctcaaacgtatcttgaagatggacagaaaagctgtggagacccacctgctcaggaaccctcaccttgtttcggactatagagtgctgatggcagagattggtgaggatttggataaatctgatgtgtcctcattaattttcctcatgaaggattacatgggccgaggcaagataagcaaggagaagagtttcttggaccttgtggttgagttggagaaactaaatctggttgccccagatcaactggatttattagaaaaatgcctaaagaacatccacagaatagacctgaagacaaaaatccagaagtacaagcagtctgttcaaggagcagggacaagttacaggaatgttctccaagcagcaatccaaaagagtctcaaggatccttcaaataacttcaggctccataatgggagaagtaaagaacaaagacttaaggaacagcttggcgctcaacaagaaccagtgaagaaatccattcaggaatcagaagcttttttgcctcagagcatacctgaagagagatacaagatgaagagcaagcccctaggaatctgcctgataatcgattgcattggcaatgagacagagcttcttcgagacaccttcacttccctgggctatgaagtccagaaattcttgcatctcagtatgcatggtatatcccagattcttggccaatttgcctgtatgcccgagcaccgagactacgacagctttgtgtgtgtcctggtgagccgaggaggctcccagagtgtgtatggtgtggatcagactcactcagggctccccctgcatcacatcaggaggatgttcatgggagattcatgcccttatctagcagggaagccaaagatgttttttattcagaactatgtggtgtcagagggccagctggaggacagcagcctcttggaggtggatgggccagcgatgaagaatgtggaattcaaggctcagaagcgagggctgtgcacagttcaccgagaagctgacttcttctggagcctgtgtactgcggacatgtccctgctggagcagtctcacagctcaccatccctgtacctgcagtgcctctcccagaaactgagacaagaaagggggacaattcccggaagtggaattacagagtcaaaggacatgcatttttcaagcctcggatgcatcttactagatgtcctataggatggtcatatcagctttataggagagtagctgtgtccctgaattctccctgacactgcatgctcttatatttcctcaagttttgacaatttgataggtgaaaagtggtatctgactgttcagatctggaaggctttgttatataaacatttttttaatgtttattggcaagaatacttttctaagagaaacatcagtgagctggtttccatttaagctgaatgaagccacaatgtacctcaagtataagattaactggcctttttcagttgcactctaattacaatttagaatgatgtttctgagccacctgtcaaatgcattctgggctgtacctctgcgtaccccaggaataaatctcatggccttctttacctggcctccttagtggtggcccagcaggaagcgggggttagagcaggagccactcagccttccaagatagatactccatgggccggtggtattactggcctttt

SEQ ID NO: 114660 - DNA, 655 bp, Homo sapiens
  Payload ID: 2406
  Gene Symbol: CFLAR
  Gene Name: CASP8 and FADD-like apoptosis regulator
  ENST ID: ENST00000441224
  CDS Start-End: 269-655
cacagcggtacaagctgcaccccgatggacctgagagaccggaagtaacccttggccaactctggccgccccctgcagccgcagccccagaggcccacccgcgagcttcagtggcgggccctcagcgtcgtaactcccccactggaaaggattctgaaagaaatgaagtcagccctcagaaatgaagttgactgcctgctggctttctgttgactggcccggagctgtactgcaagacccttgtgagcttccctagtctaagagtaggatgtctgctgaagtcatccatcaggttgaagaagcacttgatacagatgagaaggagatgctgctctttttgtgccgggatgttgctatagatgtggttccacctaatgtcagggaccttctggatattttacgggaaagaggtaagctgtctgtcggggacttggctgaactgctctacagagtgaggcgatttgacctgctcaaacgtatcttgaagatggacagaaaagctgtggagacccacctgctcaggaaccctcaccttgtttcggactatagagtgctgatggcagagattggtgaggatttggataaatctgatgtgtcctcattaattttcctcatgaaggattacatgggccgaggcaagataagcaaggagaag

SEQ ID NO: 114661 - DNA, 684 bp, Homo sapiens
  Payload ID: 2406
  Gene Symbol: CFLAR
  Gene Name: CASP8 and FADD-like apoptosis regulator
  ENST ID: ENST00000417748
  CDS Start-End: 330-684
agtcaggctgtctgtcgttgggcttttcccacttccttctactacgtacttcttccctattcctcctactgaggccattaaacccttagttgtaattttccctgaacatgctttacattctgatgaattctgaaaaagaatgtggggtttccttgcagatgagttcatctgttgtttcatttcctttacaataactcccccactggaaaggattctgaaagaaatgaagtcagccctcagaaatgaagttgactgcctgctggctttctgttgactggcccggagctgtactgcaagacccttgtgagcttccctagtctaagagtaggatgtctgctgaagtcatccatcaggttgaagaagcacttgatacagatgagaaggagatgctgctctttttgtgccgggatgttgctatagatgtggttccacctaatgtcagggaccttctggatattttacgggaaagaggtaagctgtctgtcggggacttggctgaactgctctacagagtgaggcgatttgacctgctcaaacgtatcttgaagatggacagaaaagctgtggagacccacctgctcaggaaccctcaccttgtttcggactatagagtgctgatggcagagattggtgaggatttggataaatctgatgtgtcctcattaattttcctcatgaaggatt

SEQ ID NO: 114662 - DNA, 1679 bp, Homo sapiens
  Payload ID: 2406
  Gene Symbol: CFLAR
  Gene Name: CASP8 and FADD-like apoptosis regulator
  Uniprot ID: O15519
  ENST ID: ENST00000443227
  CDS Start-End: 336-1490
atactcagtcacacaagccatagcaggaaacagcgagcttgcagcctcaccgacgagtctcaactaaaagggactcccggagctaggggtggggactcggcctcacacagtgagtgccggctattggacttttgtccagtgacagctgagacaacaaggaccacgggaggaggtgtaggagagaagcgccgcgaacagcgatcgcccagcaccaagtccgcttccaggctttcggtttctttgcctccatcttgggtgcgccttcccggcgtctaggggagcgaaggctgaggtggcagcggcaggagagtccggccgcgacaggacgagtgctgatggcagagattggtgaggatttggataaatctgatgtgtcctcattaattttcctcatgaaggattacatgggccgaggcaagataagcaaggagaagagtttcttggaccttgtggttgagttggagaaactaaatctggttgccccagatcaactggatttattagaaaaatgcctaaagaacatccacagaatagacctgaagacaaaaatccagaagtacaagcagtctgttcaaggagcagggacaagttacaggaatgttctccaagcagcaatccaaaagagtctcaaggatccttcaaataacttcaggctccataatgggagaagtaaagaacaaagacttaaggaacagcttggcgctcaacaagaaccagtgaagaaatccattcaggaatcagaagcttttttgcctcagagcatacctgaagagagatacaagatgaagagcaagcccctaggaatctgcctgataatcgattgcattggcaatgagacagagcttcttcgagacaccttcacttccctgggctatgaagtccagaaattcttgcatctcagtatgcatggtatatcccagattcttggccaatttgcctgtatgcccgagcaccgagactacgacagctttgtgtgtgtcctggtgagccgaggaggctcccagagtgtgtatggtgtggatcagactcactcagggctccccctgcatcacatcaggaggatgttcatgggagattcatgcccttatctagcagggaagccaaagatgttttttattcagaactatgtggtgtcagagggccagctggaggacagcagcctcttggaggtggatgggccagcgatgaagaatgtggaattcaaggctcagaagcgagggctgtgcacagttcaccgagaagctgacttcttctggagcctgtgtactgcggacatgtccctgctggagcagtctcacagctcaccatccctgtacctgcagtgcctctcccagaaactgagacaagaaagaaaacgcccactcctggatcttcacattgaactcaatggctacatgtatgattggaacagcagagtttctgccaaggagaaatattatgtctggctgcagcacactctgagaaagaaacttatcctctcctacacataagaaaccaaaaggctgggcgtagtggctcacacctgtaatcccagcactttgggaggccaaggagggcagatcacttcaggtcaggagttcgagaccagcctggccaacatggtaaacgctgtccctagtaaaaatacaaaaattagctgggtgtgggtgtgggtacctgtattcccagttacttgggag

SEQ ID NO: 114663 - DNA, 693 bp, Homo sapiens
  Payload ID: 2406
  Gene Symbol: CFLAR
  Gene Name: CASP8 and FADD-like apoptosis regulator
  ENST ID: ENST00000494258
  CDS Start-End: 80-433
tcagaaactgttagttggcaaaggatgtaccatctcctattaaacgggcaaggacaagttcccttttctgagagtgctgatggcagagattggtgaggatttggataaatctgatgtgtcctcattaattttcctcatgaaggattacatgggccgaggcaagataagcaaggagaagagtttcttggaccttgtggttgagttggagaaactaaatctggttgccccagatcaactggatttattagaaaaatgcctaaagaacatccacagaatagacctgaagacaaaaatccagaagtacaagcagtctgttcaaggagcagggacaagttacaggaatgttctccaagcagcaatccaaaagagtctcaaggatccttcaaataacttcagggtgagtctggagaaaacatatggaatcccagcatgaaaccgtttcagagttctaataaaaatatgcatattctcacagcatgtactttatttaatatctgaaaaaattgtgatagaaatgtgtatttgttttaaaaacgtgtaacttcttatatttcaaagctaatacatgttcattgagatatttggagactatagagaaagataaaagaaaataaatcacctatattccactatccaaagacaaccactgttagtattttggtatatttccttctagactcttttttatgtggg

SEQ ID NO: 114664 - DNA, 588 bp, Homo sapiens
  Payload ID: 2406
  Gene Symbol: CFLAR
  Gene Name: CASP8 and FADD-like apoptosis regulator
  ENST ID: ENST00000462763
  CDS Start-End: 84-588
taggggaggcgtgggcacttggagttgtcttaggactgatgtctgaattaactaaatgaacttgtctggtttgcagagtgctgatggcagagattggtgaggatttggataaatctgatgtgtcctcattaattttcctcatgaaggattacatgggccgaggcaagataagcaaggagaagagtttcttggaccttgtggttgagttggagaaactaaatctggttgccccagatcaactggatttattagaaaaatgcctaaagaacatccacagaatagacctgaagacaaaaatccagaagtacaagcagtctgttcaaggagcagggacaagttacaggaatgttctccaagcagcaatccaaaagagtctcaaggatccttcaaataacttcaggctccataatgggagaagtaaagaacaaagacttaaggaacagcttggcgctcaacaagaaccagtgaagaaatccattcaggaatcagaagcttttttgcctcagagcatacctgaagagagatacaagatgaagagcaagcccctaggaatctgcctgataatcgattgcattggcaatgagacag

SEQ ID NO: 114665 - DNA, 516 bp, Homo sapiens
  Payload ID: 2406
  Gene Symbol: CFLAR
  Gene Name: CASP8 and FADD-like apoptosis regulator
  ENST ID: ENST00000470178
  CDS Start-End: 165-516
gggtgatctaggcttgctgttttatgagggagggacatatttacacaggggcaagaactagtcttttaatccattgttgcataggggaggcgtgggcacttggagttgtcttaggactgatgtctgaattaactaaatgaacttgtctggtttgcagagtgctgatggcagagattggtgaggatttggataaatctgatgtgtcctcattaattttcctcatgaaggattacatgggccgaggcaagataagcaaggagaagagtttcttggaccttgtggttgagttggagaaactaaatctggttgccccagatcaactggatttattagaaaaatgcctaaagaacatccacagaatagacctgaagacaaaaatccagaagtacaagcagtctgttcaaggagcagggacaagttacaggaatgttctccaagcagcaatccaaaagagtctcaaggatccttcaaataacttcaggatgataacaccctatgcccattgtcctgatctga

SEQ ID NO: 114666 - DNA, 1230 bp, Homo sapiens
  Payload ID: 2406
  Gene Symbol: CFLAR
  Gene Name: CASP8 and FADD-like apoptosis regulator
  Uniprot ID: O15519
  ENST ID: ENST00000479953
  CDS Start-End: 53-1153
aggactgatgtctgaattaactaaatgaacttgtctggtttgcagagtgctgatggcagagattggtgaggatttggataaatctgatgtgtcctcattaattttcctcatgaaggattacatgggccgaggcaagataagcaaggagaagagtttcttggaccttgtggttgagttggagaaactaaatctggttgccccagatcaactggatttattagaaaaatgcctaaagaacatccacagaatagacctgaagacaaaaatccagaagtacaagcagtctgttcaaggagcagggacaagttacaggaatgttctccaagcagcaatccaaaagagtctcaaggatccttcaaataacttcaggctccataatgggagaagtaaagaacaaagacttaaggaacagcttggcgctcaacaagaaccagtgaagaaatccattcaggaatcagaagcttttttgcctcagagcatacctgaagagagatacaagatgaagagcaagcccctaggaatctgcctgataatcgattgcattggcaatgagacagagcttcttcgagacaccttcacttccctgggctatgaagtccagaaattcttgcatctcagtatgcatggtatatcccagattcttggccaatttgcctgtatgcccgagcaccgagactacgacagctttgtgtgtgtcctggtgagccgaggaggctcccagagtgtgtatggtgtggatcagactcactcagggctccccctgcatcacatcaggaggatgttcatgggagattcatgcccttatctagcagggaagccaaagatgttttttattcagaactatgtggtgtcagagggccagctggaggacagcagcctcttggaggtggatgggccagcgatgaagaatgtggaattcaaggctcagaagcgagggctgtgcacagttcaccgagaagctgacttcttctggagcctgtgtactgcggacatgtccctgctggagcagtctcacagctcaccatccctgtacctgcagtgcctctcccagaaactgagacaagaaagggggacaattcccggaagtggaattacagagtcaaaggacatgcatttttcaagcctcggatgcatcttactagatgtcctataggatggtcatatcagctttataggagagtagctgtgtccctgaattctccctgacactgcatgctcttatatttcctc

SEQ ID NO: 114667 - DNA, 423 bp, Homo sapiens
  Payload ID: 2407
  Gene Symbol: CASP1
  Gene Name: caspase 1, apoptosis-related cysteine peptidase
  Uniprot ID: P29466
  ENST ID: ENST00000353247
  CDS Start-End: 45-311
atactttcagtttcagtcacacaagaagggaggagagaaaagccatggccgacaaggtcctgaaggagaagagaaagctgtttatccgttccatgggtgaagataatgtttcttggagacatcccacaatgggctctgtttttattggaagactcattgaacatatgcaagaatatgcctgttcctgtgatgtggaggaaattttccgcaaggttcgattttcatttgagcagccagatggtagagcgcagatgcccaccactgaaagagtgactttgacaagatgtttctacctcttcccaggacattaaaataaggaaactgtatgaatgtctgtgggcaggaagtgaagagatccttctgtaaaggtttttggaattatgtctgctgaataataaacttttttgaaataataaatctggt

SEQ ID NO: 114668 - DNA, 948 bp, Homo sapiens
  Payload ID: 2407
  Gene Symbol: CASP1
  Gene Name: caspase 1, apoptosis-related cysteine peptidase
  Uniprot ID: P29466
  ENST ID: ENST00000446369
  CDS Start-End: 45-836
atactttcagtttcagtcacacaagaagggaggagagaaaagccatggccgacaaggtcctgaaggagaagagaaagctgtttatccgttccatgggtgaagctcctcaggcagtgcaggacaacccagctatgcccacatcctcaggctcagaagggaatgtcaagctttgctccctagaagaagctcaaaggatatggaaacaaaagtcggcagagatttatccaataatggacaagtcaagccgcacacgtcttgctctcattatctgcaatgaagaatttgacagtattcctagaagaactggagctgaggttgacatcacaggcatgacaatgctgctacaaaatctggggtacagcgtagatgtgaaaaaaaatctcactgcttcggacatgactacagagctggaggcatttgcacaccgcccagagcacaagacctctgacagcacgttcctggtgttcatgtctcatggtattcgggaaggcatttgtgggaagaaacactctgagcaagtcccagatatactacaactcaatgcaatctttaacatgttgaataccaagaactgcccaagtttgaaggacaaaccgaaggtgatcatcatccaggcctgccgtggtgataatgtttcttggagacatcccacaatgggctctgtttttattggaagactcattgaacatatgcaagaatatgcctgttcctgtgatgtggaggaaattttccgcaaggttcgattttcatttgagcagccagatggtagagcgcagatgcccaccactgaaagagtgactttgacaagatgtttctacctcttcccaggacattaaaataaggaaactgtatgaatgtctgtgggcaggaagtgaagagatccttctgtaaaggtttttggaattatgtctgctgaataataaacttttttgaaataataaatctggt

SEQ ID NO: 114669 - DNA, 1477 bp, Homo sapiens
  Payload ID: 2407
  Gene Symbol: CASP1
  Gene Name: caspase 1, apoptosis-related cysteine peptidase
  Uniprot ID: P29466
  ENST ID: ENST00000436863
  CDS Start-End: 138-1352
ctttaatgggaagaaaaataaagacatgcatatgcatgcacagtgagtatttcccaatacatgtacaggccctgccaaaaaggaaggcgaagcatactttcagtttcagtcacacaagaagggaggagagaaaagccatggccgacaaggtcctgaaggagaagagaaagctgtttatccgttccatgggtgaaggtacaataaatggcttactggatgaattattacagacaagggtgctgaacaaggaagagatggagaaagtaaaacgtgaaaatgctacagttatggataagacccgagctttgattgactccgttattccgaaaggggcacaggcatgccaaatttgcatcacatacatttgtgaagaagacagttacctggcagggacgctgggactctcagcagatcaaacatctggaaattaccttaatatgcaagactctcaaggagtactttcttcctttccagctcctcaggcagtgcaggacaacccagctatgcccacatcctcaggctcagaagggaatgtcaagctttgctccctagaagaagctcaaaggatatggaaacaaaagtcggcagagatttatccaataatggacaagtcaagccgcacacgtcttgctctcattatctgcaatgaagaatttgacagtattcctagaagaactggagctgaggttgacatcacaggcatgacaatgctgctacaaaatctggggtacagcgtagatgtgaaaaaaaatctcactgcttcggacatgactacagagctggaggcatttgcacaccgcccagagcacaagacctctgacagcacgttcctggtgttcatgtctcatggtattcgggaaggcatttgtgggaagaaacactctgagcaagtcccagatatactacaactcaatgcaatctttaacatgttgaataccaagaactgcccaagtttgaaggacaaaccgaaggtgatcatcatccaggcctgccgtggtgacagccctggtgtggtgtggtttaaagattcagtaggagtttctggaaacctatctttaccaactacagaagagtttgaggatgatgctattaagaaagcccacatagagaaggattttatcgctttctgctcttccacaccagataatgtttcttggagacatcccacaatgggctctgtttttattggaagactcattgaacatatgcaagaatatgcctgttcctgtgatgtggaggaaattttccgcaaggttcgattttcatttgagcagccagatggtagagcgcagatgcccaccactgaaagagtgactttgacaagatgtttctacctcttcccaggacattaaaataaggaaactgtatgaatgtctgtgggcaggaagtgaagagatccttctgtaaaggtttttggaattatgtctgctgaataataaacttttttgaaataataaatctggtagaaaaatgaaaa

SEQ ID NO: 114670 - DNA, 1392 bp, Homo sapiens
  Payload ID: 2407
  Gene Symbol: CASP1
  Gene Name: caspase 1, apoptosis-related cysteine peptidase
  ENST ID: ENST00000529871
  CDS Start-End: 35-367
tttcagtcacacaagaagggaggagagaaaagccatggccgacaaggtcctgaaggagaagagaaagctgtttatccgttccatgggtgaaggtacaataaatggcttactggatgaattattacagacaagggtgctgaacaaggaagagatggagaaagtaaaacgtgaaaatgctacagttatggataagacccgagctttgattgactccgttattccgaaaggggcacaggcatgccaaatttgcatcacatacatttgtgaagaagacagttacctggcagggacgctgggactctcagcagatttatccaataatggacaagtcaagccgcacacgtcttgctctcattatctgcaatgaagaatttgacagtattcctagaagaactggagctgaggttgacatcacaggcatgacaatgctgctacaaaatctggggtacagcgtagatgtgaaaaaaaatctcactgcttcggacatgactacagagctggaggcatttgcacaccgcccagagcacaagacctctgacagcacgttcctggtgttcatgtctcatggtattcgggaaggcatttgtgggaagaaacactctgagcaagtcccagatatactacaactcaatgcaatctttaacatgttgaataccaagaactgcccaagtttgaaggacaaaccgaaggtgatcatcatccaggcctgccgtggtgacagccctggtgtggtgtggtttaaagattcagtaggagtttctggaaacctatctttaccaactacagaagagtttgaggatgatgctattaagaaagcccacatagagaaggattttatcgctttctgctcttccacaccagataatgtttcttggagacatcccacaatgggctctgtttttattggaagactcattgaacatatgcaagaatatgcctgttcctgtgatgtggaggaaattttccgcaaggtaagatgctagtggatgctattttcactctacttccctgaatgcttggctattgcaattggaagcatagaaagcagatccagacaagtttatcttccaataatgctcttctttccaaaagagttttggagttctttggagagtggacaaacccaggagcctaatccaatctattaagacccacagccttgagaaaacaatcatttagtttcaccccgctcctgccctgcagagacaaatgaatggactctaatttacctgtgtctctcatggctattagatccagcagcagatttaaaatgccctgaggagggtcattcaatgcttacatacatatatggttatacttgttgcagatggaagtactttttgtttttgtcacttattttgctatatttgttgtagttttttggcataactc

SEQ ID NO: 114671 - DNA, 1521 bp, Homo sapiens
  Payload ID: 2407
  Gene Symbol: CASP1
  Gene Name: caspase 1, apoptosis-related cysteine peptidase
  ENST ID: ENST00000527979
  CDS Start-End: 293-1396
ggaggagagaaaagccatggccgggactgatgtggaaatggtaaactcagtcttcaggtcactccatgcacatgtatggagactattgagggaaacaagtaggacagcaatacagtaagaagagggattacccaactgtgaggagggggacatttcactgatgaaatctaaatgaggtcactttctgttgattacatgagaggaatatgaggctgttttcatgatgtgagaaatccttgtgctctaaacagacaaggtcctgaaggagaagagaaagctgtttatccgttccatgggtgaaggtacaataaatggcttactggatgaattattacagacaagggtgctgaacaaggaagagatggagaaagtaaaacgtgaaaatgctacagttatggataagacccgagctttgattgactccgttattccgaaaggggcacaggcatgccaaatttgcatcacatacatttgtgaagaagacagttacctggcagggacgctgggactctcagcagctcctcaggcagtgcaggacaacccagctatgcccacatcctcaggctcagaagggaatgtcaagctttgctccctagaagaagctcaaaggatatggaaacaaaagtcggcagagatttatccaataatggacaagtcaagccgcacacgtcttgctctcattatctgcaatgaagaatttgacagtattcctagaagaactggagctgaggttgacatcacaggcatgacaatgctgctacaaaatctggggtacagcgtagatgtgaaaaaaaatctcactgcttcggacatgactacagagctggaggcatttgcacaccgcccagagcacaagacctctgacagcacgttcctggtgttcatgtctcatggtattcgggaaggcatttgtgggaagaaacactctgagcaagtcccagatatactacaactcaatgcaatctttaacatgttgaataccaagaactgcccaagtttgaaggacaaaccgaaggtgatcatcatccaggcctgccgtggtgacagccctggtgtggtgtggtttaaagattcagtaggagtttctggaaacctatctttaccaactacagaagagtttgaggatgatgctattaagaaagcccacatagagaaggattttatcgctttctgctcttccacaccagataatgtttcttggagacatcccacaatgggctctgtttttattggaagactcattgaacatatgcaagaatatgcctgttcctgtgatgtggaggaaattttccgcaaggttcgattttcatttgagcagccagatggtagagcgcagatgcccaccactgaaagagtgactttgacaagatgtttctacctcttcccaggacattaaaataaggaaactgtatgaatgtctgtgggcaggaagtgaagagatccttctgtaaaggtttttggaattatgtctgctgaataataaacttttttgaaataataaatctggtagaaaaatgaaaa

SEQ ID NO: 114672 - DNA, 2001 bp, Homo sapiens
  Payload ID: 2407
  Gene Symbol: CASP1
  Gene Name: caspase 1, apoptosis-related cysteine peptidase
  Uniprot ID: P29466
  ENST ID: ENST00000533400
  CDS Start-End: 37-1251
agtttcagtcacacaagaagggaggagagaaaagccatggccgacaaggtcctgaaggagaagagaaagctgtttatccgttccatgggtgaaggtacaataaatggcttactggatgaattattacagacaagggtgctgaacaaggaagagatggagaaagtaaaacgtgaaaatgctacagttatggataagacccgagctttgattgactccgttattccgaaaggggcacaggcatgccaaatttgcatcacatacatttgtgaagaagacagttacctggcagggacgctgggactctcagcagatcaaacatctggaaattaccttaatatgcaagactctcaaggagtactttcttcctttccagctcctcaggcagtgcaggacaacccagctatgcccacatcctcaggctcagaagggaatgtcaagctttgctccctagaagaagctcaaaggatatggaaacaaaagtcggcagagatttatccaataatggacaagtcaagccgcacacgtcttgctctcattatctgcaatgaagaatttgacagtattcctagaagaactggagctgaggttgacatcacaggcatgacaatgctgctacaaaatctggggtacagcgtagatgtgaaaaaaaatctcactgcttcggacatgactacagagctggaggcatttgcacaccgcccagagcacaagacctctgacagcacgttcctggtgttcatgtctcatggtattcgggaaggcatttgtgggaagaaacactctgagcaagtcccagatatactacaactcaatgcaatctttaacatgttgaataccaagaactgcccaagtttgaaggacaaaccgaaggtgatcatcatccaggcctgccgtggtgacagccctggtgtggtgtggtttaaagattcagtaggagtttctggaaacctatctttaccaactacagaagagtttgaggatgatgctattaagaaagcccacatagagaaggattttatcgctttctgctcttccacaccagataatgtttcttggagacatcccacaatgggctctgtttttattggaagactcattgaacatatgcaagaatatgcctgttcctgtgatgtggaggaaattttccgcaaggttcgattttcatttgagcagccagatggtagagcgcagatgcccaccactgaaagagtgactttgacaagatgtttctacctcttcccaggacattaaaataaggaaactgtatgaatgtctgtgggcaggtacatgtgtatggtcgggagtgtgggaaggttgaggaaagggtactgaaagtccatttgagtcaagaactctaggtttacaggctgagaatccttaatccaaaaatttgaattttgaaatgctctaaaatccaacactgtgtgagcgcccacatgatattcaaaggaaatgtttattgaaacatttcaaattataggtttttggattagggatgctaaaccagtaagtatacagctgaattccaatatacaaaaatatctgaaatttgaaatacttctggtagcatgcattttggataagggataatcaagccatatacagaaaatactgaagtaatgcctttcttctggtcagtgcagagcacgttgctcttctcccaaagtttttcatttagaccccttttgagattcatctgatattggcctagaagtggccgtaagactacaaaccctcacttttggatgtttctctccttcacctcagcagggtatatttaaacatagcatgtggtctttccttttaaaattgtgtatgttcccattggtggtataactttataacttgcatgtctttaacaaaattctttcctatgtttttttttttaattatttctttttctcataggaagtgaagagatccttctgtaaaggtttttggaattatgtctgctgaataataaacttttttgaaataataaatctggtagaaaaatgaaaa

SEQ ID NO: 114673 - DNA, 1061 bp, Homo sapiens
  Payload ID: 2407
  Gene Symbol: CASP1
  Gene Name: caspase 1, apoptosis-related cysteine peptidase
  Uniprot ID: P29466
  ENST ID: ENST00000526568
  CDS Start-End: 1-936
atggccgacaaggtcctgaaggagaagagaaagctgtttatccgttccatgggtgaagctcctcaggcagtgcaggacaacccagctatgcccacatcctcaggctcagaagggaatgtcaagctttgctccctagaagaagctcaaaggatatggaaacaaaagtcggcagagatttatccaataatggacaagtcaagccgcacacgtcttgctctcattatctgcaatgaagaatttgacagtattcctagaagaactggagctgaggttgacatcacaggcatgacaatgctgctacaaaatctggggtacagcgtagatgtgaaaaaaaatctcactgcttcggacatgactacagagctggaggcatttgcacaccgcccagagcacaagacctctgacagcacgttcctggtgttcatgtctcatggtattcgggaaggcatttgtgggaagaaacactctgagcaagtcccagatatactacaactcaatgcaatctttaacatgttgaataccaagaactgcccaagtttgaaggacaaaccgaaggtgatcatcatccaggcctgccgtggtgacagccctggtgtggtgtggtttaaagattcagtaggagtttctggaaacctatctttaccaactacagaagagtttgaggatgatgctattaagaaagcccacatagagaaggattttatcgctttctgctcttccacaccagataatgtttcttggagacatcccacaatgggctctgtttttattggaagactcattgaacatatgcaagaatatgcctgttcctgtgatgtggaggaaattttccgcaaggttcgattttcatttgagcagccagatggtagagcgcagatgcccaccactgaaagagtgactttgacaagatgtttctacctcttcccaggacattaaaataaggaaactgtatgaatgtctgtgggcaggaagtgaagagatccttctgtaaaggtttttggaattatgtctgctgaataataaacttttttgaaataataaatctggtagaaaaatgaaaa

SEQ ID NO: 114674 - DNA, 1402 bp, Homo sapiens
  Payload ID: 2407
  Gene Symbol: CASP1
  Gene Name: caspase 1, apoptosis-related cysteine peptidase
  ENST ID: ENST00000528974
  CDS Start-End: 66-971
tttcagtcacacaagaagggaggagagaaaagccatggccgacaagggtgctgaacaaggaagagatggagaaagtaaaacgtgaaaatgctacagttatggataagacccgagctttgattgactccgttattccgaaaggggcacaggcatgccaaatttgcatcacatacatttgtgaagaagacagttacctggcagggacgctgggactctcagcagatcaaacatctggaaattaccttaatatgcaagactctcaaggagtactttcttcctttccagctcctcaggcagtgcaggacaacccagctatgcccacatcctcaggctcagaagggaatgtcaagctttgctccctagaagaagctcaaaggatatggaaacaaaagtcggcagagatttatccaataatggacaagtcaagccgcacacgtcttgctctcattatctgcaatgaagaatttgacagtattcctagaagaactggagctgaggttgacatcacaggcatgacaatgctgctacaaaatctggggtacagcgtagatgtgaaaaaaaatctcactgcttcggacatgactacagagctggaggcatttgcacaccgcccagagcacaagacctctgacagcacgttcctggtgttcatgtctcatggtattcgggaaggcatttgtgggaagaaacactctgagcaagtcccagatatactacaactcaatgcaatctttaacatgttgaataccaagaactgcccaagtttgaaggacaaaccgaaggtgatcatcatccaggcctgccgtggtgacagccctggtgtggtgtggtttaaagattcagtaggagtttctggaaacctatctttaccaactacagaagagtttgaggatgatgctattaagaaagcccacatagagaaggattttatcgctttctgctcttccacaccaggcaagagccagtcttgagatttgaaatgtgctttatccatagataatgtttcttggagacatcccacaatgggctctgtttttattggaagactcattgaacatatgcaagaatatgcctgttcctgtgatgtggaggaaattttccgcaaggtaagatgctagtggatgctattttcactctacttccctgaatgcttggctattgcaattggaagcatagaaagcagatccagacaagtttatcttccaataatgctcttctttccaaaagagttttggagttctttggagagtggacaaacccaggagcctaatccaatctattaagacccacagccttgagaaaacaatcatttagtttcaccccgctcctgccctgcagagacaaatgaatggactctaatttacctgtgtctctcatggctattagatccagcagcagattt

SEQ ID NO: 114675 - DNA, 300 bp, Homo sapiens
  Payload ID: 2407
  Gene Symbol: CASP1
  Gene Name: caspase 1, apoptosis-related cysteine peptidase
  Uniprot ID: P29466
  ENST ID: ENST00000531166
  CDS Start-End: 1-267
atggccgacaaggtcctgaaggagaagagaaagctgtttatccgttccatgggtgaagataatgtttcttggagacatcccacaatgggctctgtttttattggaagactcattgaacatatgcaagaatatgcctgttcctgtgatgtggaggaaattttccgcaaggttcgattttcatttgagcagccagatggtagagcgcagatgcccaccactgaaagagtgactttgacaagatgtttctacctcttcccaggacattaaaataaggaaactgtatgaatgtctgtgggcagg

SEQ ID NO: 114676 - DNA, 1237 bp, Homo sapiens
  Payload ID: 2407
  Gene Symbol: CASP1
  Gene Name: caspase 1, apoptosis-related cysteine peptidase
  Uniprot ID: P29466
  ENST ID: ENST00000525825
  CDS Start-End: 37-1188
agtttcagtcacacaagaagggaggagagaaaagccatggccgacaaggtcctgaaggagaagagaaagctgtttatccgttccatgggtgaaggtacaataaatggcttactggatgaattattacagacaagggtgctgaacaaggaagagatggagaaagtaaaacgtgaaaatgctacagttatggataagacccgagctttgattgactccgttattccgaaaggggcacaggcatgccaaatttgcatcacatacatttgtgaagaagacagttacctggcagggacgctgggactctcagcagctcctcaggcagtgcaggacaacccagctatgcccacatcctcaggctcagaagggaatgtcaagctttgctccctagaagaagctcaaaggatatggaaacaaaagtcggcagagatttatccaataatggacaagtcaagccgcacacgtcttgctctcattatctgcaatgaagaatttgacagtattcctagaagaactggagctgaggttgacatcacaggcatgacaatgctgctacaaaatctggggtacagcgtagatgtgaaaaaaaatctcactgcttcggacatgactacagagctggaggcatttgcacaccgcccagagcacaagacctctgacagcacgttcctggtgttcatgtctcatggtattcgggaaggcatttgtgggaagaaacactctgagcaagtcccagatatactacaactcaatgcaatctttaacatgttgaataccaagaactgcccaagtttgaaggacaaaccgaaggtgatcatcatccaggcctgccgtggtgacagccctggtgtggtgtggtttaaagattcagtaggagtttctggaaacctatctttaccaactacagaagagtttgaggatgatgctattaagaaagcccacatagagaaggattttatcgctttctgctcttccacaccagataatgtttcttggagacatcccacaatgggctctgtttttattggaagactcattgaacatatgcaagaatatgcctgttcctgtgatgtggaggaaattttccgcaaggttcgattttcatttgagcagccagatggtagagcgcagatgcccaccactgaaagagtgactttgacaagatgtttctacctcttcccaggacattaaaataaggaaactgtatgaatgtctgtgggcaggtacatgtgtatggtcg

SEQ ID NO: 114677 - DNA, 821 bp, Homo sapiens
  Payload ID: 2407
  Gene Symbol: CASP1
  Gene Name: caspase 1, apoptosis-related cysteine peptidase
  ENST ID: ENST00000532439
  CDS Start-End: 1-711
atttatccaataatggacaagtcaagccgcacacgtcttgctctcattatctgcaatgaagaatttgacagtattcctagaagaactggagctgaggttgacatcacaggcatgacaatgctgctacaaaatctggggtacagcgtagatgtgaaaaaaaatctcactgcttcggacatgactacagagctggaggcatttgcacaccgcccagagcacaagacctctgacagcacgttcctggtgttcatgtctcatggtattcgggaaggcatttgtgggaagaaacactctgagcaagtcccagatatactacaactcaatgcaatctttaacatgttgaataccaagaactgcccaagtttgaaggacaaaccgaaggtgatcatcatccaggcctgccgtggtgacagccctggtgtggtgtggtttaaagattcagtaggagtttctggaaacctatctttaccaactacagaagagtttgaggatgatgctattaagaaagcccacatagagaaggattttatcgctttctgctcttccacaccagataatgtttcttggagacatcccacaatgggctctgtttttattggaagactcattgaacatatgcaagaatatgcctgttcctgtgatgtggaggaaattttccgcaaggaagtgaagagatccttctgtaaaggtttttggaattatgtctgctgaataataaacttttttgaaataataaatctggtagaaaaatgaaaacttgtcctcatttttctcccacactgaagaaacagggactggaacttagagtgactaaggaattt

SEQ ID NO: 114678 - DNA, 825 bp, Homo sapiens
  Payload ID: 2407
  Gene Symbol: CASP1
  Gene Name: caspase 1, apoptosis-related cysteine peptidase
  Uniprot ID: P29466
  ENST ID: ENST00000534497
  CDS Start-End: 1-792
atggccgacaaggtcctgaaggagaagagaaagctgtttatccgttccatgggtgaagctcctcaggcagtgcaggacaacccagctatgcccacatcctcaggctcagaagggaatgtcaagctttgctccctagaagaagctcaaaggatatggaaacaaaagtcggcagagatttatccaataatggacaagtcaagccgcacacgtcttgctctcattatctgcaatgaagaatttgacagtattcctagaagaactggagctgaggttgacatcacaggcatgacaatgctgctacaaaatctggggtacagcgtagatgtgaaaaaaaatctcactgcttcggacatgactacagagctggaggcatttgcacaccgcccagagcacaagacctctgacagcacgttcctggtgttcatgtctcatggtattcgggaaggcatttgtgggaagaaacactctgagcaagtcccagatatactacaactcaatgcaatctttaacatgttgaataccaagaactgcccaagtttgaaggacaaaccgaaggtgatcatcatccaggcctgccgtggtgataatgtttcttggagacatcccacaatgggctctgtttttattggaagactcattgaacatatgcaagaatatgcctgttcctgtgatgtggaggaaattttccgcaaggttcgattttcatttgagcagccagatggtagagcgcagatgcccaccactgaaagagtgactttgacaagatgtttctacctcttcccaggacattaaaataaggaaactgtatgaatgtctgtgggcagg

SEQ ID NO: 114679 - DNA, 3926 bp, Homo sapiens
  Payload ID: 2408
  Gene Symbol: CASP10
  Gene Name: caspase 10, apoptosis-related cysteine peptidase
  Uniprot ID: Q92851
  ENST ID: ENST00000346817
  CDS Start-End: 148-1587
tgaagtctcttcccaagcaaatgggagcttctttggaccttggagcacacagaggattctactttctttaaaactttgttttcaggcaatttccctgagaaccgtttacttccagaagattggtggagcttgatctgaaggctggccatgaaatctcaaggtcaacattggtattccagttcagataaaaactgtaaagtgagctttcgtgagaagcttctgattattgattcaaacctgggggtccaagatgtggagaacctcaagtttctctgcataggattggtccccaacaagaagctggagaagtccagctcagcctcagatgtttttgaacatctcttggcagaggatctgctgagtgaggaagaccctttcttcctggcagaactcctctatatcatacggcagaagaagctgctgcagcacctcaactgtaccaaagaggaagtggagcgactgctgcccacccgacaaagggtttctctgtttagaaacctgctctacgaactgtcagaaggcattgactcagagaacttaaaggacatgatcttccttctgaaagactcgcttcccaaaactgaaatgacctccctaagtttcctggcatttctagagaaacaaggtaaaatagatgaagataatctgacatgcctggaggacctctgcaaaacagttgtacctaaacttttgagaaacatagagaaatacaaaagagagaaagctatccagatagtgacacctcctgtagacaaggaagccgagtcgtatcaaggagaggaagaactagtttcccaaacagatgttaagacattcttggaagccttaccgagggcagctgtgtacaggatgaatcggaaccacagaggcctctgtgtcattgtcaacaaccacagctttacctccctgaaggacagacaaggaacccataaagatgctgagatcctgagtcatgtgttccagtggcttgggttcacagtgcatatacacaataatgtgacgaaagtggaaatggagatggtcctgcagaagcagaagtgcaatccagcccatgccgacggggactgcttcgtgttctgtattctgacccatgggagatttggagctgtctactcttcggatgaggccctcattcccattcgggagatcatgtctcacttcacagccctgcagtgccctagactggctgaaaaacctaaactctttttcatccaggcctgccaaggtgaagagatacagccttccgtatccatcgaagcagatgctctgaaccctgagcaggcacccacttccctgcaggacagtattcctgccgaggctgacttcctacttggtctggccactgtcccaggctatgtatcctttcggcatgtggaggaaggcagctggtatattcagtctctgtgtaatcatctgaagaaattggtcccaagacatgaagacatcttatccatcctcactgctgtcaacgatgatgtgagtcgaagagtggacaaacagggaacaaagaaacagatgccccagcctgctttcacactaaggaaaaaactagtattccctgtgcccctggatgcactttcattatagcagagagtttttgttggttcttagacctcaaacgaatcattggctataacctccagcctcctgcccagcacaggaatcggtggtctccacctgtcattctagaaacaggaaacaccgtgttttctgacacagtcaattctgattttctttttcttttgcaagtctaaatgttagaaaactttcttttttttggagatagtctcattctgtcacccagactggagtgcaggggggcaatcacggctcactgtagtctcgacctcccaggctcaagctgtcctcccgcctcagcttcccaagtagctgggaccacaggtgtgtaccaccgtgcccggattttttttattctttattttttgtagagatggagggatctcactttgttgcacaggctggtttcaaactcctaggcccaagtgatcctcccacctctgtccccaaaatactgggattataggcacgagccaccacacctggccagaaaactttcattattgaagacttggattgtagccttggttttggatgtctattctgaagacagagtaattggctttggtttgtgcaggtactttttctttgagacagagtcactccgtcacctgggctggagtgcagtggtgggatcactgttcactgcagccttgacctcccaggttcaagcgatcctcccacctcagcctcccaagtagctgagactacaggtgtgtgtccatgcacagctaactttttattttttttgtggagatggggtttcactatgttgcctaagctggtctcaaactcctgggctcaagcgatcctcccacctcagcttctcaaagttctgggactacaggcatgaaatactgtgcctggcctggggaccaggtgcattttaaggttccttggtgttcaaaaaccacgttcttagcctagattgagcttagattgcctctctagacaactaccccttagttataattctgtgtcccctctgcatgcccttaaacattggacagtgaggtcacagtccacccaccctctctctgatctcccccttcctaagacttctcttttgcacatctagtgaggtgaaaatttggtctatgccaggcccatttcctgcttttgtgtaaggaaggtgctcacataggaagtttttatttggttagagacaggtttccctgtaggaagatgatggctcatttacactcagctgctctgcaagcagaaactttacaacctgatgtcatattccattttggactgggtgcggtgactcatgcctgtaatcccagtactctgggaagccaaggcaggcagatcacttgaggtcaggagttcgagaccagcctggccaatacggcaaaacctcatcattactaaaaacacaaaaattagccaggtgtggcggcgagcacctgtaatcccagctactcgggaggctgagacaggagaatctcttgaatccaggaggcagaggctgtggtgagccaagatgacacaactgcactccagcttgggcaacagggcgagaccttgtttaaaaaaaaaattcaatattggggttggaacatttcagttgccattgacagaacacccaattcaaattgactgaagcaaagaagggaatttattgcctctttcacattgaaacccaggagtggataacactggcttcaggcaaagcttgaatcaggactcaatctacaggccagcacctttctcttggccggatgtcctcagggctggcagatgcagtagactgcagtggacagtccccaccttgttactgctactacactttgctcctctggcccaaggcatgaggagagaggctgtgtcagaaactgaagctgttctcaggatcactgggctcttcttggcagaggggatgtctggcttgcctgaagggagtggctctgtaaggacgccttgatgctttcttcattaagattttgagcatttttacgtacttgagcttttttttttttttttttcaatttctagaggaactttttctctgttaattcctggaactgtattttgaatccttaaaggtgagccctcatagggagatccaaagtcctgtggttaacgccttcatttatagatgaggcagctgaggcctggggatgtgaacaacctgctcacagtcctcatttactggatttgacttcagccaggtgaactggaatgccttggggcgtggaagggcattaggagtgtttcatttgatatgtgaatgctcataaaaaaatgtcaaggaatgaagaacaacaactctcagtggtgcctgcatttataattatttatgtgaaagtcaaattcatgtacagtaaatttgttataagaat

SEQ ID NO: 114680 - DNA, 2073 bp, Homo sapiens
  Payload ID: 2408
  Gene Symbol: CASP10
  Gene Name: caspase 10, apoptosis-related cysteine peptidase
  Uniprot ID: Q92851
  ENST ID: ENST00000272879
  CDS Start-End: 185-1750
tgaagattcagttttcacttaaacaaccagcaagtcttgaagtctcttcccaagcaaatgggagcttctttggaccttggagcacacagaggattctactttctttaaaactttgttttcaggcaatttccctgagaaccgtttacttccagaagattggtggagcttgatctgaaggctggccatgaaatctcaaggtcaacattggtattccagttcagataaaaactgtaaagtgagctttcgtgagaagcttctgattattgattcaaacctgggggtccaagatgtggagaacctcaagtttctctgcataggattggtccccaacaagaagctggagaagtccagctcagcctcagatgtttttgaacatctcttggcagaggatctgctgagtgaggaagaccctttcttcctggcagaactcctctatatcatacggcagaagaagctgctgcagcacctcaactgtaccaaagaggaagtggagcgactgctgcccacccgacaaagggtttctctgtttagaaacctgctctacgaactgtcagaaggcattgactcagagaacttaaaggacatgatcttccttctgaaagactcgcttcccaaaactgaaatgacctccctaagtttcctggcatttctagagaaacaaggtaaaatagatgaagataatctgacatgcctggaggacctctgcaaaacagttgtacctaaacttttgagaaacatagagaaatacaaaagagagaaagctatccagatagtgacacctcctgtagacaaggaagccgagtcgtatcaaggagaggaagaactagtttcccaaacagatgttaagacattcttggaagccttaccgcaggagtcctggcaaaataagcatgcaggtagtaatggtaacagagccacaaatggtgcaccaagcctggtctccagggggatgcaaggagcatctgctaacactctaaactctgaaaccagcacaaagagggcagctgtgtacaggatgaatcggaaccacagaggcctctgtgtcattgtcaacaaccacagctttacctccctgaaggacagacaaggaacccataaagatgctgagatcctgagtcatgtgttccagtggcttgggttcacagtgcatatacacaataatgtgacgaaagtggaaatggagatggtcctgcagaagcagaagtgcaatccagcccatgccgacggggactgcttcgtgttctgtattctgacccatgggagatttggagctgtctactcttcggatgaggccctcattcccattcgggagatcatgtctcacttcacagccctgcagtgccctagactggctgaaaaacctaaactctttttcatccaggcctgccaaggtgaagagatacagccttccgtatccatcgaagcagatgctctgaaccctgagcaggcacccacttccctgcaggacagtattcctgccgaggctgacttcctacttggtctggccactgtcccaggctatgtatcctttcggcatgtggaggaaggcagctggtatattcagtctctgtgtaatcatctgaagaaattggtcccaaggatgctgaaatttctggaaaagacaatggaaatcaggggcaggaagagaacagtgtggggtgctaaacagatctcagcaacctccctgcccacggccatctctgcgcagacacctcgaccccccatgcgcaggtggagcagcgtttcctagttctttccagaggcttccttctgcctgccttccagccacatcgcctgagattgacaacgccctacagcaagacggaaacctccctttacagcaccaccttgcgattctgcagccacaaagttgagacttctgaacgtggcactcttctgttcccttactgtttcacgtgtacctgtgtcatctttcttgtttcatcgtaaacatacttctaaaattcccattttctttatttagaaatagaactacaagcggatggttaaacaatttaaacaaatggtccatggggaaaagtgaatttcacactgtcccccaaactttcagtg

SEQ ID NO: 114681 - DNA, 5928 bp, Homo sapiens
  Payload ID: 2408
  Gene Symbol: CASP10
  Gene Name: caspase 10, apoptosis-related cysteine peptidase
  Uniprot ID: Q92851
  ENST ID: ENST00000286186
  CDS Start-End: 436-2004
tccctttttgacttaccaaggaaatggagatccaaaggaaagcctgaagcactttgtggcttccacgggttcgtttctaggaagcttttgctttacctggggaaaccccaagctctacagtgagaaagttgtaaattagcctttaggagacgctgtttgtcaaagttatcttaaccctggaaaaggggagggaaaaaggcagataagcagtgatgacatcagcaggaaactagtatcaggctacccagtcctgaagattcagttttcacttaaacaaccagcaagtcttgaagtctcttcccaagcaaatgggagcttctttggaccttggagcacacagaggattctactttctttaaaactttgttttcaggcaatttccctgagaaccgtttacttccagaagattggtggagcttgatctgaaggctggccatgaaatctcaaggtcaacattggtattccagttcagataaaaactgtaaagtgagctttcgtgagaagcttctgattattgattcaaacctgggggtccaagatgtggagaacctcaagtttctctgcataggattggtccccaacaagaagctggagaagtccagctcagcctcagatgtttttgaacatctcttggcagaggatctgctgagtgaggaagaccctttcttcctggcagaactcctctatatcatacggcagaagaagctgctgcagcacctcaactgtaccaaagaggaagtggagcgactgctgcccacccgacaaagggtttctctgtttagaaacctgctctacgaactgtcagaaggcattgactcagagaacttaaaggacatgatcttccttctgaaagactcgcttcccaaaactgaaatgacctccctaagtttcctggcatttctagagaaacaaggtaaaatagatgaagataatctgacatgcctggaggacctctgcaaaacagttgtacctaaacttttgagaaacatagagaaatacaaaagagagaaagctatccagatagtgacacctcctgtagacaaggaagccgagtcgtatcaaggagaggaagaactagtttcccaaacagatgttaagacattcttggaagccttaccgcaggagtcctggcaaaataagcatgcaggtagtaatggtaacagagccacaaatggtgcaccaagcctggtctccagggggatgcaaggagcatctgctaacactctaaactctgaaaccagcacaaagagggcagctgtgtacaggatgaatcggaaccacagaggcctctgtgtcattgtcaacaaccacagctttacctccctgaaggacagacaaggaacccataaagatgctgagatcctgagtcatgtgttccagtggcttgggttcacagtgcatatacacaataatgtgacgaaagtggaaatggagatggtcctgcagaagcagaagtgcaatccagcccatgccgacggggactgcttcgtgttctgtattctgacccatgggagatttggagctgtctactcttcggatgaggccctcattcccattcgggagatcatgtctcacttcacagccctgcagtgccctagactggctgaaaaacctaaactctttttcatccaggcctgccaaggtgaagagatacagccttccgtatccatcgaagcagatgctctgaaccctgagcaggcacccacttccctgcaggacagtattcctgccgaggctgacttcctacttggtctggccactgtcccaggctatgtatcctttcggcatgtggaggaaggcagctggtatattcagtctctgtgtaatcatctgaagaaattggtcccaagacatgaagacatcttatccatcctcactgctgtcaacgatgatgtgagtcgaagagtggacaaacagggaacaaagaaacagatgccccagcctgctttcacactaaggaaaaaactagtattccctgtgcccctggatgcactttcattatagcagagagtttttgttggttcttagacctcaaacgaatcattggctataacctccagcctcctgcccagcacaggaatcggtggtctccacctgtcattctagaaacaggaaacaccgtgttttctgacacagtcaattctgattttctttttcttttgcaagtctaaatgttagaaaactttcttttttttggagatagtctcattctgtcacccagactggagtgcaggggggcaatcacggctcactgtagtctcgacctcccaggctcaagctgtcctcccgcctcagcttcccaagtagctgggaccacaggtgtgtaccaccgtgcccggattttttttattctttattttttgtagagatggagggatctcactttgttgcacaggctggtttcaaactcctaggcccaagtgatcctcccacctctgtccccaaaatactgggattataggcacgagccaccacacctggccagaaaactttcattattgaagacttggattgtagccttggttttggatgtctattctgaagacagagtaattggctttggtttgtgcaggtactttttctttgagacagagtcactccgtcacctgggctggagtgcagtggtgggatcactgttcactgcagccttgacctcccaggttcaagcgatcctcccacctcagcctcccaagtagctgagactacaggtgtgtgtccatgcacagctaactttttattttttttgtggagatggggtttcactatgttgcctaagctggtctcaaactcctgggctcaagcgatcctcccacctcagcttctcaaagttctgggactacaggcatgaaatactgtgcctggcctggggaccaggtgcattttaaggttccttggtgttcaaaaaccacgttcttagcctagattgagcttagattgcctctctagacaactaccccttagttataattctgtgtcccctctgcatgcccttaaacattggacagtgaggtcacagtccacccaccctctctctgatctcccccttcctaagacttctcttttgcacatctagtgaggtgaaaatttggtctatgccaggcccatttcctgcttttgtgtaaggaaggtgctcacataggaagtttttatttggttagagacaggtttccctgtaggaagatgatggctcatttacactcagctgctctgcaagcagaaactttacaacctgatgtcatattccattttggactgggtgcggtgactcatgcctgtaatcccagtactctgggaagccaaggcaggcagatcacttgaggtcaggagttcgagaccagcctggccaatacggcaaaacctcatcattactaaaaacacaaaaattagccaggtgtggcggcgagcacctgtaatcccagctactcgggaggctgagacaggagaatctcttgaatccaggaggcagaggctgtggtgagccaagatgacacaactgcactccagcttgggcaacagggcgagaccttgtttaaaaaaaaaattcaatattggggttggaacatttcagttgccattgacagaacacccaattcaaattgactgaagcaaagaagggaatttattgcctctttcacattgaaacccaggagtggataacactggcttcaggcaaagcttgaatcaggactcaatctacaggccagcacctttctcttggccggatgtcctcagggctggcagatgcagtagactgcagtggacagtccccaccttgttactgctactacactttgctcctctggcccaaggcatgaggagagaggctgtgtcagaaactgaagctgttctcaggatcactgggctcttcttggcagaggggatgtctggcttgcctgaagggagtggctctgtaaggacgccttgatgctttcttcattaagattttgagcatttttacgtacttgagcttttttttttttttttttcaatttctagaggaactttttctctgttaattcctggaactgtattttgaatccttaaaggtgagccctcatagggagatccaaagtcctgtggttaacgccttcatttatagatgaggcagctgaggcctggggatgtgaacaacctgctcacagtcctcatttactggatttgacttcagccaggtgaactggaatgccttggggcgtggaagggcattaggagtgtttcatttgatatgtgaatgctcataaaaaaatgtcaaggaatgaagaacaacaactctcagtggtgcctgcatttataattatttatgtgaaagtcaaattcatgtacagtaaatttgttataagaatattcacaagaacactgttctgatatctctgattgtcatgtggatttgaatgtagcttgacagagggaatgtctaatctatattgacagggcaggaacaccgtcatcttagacaaacaccgccactttaagttccagttccctttctagcctcatgcatttcaaggaaatcacttcttttctaacagcgagcagccagaaagagaagagagtaaaatacagataagacagctctggcatagagggaggtgggggggtgggggaagtctcttgggtaactgccaaactttgccttcatacaatgggttccaggaaaacaatgagccttaataagcacattcctttcccttcaggtgcactaagtggggaagctaaaagcagactggaggggggtggggtgtacctacagctgcagaaatattgtatgggaacggacacacaactctccctcccagataagcacagcaaagagacatagaagcaatccaagcctctgataaactctcccaccctaaatccttaaaaactcttagtctgtaagtgagtgggctctgacctaactcggccagaagcccctttcaaatttgttttctctaaaataaacctgtccttggctgtcaagccacctttcatgtttctttcctctttctttaattcttacacatgtgtcaggatgatctcccaaaaccgtgttcataacagtcagggccaaaagctagtggtcacagtccttgtccagttggcagaactgacatgtgaaggcaagtgaaggatggtgagatactgaggaaagagcaaaggatctggagatcaaagccctgcatttccattttgtcctgattcctttgctcagagacactaactaaatcaagctagcttttttcagccttgtctgtaaagtagagaaaacattagctgttgggaagacgaaaaagaatgtgtcctatgtgtgcatctatttaaatctaactgtgctgaggtgcatataaatgcctttaggtggtagggtcttccggttgtaactgcaacagaaatagcaggacttaagttcctttgtgcgtaattccagctgactttattagcggcaactcagcactagcattacccctgacatactctgagtaagatctaattcttccctcactggttcgtgatgtctaccgcagcagaaggccagctcttgactctgagttcagttggacaaaatgctgttgataaaacctcctgtcaggcctctgagcccaagctaagccatcatatcccttgtgacctgcacatatatatccagatggcctgaagtaactgaagaatcacaaaagaagtgaaaatggcctgttcctgccttaactgatgacattaccttgtgaaattccttctcctggctcatcctggctcaaaagctcccccagtgagcaccttgtgacccccatccctgccagccagagaacaaccccctttgactgtaattttccactacttacccaaatcctataaaacggccccacccctatctcccttcactgactttcttttcggactcagcccacctgcacccaggtgattaaaaagctttattgctcacacaaa

SEQ ID NO: 114682 - DNA, 1521 bp, Homo sapiens
  Payload ID: 2408
  Gene Symbol: CASP10
  Gene Name: caspase 10, apoptosis-related cysteine peptidase
  Uniprot ID: Q92851
  ENST ID: ENST00000313728
  CDS Start-End: 125-1492
ggagcttctttggaccttggagcacacagaggattctactttctttaaaactttgttttcaggcaatttccctgagaaccgtttacttccagaagattggtggagcttgatctgaaggctggccatgaaatctcaaggtcaacattggtattccagttcagataaaaactgtaaagtgagctttcgtgagaagcttctgattattgattcaaacctgggggtccaagatgtggagaacctcaagtttctctgcataggattggtccccaacaagaagctggagaagtccagctcagcctcagatgtttttgaacatctcttggcagaggatctgctgagtgaggaagaccctttcttcctggcagaactcctctatatcatacggcagaagaagctgctgcagcacctcaactgtaccaaagaggaagtggagcgactgctgcccacccgacaaagggtttctctgtttagaaacctgctctacgaactgtcagaaggcattgactcagagaacttaaaggacatgatcttccttctgaaagactcgcttcccaaaactgaaatgacctccctaagtttcctggcatttctagagaaacaaggtaaaatagatgaagataatctgacatgcctggaggacctctgcaaaacagttgtacctaaacttttgagaaacatagagaaatacaaaagagagaaagctatccagatagtgacacctcctgtagacaaggaagccgagtcgtatcaaggagaggaagaactagtttcccaaacagatgttaagacattcttggaagccttaccgcaggagtcctggcaaaataagcatgcaggtagtaatgagatcctgagtcatgtgttccagtggcttgggttcacagtgcatatacacaataatgtgacgaaagtggaaatggagatggtcctgcagaagcagaagtgcaatccagcccatgccgacggggactgcttcgtgttctgtattctgacccatgggagatttggagctgtctactcttcggatgaggccctcattcccattcgggagatcatgtctcacttcacagccctgcagtgccctagactggctgaaaaacctaaactctttttcatccaggcctgccaaggtgaagagatacagccttccgtatccatcgaagcagatgctctgaaccctgagcaggcacccacttccctgcaggacagtattcctgccgaggctgacttcctacttggtctggccactgtcccaggctatgtatcctttcggcatgtggaggaaggcagctggtatattcagtctctgtgtaatcatctgaagaaattggtcccaagacatgaagacatcttatccatcctcactgctgtcaacgatgatgtgagtcgaagagtggacaaacagggaacaaagaaacagatgccccagcctgctttcacactaaggaaaaaactagtattccctgtgcccctggatgcactttcattatagcagagagtttttgttggttcttagacctc

SEQ ID NO: 114683 - DNA, 5814 bp, Homo sapiens
  Payload ID: 2408
  Gene Symbol: CASP10
  Gene Name: caspase 10, apoptosis-related cysteine peptidase
  Uniprot ID: Q92851
  ENST ID: ENST00000360132
  CDS Start-End: 419-1240
aaggaaatggagatccaaaggaaagcctgaagcactttgtggcttccacgggttcgtttctaggaagcttttgctttacctggggaaaccccaagctctacagtgagaaagttgtaaattagcctttaggagacgctgtttgtcaaagttatcttaaccctggaaaaggggagggaaaaaggcagataagcagtgatgacatcagcaggaaactagtatcaggctacccagtcctgaagattcagttttcacttaaacaaccagcaagtcttgaagtctcttcccaagcaaatgggagcttctttggaccttggagcacacagaggattctactttctttaaaactttgttttcaggcaatttccctgagaaccgtttacttccagaagattggtggagcttgatctgaaggctggccatgaaatctcaaggtcaacattggtattccagttcagataaaaactgtaaagtgagctttcgtgagaagcttctgattattgattcaaacctgggggtccaagatgtggagaacctcaagtttctctgcataggattggtccccaacaagaagctggagaagtccagctcagcctcagatgtttttgaacatctcttggcagaggatctgctgagtgaggaagaccctttcttcctggcagaactcctctatatcatacggcagaagaagctgctgcagcacctcaactgtaccaaagaggaagtggagcgactgctgcccacccgacaaagggtttctctgtttagaaacctgctctacgaactgtcagaaggcattgactcagagaacttaaaggacatgatcttccttctgaaagactcgcttcccaaaactgaaatgacctccctaagtttcctggcatttctagagaaacaaggtaaaatagatgaagataatctgacatgcctggaggacctctgcaaaacagttgtacctaaacttttgagaaacatagagaaatacaaaagagagaaagctatccagatagtgacacctcctgtagacaaggaagccgagtcgtatcaaggagaggaagaactagtttcccaaacagatgttaagacattcttggaagccttaccgcaggagtcctggcaaaataagcatgcaggtagtaatgagggcagctgtgtacaggatgaatcggaaccacagaggcctctgtgtcattgtcaacaaccacagctttacctccctgaaggacagacaaggaacccataaagatgctgagatcctgagtcatgtgttccagtggcttgggttcacagtgcatatacacaataatgtgacgaaagtggaaatggagatggtcctgcagaagcagaagtgcaatccagcccatgccgacggggactgcttcgtgttctgtattctgacccatgggagatttggagctgtctactcttcggatgaggccctcattcccattcgggagatcatgtctcacttcacagccctgcagtgccctagactggctgaaaaacctaaactctttttcatccaggcctgccaaggtgaagagatacagccttccgtatccatcgaagcagatgctctgaaccctgagcaggcacccacttccctgcaggacagtattcctgccgaggctgacttcctacttggtctggccactgtcccaggctatgtatcctttcggcatgtggaggaaggcagctggtatattcagtctctgtgtaatcatctgaagaaattggtcccaagacatgaagacatcttatccatcctcactgctgtcaacgatgatgtgagtcgaagagtggacaaacagggaacaaagaaacagatgccccagcctgctttcacactaaggaaaaaactagtattccctgtgcccctggatgcactttcattatagcagagagtttttgttggttcttagacctcaaacgaatcattggctataacctccagcctcctgcccagcacaggaatcggtggtctccacctgtcattctagaaacaggaaacaccgtgttttctgacacagtcaattctgattttctttttcttttgcaagtctaaatgttagaaaactttcttttttttggagatagtctcattctgtcacccagactggagtgcaggggggcaatcacggctcactgtagtctcgacctcccaggctcaagctgtcctcccgcctcagcttcccaagtagctgggaccacaggtgtgtaccaccgtgcccggattttttttattctttattttttgtagagatggagggatctcactttgttgcacaggctggtttcaaactcctaggcccaagtgatcctcccacctctgtccccaaaatactgggattataggcacgagccaccacacctggccagaaaactttcattattgaagacttggattgtagccttggttttggatgtctattctgaagacagagtaattggctttggtttgtgcaggtactttttctttgagacagagtcactccgtcacctgggctggagtgcagtggtgggatcactgttcactgcagccttgacctcccaggttcaagcgatcctcccacctcagcctcccaagtagctgagactacaggtgtgtgtccatgcacagctaactttttattttttttgtggagatggggtttcactatgttgcctaagctggtctcaaactcctgggctcaagcgatcctcccacctcagcttctcaaagttctgggactacaggcatgaaatactgtgcctggcctggggaccaggtgcattttaaggttccttggtgttcaaaaaccacgttcttagcctagattgagcttagattgcctctctagacaactaccccttagttataattctgtgtcccctctgcatgcccttaaacattggacagtgaggtcacagtccacccaccctctctctgatctcccccttcctaagacttctcttttgcacatctagtgaggtgaaaatttggtctatgccaggcccatttcctgcttttgtgtaaggaaggtgctcacataggaagtttttatttggttagagacaggtttccctgtaggaagatgatggctcatttacactcagctgctctgcaagcagaaactttacaacctgatgtcatattccattttggactgggtgcggtgactcatgcctgtaatcccagtactctgggaagccaaggcaggcagatcacttgaggtcaggagttcgagaccagcctggccaatacggcaaaacctcatcattactaaaaacacaaaaattagccaggtgtggcggcgagcacctgtaatcccagctactcgggaggctgagacaggagaatctcttgaatccaggaggcagaggctgtggtgagccaagatgacacaactgcactccagcttgggcaacagggcgagaccttgtttaaaaaaaaaattcaatattggggttggaacatttcagttgccattgacagaacacccaattcaaattgactgaagcaaagaagggaatttattgcctctttcacattgaaacccaggagtggataacactggcttcaggcaaagcttgaatcaggactcaatctacaggccagcacctttctcttggccggatgtcctcagggctggcagatgcagtagactgcagtggacagtccccaccttgttactgctactacactttgctcctctggcccaaggcatgaggagagaggctgtgtcagaaactgaagctgttctcaggatcactgggctcttcttggcagaggggatgtctggcttgcctgaagggagtggctctgtaaggacgccttgatgctttcttcattaagattttgagcatttttacgtacttgagcttttttttttttttttttcaatttctagaggaactttttctctgttaattcctggaactgtattttgaatccttaaaggtgagccctcatagggagatccaaagtcctgtggttaacgccttcatttatagatgaggcagctgaggcctggggatgtgaacaacctgctcacagtcctcatttactggatttgacttcagccaggtgaactggaatgccttggggcgtggaagggcattaggagtgtttcatttgatatgtgaatgctcataaaaaaatgtcaaggaatgaagaacaacaactctcagtggtgcctgcatttataattatttatgtgaaagtcaaattcatgtacagtaaatttgttataagaatattcacaagaacactgttctgatatctctgattgtcatgtggatttgaatgtagcttgacagagggaatgtctaatctatattgacagggcaggaacaccgtcatcttagacaaacaccgccactttaagttccagttccctttctagcctcatgcatttcaaggaaatcacttcttttctaacagcgagcagccagaaagagaagagagtaaaatacagataagacagctctggcatagagggaggtgggggggtgggggaagtctcttgggtaactgccaaactttgccttcatacaatgggttccaggaaaacaatgagccttaataagcacattcctttcccttcaggtgcactaagtggggaagctaaaagcagactggaggggggtggggtgtacctacagctgcagaaatattgtatgggaacggacacacaactctccctcccagataagcacagcaaagagacatagaagcaatccaagcctctgataaactctcccaccctaaatccttaaaaactcttagtctgtaagtgagtgggctctgacctaactcggccagaagcccctttcaaatttgttttctctaaaataaacctgtccttggctgtcaagccacctttcatgtttctttcctctttctttaattcttacacatgtgtcaggatgatctcccaaaaccgtgttcataacagtcagggccaaaagctagtggtcacagtccttgtccagttggcagaactgacatgtgaaggcaagtgaaggatggtgagatactgaggaaagagcaaaggatctggagatcaaagccctgcatttccattttgtcctgattcctttgctcagagacactaactaaatcaagctagcttttttcagccttgtctgtaaagtagagaaaacattagctgttgggaagacgaaaaagaatgtgtcctatgtgtgcatctatttaaatctaactgtgctgaggtgcatataaatgcctttaggtggtagggtcttccggttgtaactgcaacagaaatagcaggacttaagttcctttgtgcgtaattccagctgactttattagcggcaactcagcactagcattacccctgacatactctgagtaagatctaattcttccctcactggttcgtgatgtctaccgcagcagaaggccagctcttgactctgagttcagttggacaaaatgctgttgataaaacctcctgtcaggcctctgagcccaagctaagccatcatatcccttgtgacctgcacatatatatccagatggcctgaagtaactgaagaatcacaaaagaagtgaaaatggcctgttcctgccttaactgatgacattaccttgtgaaattccttctcctggctcatcctggctcaaaagctcccccagtgagcaccttgtgacccccatccctgccagccagagaacaaccccctttgactgtaattttccactacttacccaaatcctataaaacggccccacccctatctcccttcactgactttcttttcggactcagcccacctgcacccaggtgattaaaaagctttattgctcac

SEQ ID NO: 114684 - DNA, 1126 bp, Homo sapiens
  Payload ID: 2408
  Gene Symbol: CASP10
  Gene Name: caspase 10, apoptosis-related cysteine peptidase
  Uniprot ID: Q92851
  ENST ID: ENST00000374650
  CDS Start-End: 157-900
agcaagtcttgaagtctcttcccaagcaaatgggagcttctttggaccttggagcacacagaggattctactttctttaaaactttgttttcaggcaatttccctgagaaccgtttacttccagaagattggtggagcttgatctgaaggctggccatgaaatctcaaggtcaacattggtattccagttcagataaaaactgtaaagtgagctttcgtgagaagcttctgattattgattcaaacctgggggtccaagatgtggagaacctcaagtttctctgcataggattggtccccaacaagaagctggagaagtccagctcagcctcagatgtttttgaacatctcttggcagaggatctgctgagtgaggaagaccctttcttcctggcagaactcctctatatcatacggcagaagaagctgctgcagcacctcaactgtaccaaagaggaagtggagcgactgctgcccacccgacaaagggtttctctgtttagaaacctgctctacgaactgtcagaaggcattgactcagagaacttaaaggacatgatcttccttctgaaagactcgcttcccaaaactgaaatgacctccctaagtttcctggcatttctagagaaacaaggtaaaatagatgaagataatctgacatgcctggaggacctctgcaaaacagttgtacctaaacttttgagaaacatagagaaatacaaaagagagaaagctatccagatagtgacacctcctgtagacaaggaagccgagtcgtatcaaggagaggaagaactagtttcccaaacagatgttaagacattcttggaagccttaccggaaggtgtttttgtttttttaaatgaaggagaccgtggaaactcgccagatgacctgtagctcctggagcttggcaaaggctgggcaaacgcccacctgaagactatgcaggcaatcaggacatgacacagagccgggagaggcctgctcttcggctctgccctgaacctcattcggcaggtggaggtatttaggcatttgagggaatctcagctttgggaggccactttgtaagtgatcttaagagattaagtacatccttaattaaaagaaatggtaacacctc

SEQ ID NO: 114685 - DNA, 1603 bp, Homo sapiens
  Payload ID: 2408
  Gene Symbol: CASP10
  Gene Name: caspase 10, apoptosis-related cysteine peptidase
  Uniprot ID: Q92851
  ENST ID: ENST00000448480
  CDS Start-End: 122-1558
gcttctttggaccttggagcacacagaggattctactttctttaaaactttgttttcaggcaatttccctgagaaccgtttacttccagaagattggtggagcttgatctgaaggctggccatgaaatctcaaggtcaacattggtattccagttcagataaaaactgtaaagtgagctttcgtgagaagcttctgattattgattcaaacctgggggtccaagatgtggagaacctcaagtttctctgcataggattggtccccaacaagaagctggagaagtccagctcagcctcagatgtttttgaacatctcttggcagaggatctgctgagtgaggaagaccctttcttcctggcagaactcctctatatcatacggcagaagaagctgctgcagcacctcaactgtaccaaagaggaagtggagcgactgctgcccacccgacaaagggtttctctgtttagaaacctgctctacgaactgtcagaaggcattgactcagagaacttaaaggacatgatcttccttctgaaagactcgcttcccaaaactgaaatgacctccctaagtttcctggcatttctagagaaacaaggtaaaatagatgaagataatctgacatgcctggaggacctctgcaaaacagttgtacctaaacttttgagaaacatagagaaatacaaaagagagaaagctatccagatagtgacacctcctgtagacaaggaagccgagtcgtatcaaggagaggaagaactagtttcccaaacagatgttaagacattcttggaagccttaccgagggcagctgtgtacaggatgaatcggaaccacagaggcctctgtgtcattgtcaacaaccacagctttacctccctgaaggacagacaaggaacccataaagatgctgagatcctgagtcatgtgttccagtggcttgggttcacagtgcatatacacaataatgtgacgaaagtggaaatggagatggtcctgcagaagcagaagtgcaatccagcccatgccgacggggactgcttcgtgttctgtattctgacccatgggagatttggagctgtctactcttcggatgaggccctcattcccattcgggagatcatgtctcacttcacagccctgcagtgccctagactggctgaaaaacctaaactctttttcatccaggcctgccaaggtgaagagatacagccttccgtatccatcgaagcagatgctctgaaccctgagcaggcacccacttccctgcaggacagtattcctgccgaggctgacttcctacttggtctggccactgtcccaggctatgtatcctttcggcatgtggaggaaggcagctggtatattcagtctctgtgtaatcatctgaagaaattggtcccaaggatgctgaaatttctggaaaagacaatggaaatcaggggcaggaagagaacagtgtggggtgctaaacagatctcagcaacctccctgcccacggccatctctgcgcagacacctcgaccccccatgcgcaggtggagcagcgtttcctagttctttccagaggcttccttctgcctgccttccagccacatcgcc

SEQ ID NO: 114686 - DNA, 888 bp, Homo sapiens
  Payload ID: 2408
  Gene Symbol: CASP10
  Gene Name: caspase 10, apoptosis-related cysteine peptidase
  ENST ID: ENST00000438843
  CDS Start-End: 176-532
agttttcacttaaacaaccagcaagtcttgaagtctcttcccaagcaaatgggagcttctttggaccttggagcacacagaggattctactttctttaaaactttgttttcaggcaatttccctgagaaccgtttacttccagaagattggtggagcttgatctgaaggctggccatgaaatctcaaggtcaacattggtattccagttcagataaaaactgtaaagtgagctttcgtgagaagcttctgattattgattcaaacctgggggtccaagatgtggagaacctcaagtttctctgcataggattggtccccaacaagaagctggagaagtccagctcagcctcagatgtttttgaacatctcttggcagaggatctgctgagtgaggaagaccctttcttcctggcagaactcctctatatcatacggcagaagaagctgctgcagcacctcaactgtaccaaagaggaagtggagcgactgctgcccacccgacaaagggtttctctgtttagacctccctaagtttcctggcatttctagagaaacaaggtaaaatagatgaagataatctgacatgcctggaggacctctgcaaaacagttgtacctaaacttttgagaaacatagagaaatacaaaagagagaaagctatccagatagtgacacctcctgtagacaaggaagccgagtcgtatcaaggagaggaagaactagtttcccaaacagatgttaagacattcttggaagccttaccgcaggagtcctggcaaaataagcatgcaggtagtaatgagggcagctgtgtacaggatgaatcggaaccacagaggcctctgtgtcattgtcaacaaccacagctttacctccctgaaggacag

SEQ ID NO: 114687 - DNA, 1166 bp, Homo sapiens
  Payload ID: 2409
  Gene Symbol: CASP12
  Gene Name: caspase 12 (gene/pseudogene)
  Uniprot ID: Q6UXS9
  ENST ID: ENST00000458137
  CDS Start-End: 257-763
gtgtacatgatttcattctgttcactttgttatgtcaaaaagaagaaaacaccttctgcttcctattttccaaaggaaagcagttatacacgagatcagagtctaattttatcttggcaaagaaaaagagaatttgaggactgggaattttccattcagggtaatatcaacaagctggtccactgagaggagagcaagcctgttgaaattgtttttgctttcacagctttttcctgtccggggagcaggagaagccatggctgatgagaaaccatccaacggtgttctggtccacatggtgaagttgctgatcaagacctttctagatggcatttttgatgatttgatggaaaataatgtgttaaatacagatgagatacaccttataggaaaatgtctaaagtttgtggtgagcaatgctgaaaacctggttgatgatatcactgagacagctcaaattgcaggcaaaatatttagggaacacctgtggaattccaaaaaacagctgagttcagcttttctggaaatccagggtgcccaacccagtggcaagttaaagctttgtcctcatgctcacttccatgaactaaagacaaaaagggcagatgagatatatccagtgatggagaaagagaggcgaacatgcctggcctcaacatccgcaacaaagaattcaactatcttcataatcgaaatggttctgaacttgaccttttggggatgtgagatctacttgaaaaccttggatactcagtggttataaaagagaatctcacagctcagatggtgctgggattgtttggttcaccactgacagtggaaaagccagtgcagatactcatggtcggctcttgcaaggtaacatctgtaatgatgctgttacaaaggctcatgtggaaaaggacttcattgctttcaaatcttccacaccacataatgtttcttggagacatgaaacaaatggctctgtcttcatttcccaaattatctactacttcagagagtattcttggagtcatcatctagaggaaatttttcaaaaggttcaacattcatttgagaccccaaatatactgacccagctgcccaccattgaaagactatccatgacacgatatttctatctctttcctgggaattaaaactcataagaagcaactcaggta

SEQ ID NO: 114688 - DNA, 961 bp, Homo sapiens
  Payload ID: 2409
  Gene Symbol: CASP12
  Gene Name: caspase 12 (gene/pseudogene)
  ENST ID: ENST00000494737
  CDS Start-End: 257-937
gtgtacatgatttcattctgttcactttgttatgtcaaaaagaagaaaacaccttctgcttcctattttccaaaggaaagcagttatacacgagatcagagtctaattttatcttggcaaagaaaaagagaatttgaggactgggaattttccattcagggtaatatcaacaagctggtccactgagaggagagcaagcctgttgaaattgtttttgctttcacagctttttcctgtccggggagcaggagaagccatggctgatgagaaaccatccaacggtgttctggtccacatggtgaagttgctgatcaagacctttctagatggcatttttgatgatttgatggaaaataatgtgttaaatacagatgagatacaccttataggaaaatgtctaaagtttgtggtgagcaatgctgaaaacctggttgatgatatcactgagacagctcaaattgcaggcaaaatatttagggaacacctgtggaattccaaaaaacagctgagttcagatatatccagtgatggagaaagagaggcgaacatgcctggcctcaacatccgcaacaaagaattcaactatcttcataatcgaaatggttctgaacttgaccttttggggatgtgagatctacttgaaaaccttggatactcagtggttataaaagagaatctcacagctcagatggtgctgggattgtttggttcaccactgacagtggaaaagccagtgcagatactcatggtcggctcttgcaaggtaacatctgtaatgatgctgttacaaaggctcatgtggaaaaggacttcattgctttcaaatcttccacaccacgttcaacattcatttgagaccccaaatatactgacccagctgcccaccattgaaagactatccatgacacgatatttctatctctttcctgggaattaaaactcataagaagcaactcaggta

SEQ ID NO: 114689 - DNA, 1071 bp, Homo sapiens
  Payload ID: 2409
  Gene Symbol: CASP12
  Gene Name: caspase 12 (gene/pseudogene)
  ENST ID: ENST00000448103
  CDS Start-End: 257-931
gtgtacatgatttcattctgttcactttgttatgtcaaaaagaagaaaacaccttctgcttcctattttccaaaggaaagcagttatacacgagatcagagtctaattttatcttggcaaagaaaaagagaatttgaggactgggaattttccattcagggtaatatcaacaagctggtccactgagaggagagcaagcctgttgaaattgtttttgctttcacagctttttcctgtccggggagcaggagaagccatggctgatgagaaaccatccaacggtgttctggtccacatggtgaagttgctgatcaagacctttctagatggcatttttgatgatttgatggaaaataatgtgttaaatacagatgagatacaccttataggaaaatgtctaaagtttgtggtgagcaatgctgaaaacctggttgatgatatcactgagacagctcaaattgcaggcaaaatatttagggaacacctgtggaattccaaaaaacagctgagttcagatatatccagtgatggagaaagagaggcgaacatgcctggcctcaacatccgcaacaaagaattcaactatcttcataatcgaaatggttctgaacttgaccttttggggatgtgagatctacttgaaaaccttggatactcagtggttataaaagagaatctcacagctcagatggtgctgggattgtttggttcaccactgacagtggaaaagccagtgcagatactcatggtcggctcttgcaaggtaacatctgtaatgatgctgttacaaaggctcatgtggaaaaggacttcattgctttcaaatcttccacaccacataatgtttcttggagacatgaaacaaatggctctgtcttcatttcccaaattatctactacttcagagagtattcttggagtcatcatctagaggaaatttttcaaaaggttcaacattcatttgagaccccaaatatactgacccagctgcccaccattgaaagactatccatgacacgatatttctatctctttcctgggaattaaaactcataagaagcaactcaggta

SEQ ID NO: 114690 - DNA, 1168 bp, Homo sapiens
  Payload ID: 2409
  Gene Symbol: CASP12
  Gene Name: caspase 12 (gene/pseudogene)
  ENST ID: ENST00000441710
  CDS Start-End: 257-1144
gtgtacatgatttcattctgttcactttgttatgtcaaaaagaagaaaacaccttctgcttcctattttccaaaggaaagcagttatacacgagatcagagtctaattttatcttggcaaagaaaaagagaatttgaggactgggaattttccattcagggtaatatcaacaagctggtccactgagaggagagcaagcctgttgaaattgtttttgctttcacagctttttcctgtccggggagcaggagaagccatggctgatgagaaaccatccaacggtgttctggtccacatggtgaagttgctgatcaagacctttctagatggcatttttgatgatttgatggaaaataatgtgttaaatacagatgagatacaccttataggaaaatgtctaaagtttgtggtgagcaatgctgaaaacctggttgatgatatcactgagacagctcaaattgcaggcaaaatatttagggaacacctgtggaattccaaaaaacagctgagttcagatatatccagtgatggagaaagagaggcgaacatgcctggcctcaacatccgcaacaaagaattcaactatcttcataatcgaaatggttctgaacttgaccttttggggatgtgagatctacttgaaaaccttggatactcagtggttataaaagagaatctcacagctcaggaaatggaaacagcactaaggcagtttgctgctcacccagagcaccagtcctcagacagcacattcctggtgtttatgtcacatagcatcctgaatggaatctgtgggaccaagcactgggatcaagagccagatgttcttcacgatgacaccatctttgaaattttcaacaaccgtaactgccagagtctgaaagacaaacccaagatggtgctgggattgtttggttcaccactgacagtggaaaagccagtgcagatactcatggtcggctcttgcaaggtaacatctgtaatgatgctgttacaaaggctcatgtggaaaaggacttcattgctttcaaatcttccacaccacgttcaacattcatttgagaccccaaatatactgacccagctgcccaccattgaaagactatccatgacacgatatttctatctctttcctgggaattaaaactcataagaagcaactcaggta

SEQ ID NO: 114691 - DNA, 1306 bp, Homo sapiens
  Payload ID: 2409
  Gene Symbol: CASP12
  Gene Name: caspase 12 (gene/pseudogene)
  Uniprot ID: Q6UXS9
  ENST ID: ENST00000375726
  CDS Start-End: 257-1282
gtgtacatgatttcattctgttcactttgttatgtcaaaaagaagaaaacaccttctgcttcctattttccaaaggaaagcagttatacacgagatcagagtctaattttatcttggcaaagaaaaagagaatttgaggactgggaattttccattcagggtaatatcaacaagctggtccactgagaggagagcaagcctgttgaaattgtttttgctttcacagctttttcctgtccggggagcaggagaagccatggctgatgagaaaccatccaacggtgttctggtccacatggtgaagttgctgatcaagacctttctagatggcatttttgatgatttgatggaaaataatgtgttaaatacagatgagatacaccttataggaaaatgtctaaagtttgtggtgagcaatgctgaaaacctggttgatgatatcactgagacagctcaaattgcaggcaaaatatttagggaacacctgtggaattccaaaaaacagctgagttcagatatatccagtgatggagaaagagaggcgaacatgcctggcctcaacatccgcaacaaagaattcaactatcttcataatcgaaatggttctgaacttgaccttttggggatgtgagatctacttgaaaaccttggatactcagtggttataaaagagaatctcacagctcaggaaatggaaacagcactaaggcagtttgctgctcacccagagcaccagtcctcagacagcacattcctggtgtttatgtcacatagcatcctgaatggaatctgtgggaccaagcactgggatcaagagccagatgttcttcacgatgacaccatctttgaaattttcaacaaccgtaactgccagagtctgaaagacaaacccaaggtcatcatcatgcaagcctgccgaggcaatggtgctgggattgtttggttcaccactgacagtggaaaagccagtgcagatactcatggtcggctcttgcaaggtaacatctgtaatgatgctgttacaaaggctcatgtggaaaaggacttcattgctttcaaatcttccacaccacataatgtttcttggagacatgaaacaaatggctctgtcttcatttcccaaattatctactacttcagagagtattcttggagtcatcatctagaggaaatttttcaaaaggttcaacattcatttgagaccccaaatatactgacccagctgcccaccattgaaagactatccatgacacgatatttctatctctttcctgggaattaaaactcataagaagcaactcaggta

SEQ ID NO: 114692 - DNA, 1401 bp, Homo sapiens
  Payload ID: 2409
  Gene Symbol: CASP12
  Gene Name: caspase 12 (gene/pseudogene)
  Uniprot ID: Q6UXS9
  ENST ID: ENST00000417998
  CDS Start-End: 257-763
gtgtacatgatttcattctgttcactttgttatgtcaaaaagaagaaaacaccttctgcttcctattttccaaaggaaagcagttatacacgagatcagagtctaattttatcttggcaaagaaaaagagaatttgaggactgggaattttccattcagggtaatatcaacaagctggtccactgagaggagagcaagcctgttgaaattgtttttgctttcacagctttttcctgtccggggagcaggagaagccatggctgatgagaaaccatccaacggtgttctggtccacatggtgaagttgctgatcaagacctttctagatggcatttttgatgatttgatggaaaataatgtgttaaatacagatgagatacaccttataggaaaatgtctaaagtttgtggtgagcaatgctgaaaacctggttgatgatatcactgagacagctcaaattgcaggcaaaatatttagggaacacctgtggaattccaaaaaacagctgagttcagcttttctggaaatccagggtgcccaacccagtggcaagttaaagctttgtcctcatgctcacttccatgaactaaagacaaaaagggcagatgagatatatccagtgatggagaaagagaggcgaacatgcctggcctcaacatccgcaacaaagaattcaactatcttcataatcgaaatggttctgaacttgaccttttggggatgtgagatctacttgaaaaccttggatactcagtggttataaaagagaatctcacagctcaggaaatggaaacagcactaaggcagtttgctgctcacccagagcaccagtcctcagacagcacattcctggtgtttatgtcacatagcatcctgaatggaatctgtgggaccaagcactgggatcaagagccagatgttcttcacgatgacaccatctttgaaattttcaacaaccgtaactgccagagtctgaaagacaaacccaaggtcatcatcatgcaagcctgccgaggcaatggtgctgggattgtttggttcaccactgacagtggaaaagccagtgcagatactcatggtcggctcttgcaaggtaacatctgtaatgatgctgttacaaaggctcatgtggaaaaggacttcattgctttcaaatcttccacaccacataatgtttcttggagacatgaaacaaatggctctgtcttcatttcccaaattatctactacttcagagagtattcttggagtcatcatctagaggaaatttttcaaaaggttcaacattcatttgagaccccaaatatactgacccagctgcccaccattgaaagactatccatgacacgatatttctatctctttcctgggaattaaaactcataagaagcaactcaggta

SEQ ID NO: 114693 - DNA, 1196 bp, Homo sapiens
  Payload ID: 2409
  Gene Symbol: CASP12
  Gene Name: caspase 12 (gene/pseudogene)
  ENST ID: ENST00000446862
  CDS Start-End: 257-1090
gtgtacatgatttcattctgttcactttgttatgtcaaaaagaagaaaacaccttctgcttcctattttccaaaggaaagcagttatacacgagatcagagtctaattttatcttggcaaagaaaaagagaatttgaggactgggaattttccattcagggtaatatcaacaagctggtccactgagaggagagcaagcctgttgaaattgtttttgctttcacagctttttcctgtccggggagcaggagaagccatggctgatgagaaaccatccaacggtgttctggtccacatggtgaagttgctgatcaagacctttctagatggcatttttgatgatttgatggaaaataatgtgttaaatacagatgagatacaccttataggaaaatgtctaaagtttgtggtgagcaatgctgaaaacctggttgatgatatcactgagacagctcaaattgcaggcaaaatatttagggaacacctgtggaattccaaaaaacagctgagttcagatatatccagtgatggagaaagagaggcgaacatgcctggcctcaacatccgcaacaaagaattcaactatcttcataatcgaaatggttctgaacttgaccttttggggatgtgagatctacttgaaaaccttggatactcagtggttataaaagagaatctcacagctcaggaaatggaaacagcactaaggcagtttgctgctcacccagagcaccagtcctcagacagcacattcctggtgtttatgtcacatagcatcctgaatggaatctgtgggaccaagcactgggatcaagagccagatgttcttcacgatgacaccatctttgaaattttcaacaaccgtaactgccagagtctgaaagacaaacccaaggtcatcatcatgcaagcctgccgaggcaatggtgctgggattgtttggttcaccactgacagtggaaaagccagtgcagatactcatggtcggctcttgcaaggtaacatctgtaatgatgctgttacaaaggctcatgtggaaaaggacttcattgctttcaaatcttccacaccacgttcaacattcatttgagaccccaaatatactgacccagctgcccaccattgaaagactatccatgacacgatatttctatctctttcctgggaattaaaactcataagaagcaactcaggta

SEQ ID NO: 114694 - DNA, 819 bp, Homo sapiens
  Payload ID: 2409
  Gene Symbol: CASP12
  Gene Name: caspase 12 (gene/pseudogene)
  ENST ID: ENST00000447913
  CDS Start-End: 257-679
gtgtacatgatttcattctgttcactttgttatgtcaaaaagaagaaaacaccttctgcttcctattttccaaaggaaagcagttatacacgagatcagagtctaattttatcttggcaaagaaaaagagaatttgaggactgggaattttccattcagggtaatatcaacaagctggtccactgagaggagagcaagcctgttgaaattgtttttgctttcacagctttttcctgtccggggagcaggagaagccatggctgatatatccagtgatggagaaagagaggcgaacatgcctggcctcaacatccgcaacaaagaattcaactatcttcataatcgaaatggttctgaacttgaccttttggggatgtgagatctacttgaaaaccttggatactcagtggttataaaagagaatctcacagctcagatggtgctgggattgtttggttcaccactgacagtggaaaagccagtgcagatactcatggtcggctcttgcaaggtaacatctgtaatgatgctgttacaaaggctcatgtggaaaaggacttcattgctttcaaatcttccacaccacataatgtttcttggagacatgaaacaaatggctctgtcttcatttcccaaattatctactacttcagagagtattcttggagtcatcatctagaggaaatttttcaaaaggttcaacattcatttgagaccccaaatatactgacccagctgcccaccattgaaagactatccatgacacgatatttctatctctttcctgggaattaaaactcataagaagcaactcaggta

SEQ ID NO: 114695 - DNA, 774 bp, Homo sapiens
  Payload ID: 2409
  Gene Symbol: CASP12
  Gene Name: caspase 12 (gene/pseudogene)
  Uniprot ID: Q6UXS9
  ENST ID: ENST00000508062
  CDS Start-End: 1-774
atggctgatatatccagtgatggagaaagagaggcgaacatgcctggcctcaacatccgcaacaaagaattcaactatcttcataatcgaaatggttctgaacttgaccttttggggatgtgagatctacttgaaaaccttggatactcagtggttataaaagagaatctcacagctcaggaaatggaaacagcactaaggcagtttgctgctcacccagagcaccagtcctcagacagcacattcctggtgtttatgtcacatagcatcctgaatggaatctgtgggaccaagcactgggatcaagagccagatgttcttcacgatgacaccatctttgaaattttcaacaaccgtaactgccagagtctgaaagacaaacccaaggtcatcatcatgcaagcctgccgaggcaatggtgctgggattgtttggttcaccactgacagtggaaaagccagtgcagatactcatggtcggctcttgcaaggtaacatctgtaatgatgctgttacaaaggctcatgtggaaaaggacttcattgctttcaaatcttccacaccacataatgtttcttggagacatgaaacaaatggctctgtcttcatttcccaaattatctactacttcagagagtattcttggagtcatcatctagaggaaatttttcaaaaggttcaacattcatttgagaccccaaatatactgacccagctgcccaccattgaaagactatccatgacacgatatttctatctctttcctgggaattaa

SEQ ID NO: 114696 - DNA, 1685 bp, Homo sapiens
  Payload ID: 2409
  Gene Symbol: CASP12
  Gene Name: caspase 12 (gene/pseudogene)
  Uniprot ID: Q6UXS9
  ENST ID: ENST00000422698
  CDS Start-End: 257-1279
gtgtacatgatttcattctgttcactttgttatgtcaaaaagaagaaaacaccttctgcttcctattttccaaaggaaagcagttatacacgagatcagagtctaattttatcttggcaaagaaaaagagaatttgaggactgggaattttccattcagggtaatatcaacaagctggtccactgagaggagagcaagcctgttgaaattgtttttgctttcacagctttttcctgtccggggagcaggagaagccatggctgatgagaaaccatccaacggtgttctggtccacatggtgaagttgctgatcaagacctttctagatggcatttttgatgatttgatggaaaataatgtgttaaatacagatgagatacaccttataggaaaatgtctaaagtttgtggtgagcaatgctgaaaacctggttgatgatatcactgagacagctcaaattgcaggcaaaatatttagggaacacctgtggaattccaaaaaacagctgagttcagatatatccagtgatggagaaagagaggcgaacatgcctggcctcaacatccgcaacaaagaattcaactatcttcataatcgaaatggttctgaacttgaccttttggggatggatctacttgaaaaccttggatactcagtggttataaaagagaatctcacagctcaggaaatggaaacagcactaaggcagtttgctgctcacccagagcaccagtcctcagacagcacattcctggtgtttatgtcacatagcatcctgaatggaatctgtgggaccaagcactgggatcaagagccagatgttcttcacgatgacaccatctttgaaattttcaacaaccgtaactgccagagtctgaaagacaaacccaaggtcatcatcatgcaagcctgccgaggcaatggtgctgggattgtttggttcaccactgacagtggaaaagccagtgcagatactcatggtcggctcttgcaaggtaacatctgtaatgatgctgttacaaaggctcatgtggaaaaggacttcattgctttcaaatcttccacaccacataatgtttcttggagacatgaaacaaatggctctgtcttcatttcccaaattatctactacttcagagagtattcttggagtcatcatctagaggaaatttttcaaaaggttcaacattcatttgagaccccaaatatactgacccagctgcccaccattgaaagactatccatgacacgatatttctatctctttcctgggaattaaaactcataagaagcaactcaggaaaatgaaggcattatggtgtctatgaatctgctattagaaaaggtcaatttttgattaagaatatttttataccaaactgctcagctgtccaccttttcaaataccaggctaaaatcaatctcatatttttgctaaattaatgcttaataaatttttattataaaattgtgcttgttttctaattttgtcataaattaagtcatgcttataggagaaaaaattaagtattaaaaatcataaaaaatgaagaaataatcatcatcaacctttttaaaactattcataaaaactcaagttttttatatagcttatttattttgtatatccaattttgtgtgcttttattatattgttataacattactactagtaataaaactat

SEQ ID NO: 114697 - DNA, 709 bp, Homo sapiens
  Payload ID: 2409
  Gene Symbol: CASP12
  Gene Name: caspase 12 (gene/pseudogene)
  ENST ID: ENST00000433738
  CDS Start-End: 257-685
gtgtacatgatttcattctgttcactttgttatgtcaaaaagaagaaaacaccttctgcttcctattttccaaaggaaagcagttatacacgagatcagagtctaattttatcttggcaaagaaaaagagaatttgaggactgggaattttccattcagggtaatatcaacaagctggtccactgagaggagagcaagcctgttgaaattgtttttgctttcacagctttttcctgtccggggagcaggagaagccatggctgatatatccagtgatggagaaagagaggcgaacatgcctggcctcaacatccgcaacaaagaattcaactatcttcataatcgaaatggttctgaacttgaccttttggggatgtgagatctacttgaaaaccttggatactcagtggttataaaagagaatctcacagctcagatggtgctgggattgtttggttcaccactgacagtggaaaagccagtgcagatactcatggtcggctcttgcaaggtaacatctgtaatgatgctgttacaaaggctcatgtggaaaaggacttcattgctttcaaatcttccacaccacgttcaacattcatttgagaccccaaatatactgacccagctgcccaccattgaaagactatccatgacacgatatttctatctctttcctgggaattaaaactcataagaagcaactcaggta

SEQ ID NO: 114698 - DNA, 1451 bp, Homo sapiens
  Payload ID: 2409
  Gene Symbol: CASP12
  Gene Name: caspase 12 (gene/pseudogene)
  ENST ID: ENST00000613512
  CDS Start-End: 20-1045
ccggggagcaggagaagccatggctgatgagaaaccatccaacggtgttctggtccacatggtgaagttgctgatcaagacctttctagatggcatttttgatgatttgatggaaaataatgtgttaaatacagatgagatacaccttataggaaaatgtctaaagtttgtggtgagcaatgctgaaaacctggttgatgatatcactgagacagctcaaattgcaggcaaaatatttagggaacacctgtggaattccaaaaaacagctgagttcagatatatccagtgatggagaaagagaggcgaacatgcctggcctcaacatccgcaacaaagaattcaactatcttcataatcgaaatggttctgaacttgaccttttggggatgtgagatctacttgaaaaccttggatactcagtggttataaaagagaatctcacagctcaggaaatggaaacagcactaaggcagtttgctgctcacccagagcaccagtcctcagacagcacattcctggtgtttatgtcacatagcatcctgaatggaatctgtgggaccaagcactgggatcaagagccagatgttcttcacgatgacaccatctttgaaattttcaacaaccgtaactgccagagtctgaaagacaaacccaaggtcatcatcatgcaagcctgccgaggcaatggtgctgggattgtttggttcaccactgacagtggaaaagccagtgcagatactcatggtcggctcttgcaaggtaacatctgtaatgatgctgttacaaaggctcatgtggaaaaggacttcattgctttcaaatcttccacaccacataatgtttcttggagacatgaaacaaatggctctgtcttcatttcccaaattatctactacttcagagagtattcttggagtcatcatctagaggaaatttttcaaaaggttcaacattcatttgagaccccaaatatactgacccagctgcccaccattgaaagactatccatgacacgatatttctatctctttcctgggaattaaaactcataagaagcaactcaggaaaatgaaggcattatggtgtctatgaatctgctattagaaaaggtcaatttttgattaagaatatttttataccaaactgctcagctgtccaccttttcaaataccaggctaaaatcaatctcatatttttgctaaattaatgcttaataaatttttattataaaattgtgcttgttttctaattttgtcataaattaagtcatgcttataggagaaaaaattaagtattaaaaatcataaaaaatgaagaaataatcatcatcaacctttttaaaactattcataaaaactcaagttttttatatagcttatttattttgtatatccaattttgtgtgcttttattatattgttataacattactactagtaataaaactat

SEQ ID NO: 114699 - DNA, 3241 bp, Homo sapiens
  Payload ID: 2410
  Gene Symbol: CASP14
  Gene Name: caspase 14, apoptosis-related cysteine peptidase
  Uniprot ID: P31944
  ENST ID: ENST00000427043
  CDS Start-End: 309-1037
acaccacagctgtgtgccaagggtgtgtcatgaggtttcttgagtgacagaaaactcaccgacaataaagggccaggtgattgtgccacccgattcatagaccaggcttctcaggagaaaccccgggagattccacactgtcagccccttctccaagatcagtacgtgggcctgactcctcctcggtgcccagctcagtattggcaactaggagagtagtgagattgaacttggccttgaggaacagctgcctctagagttggatcagacaagggtgctgagagccgggactcacaaccaaaggagaaatgagcaatccgcggtctttggaagaggagaaatatgatatgtcaggtgcccgcctggccctaatactgtgtgtcaccaaagcccgggaaggttccgaagaagacctggatgctctggaacacatgtttcggcagctgagattcgaaagcaccatgaaaagagaccccactgccgagcaattccaggaagagctggaaaaattccagcaggccatcgattcccgggaagatcccgtcagttgtgccttcgtggtactcatggctcacgggagggaaggcttcctcaagggagaagatggggagatggtcaagctggagaatctcttcgaggccctgaacaacaagaactgccaggccctgcgagctaagcccaaggtgtacatcatacaggcctgtcgaggagaacaaagggaccccggtgaaacagtaggtggagatgagattgtgatggtcatcaaagacagcccacaaaccatcccaacatacacagatgccttgcacgtttattccacggtagagggatacatcgcctaccgacatgatcagaaaggctcatgctttatccagaccctggtggatgtgttcacgaagaggaaaggacatatcttggaacttctgacagaggtgacccggcggatggcagaagcagagctggttcaagaaggaaaagcaaggaaaacgaaccctgaaatccaaagcaccctccggaaacggctgtatctgcagtagaagtagaaagaccaggaggagctttccttccagcattctttctgtctcacagaaatttagaggcagctcttacctctccccaagatcttctgttcccaaggccaaatggcacccagtttcttttccatcacacccttcatgcaggtcctcctgtccttattagagcaagccagccaaaacttagcacaaggcatggtggcaacattaacatcacctccctcaggctggactttctatctttattaatgcaaccgaagagacctaagagtgcattcacttatcccactttctgttcctgtggtcttctttctcccatgaagcagaaactggataaagctcaagattttccatagacaaaccaaagcccactcatcccctcctaccccaatccaacctctgctggctcctgcatctcacttggaggtcaaacctcctcctgaggccaatgcattcccaacttccagttctttcctttaccctggagagttagtaaggtaagaaccattctttctctccaaaaccactcctccttggctggcaagttggtgtcctaactccgttctcttcctagctcatggcctctctagataataaagttgtctcctcctttctggatctcttcctcctaacacccctcccctgaaaccctggactctgccctctctccaagaaaatccatctattcaactattcttgcattcaattactctaaatgagagcgtgttggagctatggcaaattccctgttgtcaccttgctattttgcagacaacataatatttaacctctcataaccagagaggttaaataatttgtcaaatgcaatacagtaagacagaggcaaggacaaggtttgacttccagcccagcctcttttccacaacctgctaaatcctgatccatctgaaaacttttctaattagtgaagatgactaataaaaattttccctatctccaaggtaggagctttctggaagtttctagaaattttcaataaccaccagccaaggttacctccaggtaaccttgcagcaccaggctggaagtcagatcggcttcactatcttccaactctacagcctgtatctctccatccccagctttgacctttcctgctcaagtaacctacgggcacatccagcgtcactaaaaactcagggcttttcttcccggttactcctccaagcgttccctggtatcctcaacctcagatcccaggttcagatttctgcagtcaatctatgacccctctcttcttgcatccttcatatgccaccagacaccatgcccagtccagcctgattttgaaacaactttcatgccggtcttctcttccctgacatgttactgtccaggctcaagtcctcagcttctcatatctgcatctttgcaaccaacttcctcccttgcctctctgcttttccatcccacttttcatgtgtcctccataccatctataacagtgatctccctggaacactcaagaagacacaacataccatattatttaaagaccagggtactggacagtggctcacacctgtattcccgactttgagagtctgaagcgggaggatcacttgaggccaggagttaagagaccagcctgggcaacacagcaagaccctgtctctaaaaaaaaaaattaattaactgggtatggtggcacatgcctgtagtcccagctactcaggaggctgaggtgggaggatgacttgagcccaggagtttgaggctgcaaggagctatgatcatgccagtgcatcccagctctaggtgagacagtgagatccggtctccaaaataaatcaatcaatcaaataaagaccaaagtcaaaccgcacatcaggatctctcacacccttccaattttgccatctaccagcacttagctaaacccatctcccatctcttccaccatgaattcactctttcaaaaaggctaatgtcttcttactcacccttgcctctaagcctttgctatcaccatttcccccaagctggagggccctccctctccctttacccctcttccactacctcccacccctactttttccagaaagccatttcctctcttttttctgattgatccttccctctcacccaggattagatgctggaaatgaccacttctggagggcagggaacaagcccttaatctgcataatgagtgttcaataaacagttgtcaaactttgaaa

SEQ ID NO: 114700 - DNA, 4225 bp, Homo sapiens
  Payload ID: 2411
  Gene Symbol: CASP2
  Gene Name: caspase 2, apoptosis-related cysteine peptidase
  Uniprot ID: P42575
  ENST ID: ENST00000310447
  CDS Start-End: 242-1600
cttttgtctgtccgccgagcaccccacttcaccccattggaccgcgcggccgccgctagagctctgcgcctgcgcacgcaccgggccggggactgggtggcctggtgtgtgggcgcggcagggcgcaggcgcaggcgcagtgtgcgtccgcgtctgaggggagggatgtgggggaagcgacggcccccggtttgtttgggctgtgggcggtgcgcagcggagagcccgggaaaagcgggaaatggcggcgccgagcgcggggtcttggtccaccttccagcacaaggagctgatggccgctgacaggggacgcaggatattgggagtgtgtggcatgcatcctcatcatcaggaaactctaaaaaagaaccgagtggtgctagccaaacagctgttgttgagcgaattgttagaacatcttctggagaaggacatcatcaccttggaaatgagggagctcatccaggccaaagtgggcagtttcagccagaatgtggaactcctcaacttgctgcctaagaggggtccccaagcttttgatgccttctgtgaagcactgagggagaccaagcaaggccacctggaggatatgttgctcaccaccctttctgggcttcagcatgtactcccaccgttgagctgtgactacgacttgagtctcccttttccggtgtgtgagtcctgtcccctttacaagaagctccgcctgtcgacagatactgtggaacactccctagacaataaagatggtcctgtctgccttcaggtgaagccttgcactcctgaattttatcaaacacacttccagctggcatataggttgcagtctcggcctcgtggcctagcactggtgttgagcaatgtgcacttcactggagagaaagaactggaatttcgctctggaggggatgtggaccacagtactctagtcaccctcttcaagcttttgggctatgacgtccatgttctatgtgaccagactgcacaggaaatgcaagagaaactgcagaattttgcacagttacctgcacaccgagtcacggactcctgcatcgtggcactcctctcgcatggtgtggagggcgccatctatggtgtggatgggaaactgctccagctccaagaggtttttcagctctttgacaacgccaactgcccaagcctacagaacaaaccaaaaatgttcttcatccaggcctgccgtggagatgagactgatcgtggggttgaccaacaagatggaaagaaccacgcaggatcccctgggtgcgaggagagtgatgccggtaaagaaaagttgccgaagatgagactgcccacgcgctcagacatgatatgcggctatgcctgcctcaaagggactgccgccatgcggaacaccaaacgaggttcctggtacatcgaggctcttgctcaagtgttttctgagcgggcttgtgatatgcacgtggccgacatgctggttaaggtgaacgcacttatcaaggatcgggaaggttatgctcctggcacagaattccaccggtgcaaggagatgtctgaatactgcagcactctgtgccgccacctctacctgttcccaggacaccctcccacatgatgtcacctccccatcatccacgccaagtggaagccactggaccacaggaggtgtgatagagcctttgatcttcaggatgcacggtttctgttctgccccctcagggatgtgggaatctcccagacttgtttcctgtgcccatcatctctgcctttgagtgtgggactccaggccagctccttttctgtgaagccctttgcctgtagagccagccttggttggacctattgccaggaatgtttcagctgcagttgaagagcctgacaagtgaagttgtaaacacagtgtggttatggggagagggcatataaattccccatatttgtgttcagttccagcttttgtagatggcactttagtgattgcttttattacattagttaagatgtctgagagaccatctcctatcttttatttcattcatatcctccgccctttttgtcctagagtgagagtttggaaggtgtccaaatttaatgtagacattatcttttggctctgaagaagcaaacatgactagagacgcaccttgctgcagtgtccagaagcggcctgtgcgttcccttcagtactgcagcgccacccagtggaaggacactcttggctcgtttgggctcaaggcaccgcagcctgtcagccaacattgccttgcatttgtaccttattgatctttgcccatggaagtctcaaagatctttcgttggttgtttctctgagctttgttactgaaatgagcctcgtggggagcatcagagaaggccaggaagaatggtgtgtttccctagactctgtaaccacctctctgtctttttccttcctgagaaacgtccatctctctcccttactattcccactttcattcaatcaacctgcacttcatatctagatttctagaaaagcttcctagcttatctccctgcttcatatctctcccttctttaccttcatttcatcctgttggctgctgccaccaaatctgtctagaatcctgctttacaggatcatgtaaatgctcaaagatgtaatgtagttctttgttcctgctttctctttcagtattaaactctcctttgatattatgtggcttttatttcagtgccatacatgttattgttttcaacctagaaacctttatccctgcttatctgaaacttcccaacttccctgttctttaagactttttttttttttttttttttttttgagacagagtctcgctctgtcgcccaggctggagggcagtggcacgatctcagctcactgcaagctccaactcccgggttcacgccattctcctgcctcagccttccaagtagctgggactacaggtgcccgccaccgtgcccggctaatttttttgtatttttagtagagacagggtttcaccatgttagccgggatggtcttgatctcctgacctcatgatccacccacctcagcctcccaaagtgttgggattacaggcgtgagccactgcgcccgggcaagacctttttttaaaaaaaaaaaaaaaaaaacttccattctttcttcctccagtctgttctcacataacagagtagttttggtttttaattttttttggttgtttgctgttttttgttttttaaggtgagttctcactatgtttctcagactggtctcgaactcctggcctcaagccatcttcccgcctcagcctctcaaatagctgggcttacaggcatgagccaccacacctggccaggatttggttgtttaaatataaatctgatcacccccctgcttagaacccttctgctttctattacccctcatttaaaatgtaaactcttcaccttggtttatgagaactggttcttgccttccccttgaacctcattaaatggtgatttcttgctaagctccagcccgagtggtctcctctcagcttctaattttgtgctctttcctgcccttttcctgggccttctcagctctccacccccaccactcttgactcaggtggtgtccttcttcctcaagtcttgacaattcccgggcccttcagtccctgagcagtctacttctgtgtctgtcaccacatcttgtcttttcccctcattgcatttattgcagtttatatatatgctacttttacttgttcatttctgtctcccctaccaggctgtaaatgagggcagaaaccttgtttgttttattcaccatcatgtaccaagtgcttggcacatagtgggccttcattaaatgtttgttgaataaaagagggaagaaggcaagccaaccttagctacaatcctaccttttgataaaatgttccttttgacaatatacacggattattatttgtactttgtttttccatgtgttttgcttttatccactggcatttttagctccttgaagacatatcatgtgtgagataacttccttcacatctcccatggtccctagcaaaatgctaggcctgtagtagtcaaggtgctcaataaatatttgtttgggtggtttgtgagccttgctgccaagtcctgcctttgggtcgacatagtatggaagtatttgagagagagaacctttccactcccactgccaggattttgtattgccatcgggtgccaaataaatgctcatatttattactga

SEQ ID NO: 114701 - DNA, 1146 bp, Homo sapiens
  Payload ID: 2411
  Gene Symbol: CASP2
  Gene Name: caspase 2, apoptosis-related cysteine peptidase
  ENST ID: ENST00000350623
  CDS Start-End: 6-332
gggaaatggcggcgccgagcgcggggtcttggtccaccttccagcacaaggagctgatggccgctgacaggggacgcaggatattgggagtgtgtggcatgcatcctcatcatcaggaaactctaaaaaagaaccgagtggtgctagccaaacagctgttgttgagcgaattgttagaacatcttctggagaaggacatcatcaccttggaaatgagggagctcatccaggccaaagtgggcagtttcagccagaatgtggaactcctcaacttgctgcctaagaggggtccccaagcttttgatgccttctgtgaagccttgcactcctgaattttatcaaacacacttccagctggcatataggttgcagtctcggcctcgtggcctagcactggtgttgagcaatgtgcacttcactggagagaaagaactggaatttcgctctggaggggatgtggaccacagtactctagtcaccctcttcaagcttttgggctatgacgtccatgttctatgtgaccagactgcacaggaaatgcaagagaaactgcagaattttgcacagttacctgcacaccgagtcacggactcctgcatcgtggcactcctctcgcatggtgtggagggcgccatctatggtgtggatgggaaactgctccagctccaagaggtttttcagctctttgacaacgccaactgcccaagcctacagaacaaaccaaaaatgttcttcatccaggcctgccgtggagatgagactgatcgtggggttgaccaacaagatggaaagaaccacgcaggatcccctgggtgcgaggagagtgatgccggtaaagaaaagttgccgaagatgagactgcccacgcgctcagacatgatatgcggctatgcctgcctcaaagggactgccgccatgcggaacaccaaacgaggttcctggtacatcgaggctcttgctcaagtgttttctgagcgggcttgtgatatgcacgtggccgacatgctggttaaggtgaacgcacttatcaaggatcgggaaggttatgctcctggcacagaattccaccggtgcaaggagatgtctgaatactgcagcactctgtgccgccacctctacctgttcccaggacaccctcccacatga

SEQ ID NO: 114702 - DNA, 616 bp, Homo sapiens
  Payload ID: 2411
  Gene Symbol: CASP2
  Gene Name: caspase 2, apoptosis-related cysteine peptidase
  ENST ID: ENST00000392925
  CDS Start-End: 62-577
cggcccccggtttgtttgggctgtgggcggtgcgcagcggagagcccgggaaaagcgggaaatggcggcgccgagcgcggggtcttggtccaccttccagcacaaggagctgatggccgctgacaggggacgcaggatattgggagtgtgtggcatgcatcctcatcatcaggaaactctaaaaaagaaccgagtggtgctagccaaacagctgttgttgagcgaattgttagaacatcttctggagaaggacatcatcaccttggaaatgagggagctcatccaggccaaagtgggcagtttcagccagaatgtggaactcctcaacttgctgcctaagaggggtccccaagcttttgatgccttctgtgaagcactgagggagaccaagcaaggccacctggaggatatgttgctcaccaccctttctgggcttcagcatgtactcccaccgttgagctgtgactacgacttgagtctcccttttccggtgtgtgagtcctgtcccctttacaagaagctccgcctgtcgacagaaatagggtcttgttctgtcacccaggctggaatgcagtgacaccaccatagctcactgcagcgttgaactcctgggttg

SEQ ID NO: 114703 - DNA, 4006 bp, Homo sapiens
  Payload ID: 2411
  Gene Symbol: CASP2
  Gene Name: caspase 2, apoptosis-related cysteine peptidase
  ENST ID: ENST00000619992
  CDS Start-End: 242-568
cttttgtctgtccgccgagcaccccacttcaccccattggaccgcgcggccgccgctagagctctgcgcctgcgcacgcaccgggccggggactgggtggcctggtgtgtgggcgcggcagggcgcaggcgcaggcgcagtgtgcgtccgcgtctgaggggagggatgtgggggaagcgacggcccccggtttgtttgggctgtgggcggtgcgcagcggagagcccgggaaaagcgggaaatggcggcgccgagcgcggggtcttggtccaccttccagcacaaggagctgatggccgctgacaggggacgcaggatattgggagtgtgtggcatgcatcctcatcatcaggaaactctaaaaaagaaccgagtggtgctagccaaacagctgttgttgagcgaattgttagaacatcttctggagaaggacatcatcaccttggaaatgagggagctcatccaggccaaagtgggcagtttcagccagaatgtggaactcctcaacttgctgcctaagaggggtccccaagcttttgatgccttctgtgaagccttgcactcctgaattttatcaaacacacttccagctggcatataggttgcagtctcggcctcgtggcctagcactggtgttgagcaatgtgcacttcactggagagaaagaactggaatttcgctctggaggggatgtggaccacagtactctagtcaccctcttcaagcttttgggctatgacgtccatgttctatgtgaccagactgcacaggaaatgcaagagaaactgcagaattttgcacagttacctgcacaccgagtcacggactcctgcatcgtggcactcctctcgcatggtgtggagggcgccatctatggtgtggatgggaaactgctccagctccaagaggtttttcagctctttgacaacgccaactgcccaagcctacagaacaaaccaaaaatgttcttcatccaggcctgccgtggagatgagactgatcgtggggttgaccaacaagatggaaagaaccacgcaggatcccctgggtgcgaggagagtgatgccggtaaagaaaagttgccgaagatgagactgcccacgcgctcagacatgatatgcggctatgcctgcctcaaagggactgccgccatgcggaacaccaaacgaggttcctggtacatcgaggctcttgctcaagtgttttctgagcgggcttgtgatatgcacgtggccgacatgctggttaaggtgaacgcacttatcaaggatcgggaaggttatgctcctggcacagaattccaccggtgcaaggagatgtctgaatactgcagcactctgtgccgccacctctacctgttcccaggacaccctcccacatgatgtcacctccccatcatccacgccaagtggaagccactggaccacaggaggtgtgatagagcctttgatcttcaggatgcacggtttctgttctgccccctcagggatgtgggaatctcccagacttgtttcctgtgcccatcatctctgcctttgagtgtgggactccaggccagctccttttctgtgaagccctttgcctgtagagccagccttggttggacctattgccaggaatgtttcagctgcagttgaagagcctgacaagtgaagttgtaaacacagtgtggttatggggagagggcatataaattccccatatttgtgttcagttccagcttttgtagatggcactttagtgattgcttttattacattagttaagatgtctgagagaccatctcctatcttttatttcattcatatcctccgccctttttgtcctagagtgagagtttggaaggtgtccaaatttaatgtagacattatcttttggctctgaagaagcaaacatgactagagacgcaccttgctgcagtgtccagaagcggcctgtgcgttcccttcagtactgcagcgccacccagtggaaggacactcttggctcgtttgggctcaaggcaccgcagcctgtcagccaacattgccttgcatttgtaccttattgatctttgcccatggaagtctcaaagatctttcgttggttgtttctctgagctttgttactgaaatgagcctcgtggggagcatcagagaaggccaggaagaatggtgtgtttccctagactctgtaaccacctctctgtctttttccttcctgagaaacgtccatctctctcccttactattcccactttcattcaatcaacctgcacttcatatctagatttctagaaaagcttcctagcttatctccctgcttcatatctctcccttctttaccttcatttcatcctgttggctgctgccaccaaatctgtctagaatcctgctttacaggatcatgtaaatgctcaaagatgtaatgtagttctttgttcctgctttctctttcagtattaaactctcctttgatattatgtggcttttatttcagtgccatacatgttattgttttcaacctagaaacctttatccctgcttatctgaaacttcccaacttccctgttctttaagactttttttttttttttttttttttttgagacagagtctcgctctgtcgcccaggctggagggcagtggcacgatctcagctcactgcaagctccaactcccgggttcacgccattctcctgcctcagccttccaagtagctgggactacaggtgcccgccaccgtgcccggctaatttttttgtatttttagtagagacagggtttcaccatgttagccgggatggtcttgatctcctgacctcatgatccacccacctcagcctcccaaagtgttgggattacaggcgtgagccactgcgcccgggcaagacctttttttaaaaaaaaaaaaaaaaaaacttccattctttcttcctccagtctgttctcacataacagagtagttttggtttttaattttttttggttgtttgctgttttttgttttttaaggtgagttctcactatgtttctcagactggtctcgaactcctggcctcaagccatcttcccgcctcagcctctcaaatagctgggcttacaggcatgagccaccacacctggccaggatttggttgtttaaatataaatctgatcacccccctgcttagaacccttctgctttctattacccctcatttaaaatgtaaactcttcaccttggtttatgagaactggttcttgccttccccttgaacctcattaaatggtgatttcttgctaagctccagcccgagtggtctcctctcagcttctaattttgtgctctttcctgcccttttcctgggccttctcagctctccacccccaccactcttgactcaggtggtgtccttcttcctcaagtcttgacaattcccgggcccttcagtccctgagcagtctacttctgtgtctgtcaccacatcttgtcttttcccctcattgcatttattgcagtttatatatatgctacttttacttgttcatttctgtctcccctaccaggctgtaaatgagggcagaaaccttgtttgttttattcaccatcatgtaccaagtgcttggcacatagtgggccttcattaaatgtttgttgaataaaagagggaagaaggcaagccaaccttagctacaatcctaccttttgataaaatgttccttttgacaatatacacggattattatttgtactttgtttttccatgtgttttgcttttatccactggcatttttagctccttgaagacatatcatgtgtgagataacttccttcacatctcccatggtccctagcaaaatgctaggcctgtagtagtcaaggtgctcaataaatatttgtttgggtggtttgtgagccttgctgccaagtcctgcctttgggtcgacatagtatggaagtatttgagagagagaacctttccactcccactgccaggattttgtattgccatcgggtgccaaataaatgctcatatttattactg

SEQ ID NO: 114704 - DNA, 2673 bp, Homo sapiens
  Payload ID: 2412
  Gene Symbol: CASP3
  Gene Name: caspase 3, apoptosis-related cysteine peptidase
  Uniprot ID: P42574
  ENST ID: ENST00000308394
  CDS Start-End: 264-1097
acatctcccggcggcgggccgcggaagcagtgcagacgcggctcctagcggatgggtgctattgtgaggcggttgtagaagagtttcgtgagtgctcgcagctcatacctgtggctgtgtatccgtggccacagctggttggcgtcgccttgaaatcccaggccgtgaggagttagcgagccctgctcacactcggcgctctggttttcggtgggtgtgccctgcacctgcctcttcccccattctcattaataaaggtatccatggagaacactgaaaactcagtggattcaaaatccattaaaaatttggaaccaaagatcatacatggaagcgaatcaatggactctggaatatccctggacaacagttataaaatggattatcctgagatgggtttatgtataataattaataataagaattttcataaaagcactggaatgacatctcggtctggtacagatgtcgatgcagcaaacctcagggaaacattcagaaacttgaaatatgaagtcaggaataaaaatgatcttacacgtgaagaaattgtggaattgatgcgtgatgtttctaaagaagatcacagcaaaaggagcagttttgtttgtgtgcttctgagccatggtgaagaaggaataatttttggaacaaatggacctgttgacctgaaaaaaataacaaactttttcagaggggatcgttgtagaagtctaactggaaaacccaaacttttcattattcaggcctgccgtggtacagaactggactgtggcattgagacagacagtggtgttgatgatgacatggcgtgtcataaaataccagtggaggccgacttcttgtatgcatactccacagcacctggttattattcttggcgaaattcaaaggatggctcctggttcatccagtcgctttgtgccatgctgaaacagtatgccgacaagcttgaatttatgcacattcttacccgggttaaccgaaaggtggcaacagaatttgagtccttttcctttgacgctacttttcatgcaaagaaacagattccatgtattgtttccatgctcacaaaagaactctatttttatcactaaagaaatggttggttggtggttttttttagtttgtatgccaagtgagaagatggtatatttggtactgtatttccctctcattttgacctactctcatgctgcagagggtactttaagacatactccttccatcaaatagaaccactatgaagctacctcaaacttccagtcaggtagttgcaattgaattaaattaggaataaataaaaatggatactggtgcagtcattatgagaggcaatgattgttaatttacagctttcatgattagcaagttacagtgatgctgtgctatgaattttcaagtaattgtgaaaaagttaaacattgaagtaatgaatttttatgatattccccccacttaagactgtgtattctagttttgtcaaactgtagaaatgatgatgtggaagaacttaggcatctgtgggcatggtcaaaggctcaaacctttattttagaattgatatacacggatgacttaactgcatttttagaccatttatctgggattatggttttgtgatgtttgtcctgaacacttttgttgtaaaaaaataataataatgtttaatattgagaaagaaactaatattttatgtgagagaaagtgtgagcaaactaacttgacttttaaggctaaaacttaacattcatagaggggtggagttttaactgtaaggtgctacaatgcccctggatctaccagcataaatatcttctgatttgtccctatgcatatcagttgagcttcatataccagcaatatatctgaagagctattatataaaaaccccaaactgttgattattagccaggtaatgtgaataaattctataggaacatatgaaaatacaacttaaataataaacagtggaatataaggaaagcaataaatgaatgggctgagctgcctgtaacttgagagtagatggtttgagcctgagcagagacatgactcagcctgttccatgaaggcagagccatggaccacgcaggaagggcctacagcccatttctccatacgcactggtatgtgtggatgatgctgccagggcgccatcgccaagtaagaaagtgaagcaaatcagaaacttgtgaagtggaaatgttctaaaggtggtgaggcaataaaaatcatagtactctttgtagcaaaattcttaagtatgttattttctgttgaagtttacaatcaaaggaaaatagtaatgttttatactgtttactgaaagaaaaagacctatgagcacataggactctagacggcatccagccggaggccagagctgagccctcagcccgggaggcaggctccaggcctcagcaggtgcggagccgtcactgcaccaagtctcactggctgtcagtatgacatttcacgggagatttcttgttgctcaaaaaatgagctcgcatttgtcaatgacagtttcttttttcttactagacctgtaacttttgtaaatacacatagcatgtaatggtatcttaaagtgtgtttctatgtgacaattttgtacaaatttgttattttccatttttatttcaaaatatacattcaaacttaaaatta

SEQ ID NO: 114705 - DNA, 2624 bp, Homo sapiens
  Payload ID: 2412
  Gene Symbol: CASP3
  Gene Name: caspase 3, apoptosis-related cysteine peptidase
  ENST ID: ENST00000393585
  CDS Start-End: 336-884
atccgtggccacagctggttggcgtcgccttgaaatcccaggccgtgaggagttagcgagccctgctcacactcggcgctctggttttcggtgggtgtgccctgcacctgcctcttcccccattctcaatgagatcaccatcctcagaataatttgtaccccgctgggcactagctaatggaggtgatgtcatgctaagcagcacttcagtgagttttgcgggaaccaaagctctgctcccaggagtgtggatttggtgctttcatgtggaaaaagcggatgatgacaagtagagagcaaatgtgcgcatgtctgatgctttaataaaggtatccatggagaacactgaaaactcagtggattcaaaatccattaaaaatttggaaccaaagatcatacatggaagcgaatcaatggactctggaatatccctggacaacagttataaaatggattatcctgagatgggtttatgtataataattaataataagaattttcataaaagcactggaatgacatctcggtctggtacagatgtcgatgcagcaaacctcagggaaacattcagaaacttgaaatatgaagtcaggaataaaaatgatcttacacgtgaagaaattgtggaattgatgcgtgatgtttctaaagaagatcacagcaaaaggagcagttttgtttgtgtgcttctgagccatggtgaagaaggaataatttttggaacaaatggacctgttgacctgaaaaaaataacaaactttttcagaggggatcgttgtagaagtctaactggaaaacccaaacttttcattattcaggttattattcttggcgaaattcaaaggatggctcctggttcatccagtcgctttgtgccatgctgaaacagtatgccgacaagcttgaatttatgcacattcttacccgggttaaccgaaaggtggcaacagaatttgagtccttttcctttgacgctacttttcatgcaaagaaacagattccatgtattgtttccatgctcacaaaagaactctatttttatcactaaagaaatggttggttggtggttttttttagtttgtatgccaagtgagaagatggtatatttggtactgtatttccctctcattttgacctactctcatgctgcagagggtactttaagacatactccttccatcaaatagaaccactatgaagctacctcaaacttccagtcaggtagttgcaattgaattaaattaggaataaataaaaatggatactggtgcagtcattatgagaggcaatgattgttaatttacagctttcatgattagcaagttacagtgatgctgtgctatgaattttcaagtaattgtgaaaaagttaaacattgaagtaatgaatttttatgatattccccccacttaagactgtgtattctagttttgtcaaactgtagaaatgatgatgtggaagaacttaggcatctgtgggcatggtcaaaggctcaaacctttattttagaattgatatacacggatgacttaactgcatttttagaccatttatctgggattatggttttgtgatgtttgtcctgaacacttttgttgtaaaaaaataataataatgtttaatattgagaaagaaactaatattttatgtgagagaaagtgtgagcaaactaacttgacttttaaggctaaaacttaacattcatagaggggtggagttttaactgtaaggtgctacaatgcccctggatctaccagcataaatatcttctgatttgtccctatgcatatcagttgagcttcatataccagcaatatatctgaagagctattatataaaaaccccaaactgttgattattagccaggtaatgtgaataaattctataggaacatatgaaaatacaacttaaataataaacagtggaatataaggaaagcaataaatgaatgggctgagctgcctgtaacttgagagtagatggtttgagcctgagcagagacatgactcagcctgttccatgaaggcagagccatggaccacgcaggaagggcctacagcccatttctccatacgcactggtatgtgtggatgatgctgccagggcgccatcgccaagtaagaaagtgaagcaaatcagaaacttgtgaagtggaaatgttctaaaggtggtgaggcaataaaaatcatagtactctttgtagcaaaattcttaagtatgttattttctgttgaagtttacaatcaaaggaaaatagtaatgttttatactgtttactgaaagaaaaagacctatgagcacataggactctagacggcatccagccggaggccagagctgagccctcagcccgggaggcaggctccaggcctcagcaggtgcggagccgtcactgcaccaagtctcactggctgtcagtatgacatttcacgggagatttcttgttgctcaaaaaatgagctcgcatttgtcaatgacagtttcttttttcttactagacctgtaacttttgtaaatacacatagcatgtaatggtatcttaaagtgtgtttctatgtgacaattttgtacaaatttgttattttccatttttatttcaaaatatacattcaaacttaaaatta

SEQ ID NO: 114706 - DNA, 677 bp, Homo sapiens
  Payload ID: 2412
  Gene Symbol: CASP3
  Gene Name: caspase 3, apoptosis-related cysteine peptidase
  ENST ID: ENST00000393588
  CDS Start-End: 77-625
gcggaagcagtgcagacgcggctcctagcggatgggtgctattgtgaggcggttgtagaagttaataaaggtatccatggagaacactgaaaactcagtggattcaaaatccattaaaaatttggaaccaaagatcatacatggaagcgaatcaatggactctggaatatccctggacaacagttataaaatggattatcctgagatgggtttatgtataataattaataataagaattttcataaaagcactggaatgacatctcggtctggtacagatgtcgatgcagcaaacctcagggaaacattcagaaacttgaaatatgaagtcaggaataaaaatgatcttacacgtgaagaaattgtggaattgatgcgtgatgtttctaaagaagatcacagcaaaaggagcagttttgtttgtgtgcttctgagccatggtgaagaaggaataatttttggaacaaatggacctgttgacctgaaaaaaataacaaactttttcagaggggatcgttgtagaagtctaactggaaaacccaaacttttcattattcaggttattattcttggcgaaattcaaaggatggctcctggttcatccagtcgctttgtgccatgctgaaacagtatgccgacaagcttgaatttatgcacattcttacccgggttaaccg

SEQ ID NO: 114707 - DNA, 549 bp, Homo sapiens
  Payload ID: 2412
  Gene Symbol: CASP3
  Gene Name: caspase 3, apoptosis-related cysteine peptidase
  ENST ID: ENST00000447121
  CDS Start-End: 198-549
agtgcagacgcggctcctagcggatgggtgctattgtgaggcggttgtagaagagtttcgtgagtgctcgcagctcatacctgtggctgtgtatccgtggccacagctggttggcgtcgccttgaaatcccaggccgtgaggagttagcgagccctgctcacactcggcgctctggttttcgttaataaaggtatccatggagaacactgaaaactcagtggattcaaaatccattaaaaatttggaaccaaagatcatacatggaagcgaatcaatggactctggaatatccctggacaacagttataaaatggattatcctgagatgggtttatgtataataattaataataagaattttcataaaagcactggaatgacatctcggtctggtacagatgtcgatgcagcaaacctcagggaaacattcagaaacttgaaatatgaagtcaggaataaaaatgatcttacacgtgaagaaattgtggaattgatgcgtgatgtttctaaagaagatcacagcaaaaggagcagttttgtttgtgtgc

SEQ ID NO: 114708 - DNA, 964 bp, Homo sapiens
  Payload ID: 2412
  Gene Symbol: CASP3
  Gene Name: caspase 3, apoptosis-related cysteine peptidase
  ENST ID: ENST00000517513
  CDS Start-End: 236-784
agtgcagacgcggctcctagcggatgggtgctattgtgaggcggttgtagaagagtttcgtgagtgctcgcagctcatacctgtggctgtgtatccgtggccacagctggttggcgtcgccttgaaatcccaggccgtgaggagttagcgagccctgctcacactcggcgctctggttttcggtgggtgtgccctgcacctgcctcttcccccattctcattaataaaggtatccatggagaacactgaaaactcagtggattcaaaatccattaaaaatttggaaccaaagatcatacatggaagcgaatcaatggactctggaatatccctggacaacagttataaaatggattatcctgagatgggtttatgtataataattaataataagaattttcataaaagcactggaatgacatctcggtctggtacagatgtcgatgcagcaaacctcagggaaacattcagaaacttgaaatatgaagtcaggaataaaaatgatcttacacgtgaagaaattgtggaattgatgcgtgatgtttctaaagaagatcacagcaaaaggagcagttttgtttgtgtgcttctgagccatggtgaagaaggaataatttttggaacaaatggacctgttgacctgaaaaaaataacaaactttttcagaggggatcgttgtagaagtctaactggaaaacccaaacttttcattattcaggttattattcttggcgaaattcaaaggatggctcctggttcatccagtcgctttgtgccatgctgaaacagtatgccgacaagcttgaatttatgcacattcttacccgggttaaccgaaaggtggcaacagaatttgagtccttttcctttgacgctacttttcatgcaaagaaacagattccatgtattgtttccatgctcacaaaagaactctatttttatcactaaagaaatggttggttgg

SEQ ID NO: 114709 - DNA, 2540 bp, Homo sapiens
  Payload ID: 2412
  Gene Symbol: CASP3
  Gene Name: caspase 3, apoptosis-related cysteine peptidase
  Uniprot ID: P42574
  ENST ID: ENST00000523916
  CDS Start-End: 131-964
aggggcgggcgggaggcggggctggcgctggagcacatctcccggcggcgggccgcggaagcagtgcagacgcggctcctagcggatgggtgctattgtgaggcggttgtagaagttaataaaggtatccatggagaacactgaaaactcagtggattcaaaatccattaaaaatttggaaccaaagatcatacatggaagcgaatcaatggactctggaatatccctggacaacagttataaaatggattatcctgagatgggtttatgtataataattaataataagaattttcataaaagcactggaatgacatctcggtctggtacagatgtcgatgcagcaaacctcagggaaacattcagaaacttgaaatatgaagtcaggaataaaaatgatcttacacgtgaagaaattgtggaattgatgcgtgatgtttctaaagaagatcacagcaaaaggagcagttttgtttgtgtgcttctgagccatggtgaagaaggaataatttttggaacaaatggacctgttgacctgaaaaaaataacaaactttttcagaggggatcgttgtagaagtctaactggaaaacccaaacttttcattattcaggcctgccgtggtacagaactggactgtggcattgagacagacagtggtgttgatgatgacatggcgtgtcataaaataccagtggaggccgacttcttgtatgcatactccacagcacctggttattattcttggcgaaattcaaaggatggctcctggttcatccagtcgctttgtgccatgctgaaacagtatgccgacaagcttgaatttatgcacattcttacccgggttaaccgaaaggtggcaacagaatttgagtccttttcctttgacgctacttttcatgcaaagaaacagattccatgtattgtttccatgctcacaaaagaactctatttttatcactaaagaaatggttggttggtggttttttttagtttgtatgccaagtgagaagatggtatatttggtactgtatttccctctcattttgacctactctcatgctgcagagggtactttaagacatactccttccatcaaatagaaccactatgaagctacctcaaacttccagtcaggtagttgcaattgaattaaattaggaataaataaaaatggatactggtgcagtcattatgagaggcaatgattgttaatttacagctttcatgattagcaagttacagtgatgctgtgctatgaattttcaagtaattgtgaaaaagttaaacattgaagtaatgaatttttatgatattccccccacttaagactgtgtattctagttttgtcaaactgtagaaatgatgatgtggaagaacttaggcatctgtgggcatggtcaaaggctcaaacctttattttagaattgatatacacggatgacttaactgcatttttagaccatttatctgggattatggttttgtgatgtttgtcctgaacacttttgttgtaaaaaaataataataatgtttaatattgagaaagaaactaatattttatgtgagagaaagtgtgagcaaactaacttgacttttaaggctaaaacttaacattcatagaggggtggagttttaactgtaaggtgctacaatgcccctggatctaccagcataaatatcttctgatttgtccctatgcatatcagttgagcttcatataccagcaatatatctgaagagctattatataaaaaccccaaactgttgattattagccaggtaatgtgaataaattctataggaacatatgaaaatacaacttaaataataaacagtggaatataaggaaagcaataaatgaatgggctgagctgcctgtaacttgagagtagatggtttgagcctgagcagagacatgactcagcctgttccatgaaggcagagccatggaccacgcaggaagggcctacagcccatttctccatacgcactggtatgtgtggatgatgctgccagggcgccatcgccaagtaagaaagtgaagcaaatcagaaacttgtgaagtggaaatgttctaaaggtggtgaggcaataaaaatcatagtactctttgtagcaaaattcttaagtatgttattttctgttgaagtttacaatcaaaggaaaatagtaatgttttatactgtttactgaaagaaaaagacctatgagcacataggactctagacggcatccagccggaggccagagctgagccctcagcccgggaggcaggctccaggcctcagcaggtgcggagccgtcactgcaccaagtctcactggctgtcagtatgacatttcacgggagatttcttgttgctcaaaaaatgagctcgcatttgtcaatgacagtttcttttttcttactagacctgtaacttttgtaaatacacatagcatgtaatggtatcttaaagtgtgtttctatgtgacaattttgtacaaatttgttattttccatttttatttcaaaatatacattcaaacttaaaatta

SEQ ID NO: 114710 - DNA, 2621 bp, Homo sapiens
  Payload ID: 2412
  Gene Symbol: CASP3
  Gene Name: caspase 3, apoptosis-related cysteine peptidase
  ENST ID: ENST00000613118
  CDS Start-End: 309-779
atccgtggccacagctggttggcgtcgccttgaaatcccaggccgtgaggagttagcgagccctgctcacactcggcgctctggttttcggtgggtgtgccctgcacctgcctcttcccccattctcaatgagatcaccatcctcagaataatttgtaccccgctgggcactagctaatggaggtgatgtcatgctaagcagcacttcagtgagttttgcgggaaccaaagctctgctcccaggagtgtggatttggtgctttcatgtggaaaaagcggatgatgacaagtagagagcaaatgtgcgcatgtctgatgctttaataaaggtatccatggagaacactgaaaactcagtggattcaaaatccattaaaaatttggaaccaaagatcatacatggaagcgaatcaatggactctggaatatccctggacaacagttataaaatggattatcctgagatgggtttatgtataataattaataataagaattttcataaaagcactggaatgacatctcggtctggtacagatgtcgatgcagcaaacctcagggaaacattcagaaacttgaaatatgaagtcaggaataaaaatgatcttacacgtgaagaaattgtggaattgatgcgtgatgtttctaaagaagatcacagcaaaaggagcagttttgtttgtgtgcttctgagccatggtgaagaaggaataatttttggaacaaatggacctgttgacctgaaaaataacaaactttttcagaggggatcgttgtagaagtctaactggaaaacccaaacttttcattattcaggttattattcttggcgaaattcaaaggatggctcctggttcatccagtcgctttgtgccatgctgaaacagtatgccgacaagcttgaatttatgcacattcttacccgggttaaccgaaaggtggcaacagaatttgagtccttttcctttgacgctacttttcatgcaaagaaacagattccatgtattgtttccatgctcacaaaagaactctatttttatcactaaagaaatggttggttggtggttttttttagtttgtatgccaagtgagaagatggtatatttggtactgtatttccctctcattttgacctactctcatgctgcagagggtactttaagacatactccttccatcaaatagaaccactatgaagctacctcaaacttccagtcaggtagttgcaattgaattaaattaggaataaataaaaatggatactggtgcagtcattatgagaggcaatgattgttaatttacagctttcatgattagcaagttacagtgatgctgtgctatgaattttcaagtaattgtgaaaaagttaaacattgaagtaatgaatttttatgatattccccccacttaagactgtgtattctagttttgtcaaactgtagaaatgatgatgtggaagaacttaggcatctgtgggcatggtcaaaggctcaaacctttattttagaattgatatacacggatgacttaactgcatttttagaccatttatctgggattatggttttgtgatgtttgtcctgaacacttttgttgtaaaaaaataataataatgtttaatattgagaaagaaactaatattttatgtgagagaaagtgtgagcaaactaacttgacttttaaggctaaaacttaacattcatagaggggtggagttttaactgtaaggtgctacaatgcccctggatctaccagcataaatatcttctgatttgtccctatgcatatcagttgagcttcatataccagcaatatatctgaagagctattatataaaaaccccaaactgttgattattagccaggtaatgtgaataaattctataggaacatatgaaaatacaacttaaataataaacagtggaatataaggaaagcaataaatgaatgggctgagctgcctgtaacttgagagtagatggtttgagcctgagcagagacatgactcagcctgttccatgaaggcagagccatggaccacgcaggaagggcctacagcccatttctccatacgcactggtatgtgtggatgatgctgccagggcgccatcgccaagtaagaaagtgaagcaaatcagaaacttgtgaagtggaaatgttctaaaggtggtgaggcaataaaaatcatagtactctttgtagcaaaattcttaagtatgttattttctgttgaagtttacaatcaaaggaaaatagtaatgttttatactgtttactgaaagaaaaagacctatgagcacataggactctagacggcatccagccggaggccagagctgagccctcagcccgggaggcaggctccaggcctcagcaggtgcggagccgtcactgcaccaagtctcactggctgtcagtatgacatttcacgggagatttcttgttgctcaaaaaatgagctcgcatttgtcaatgacagtttcttttttcttactagacctgtaacttttgtaaatacacatagcatgtaatggtatcttaaagtgtgtttctatgtgacaattttgtacaaatttgttattttccatttttatttcaaaatatacattcaaacttaaaatt

SEQ ID NO: 114711 - DNA, 1340 bp, Homo sapiens
  Payload ID: 2413
  Gene Symbol: CASP4
  Gene Name: caspase 4, apoptosis-related cysteine peptidase
  Uniprot ID: P49662
  ENST ID: ENST00000393150
  CDS Start-End: 264-1229
cagaagcctttgtgatctcacctgttggaatgcactaatgttttctgagccccttaaatatcttgtctacattcttttaagaagctcttcaccaactgtcagaaggcaaccacagaaaaaagccacttaaggtgttggaatccctgggcaaagatttcctcactggtgttttggataacttggtggaacaaaatgtactgaactggaaggaagaggaaaaaaagaaatattacgatgctaaaactgaagacaaagttcgggtcatggcagactctatgcaagagaagcaacgtatggcaggacaaatgcttcttcaaaccttttttaacatagaccaaatatcccccaataaaaaagctcatccgaatatggaggctggaccacctgagtcaggagaatctacagatgccctcaagctttgtcctcatgaagaattcctgagactatgtaaagaaagagctgaagagatctatccaataaaggagagaaacaaccgcacacgcctggctctcatcatatgcaatacagagtttgaccatctgcctccgaggaatggagctgactttgacatcacagggatgaaggagctacttgagggtctggactatagtgtagatgtagaagagaatctgacagccagggatatggagtcagcgctgagggcatttgctaccagaccagagcacaagtcctctgacagcacattcttggtactcatgtctcatggcatcctggagggaatctgcggaactgtgcatgatgagaaaaaaccagatgtgctgctttatgacaccatcttccagatattcaacaaccgcaactgcctcagtctgaaggacaaacccaaggtcatcattgtccaggcctgcagaggtgcaaaccgtggggaactgtgggtcagagactctccagcatccttggaagtggcctcttcacagtcatctgagaacctagaggaagatgctgtttacaagacccacgtggagaaggacttcattgctttctgctcttcaacgccacacaacgtgtcctggagagacagcacaatgggctctatcttcatcacacaactcatcacatgcttccagaaatattcttggtgctgccacctagaggaagtatttcggaaggtacagcaatcatttgaaactccaagggccaaagctcaaatgcccaccatagaacgactgtccatgacaagatatttctacctctttcctggcaattgaaaatggaagccacaagcagcccagccctccttaatcaacttcaaggagcaccttcattagtacagcttgcatatttaacattttgtatttcaataaaagtgaagacaaacg

SEQ ID NO: 114712 - DNA, 2158 bp, Homo sapiens
  Payload ID: 2413
  Gene Symbol: CASP4
  Gene Name: caspase 4, apoptosis-related cysteine peptidase
  Uniprot ID: P49662
  ENST ID: ENST00000444739
  CDS Start-End: 912-2045
aaatgagagctctgtctgtaaactctaggtggagttgctgaaattcctgcaagcatttcttgccgggagaggagggatggatcccggtcccacctaaagaagcagtctggccatgatctgccacagcggctgtgctgcactgtgaagactgctgcccagtccaatctgcccagcctccctagcactggtagggaaaaaccgctgactagagctgcagtaatggcagtcgcccctcccctggggaactcggtcatctctggcgtactccaggctgctatgctggctagtggggattctaatccagcggatctaagcttgcaggcttctgtgagaatggacctgctgcaaggccattttgctccctggcttcagccccctttccatgggagtggacgggactcctgcctcactagagttccgggagctgctggactatgtaaaaactcctgcagctcagtgcctgcccaaaaagctggaaatatgaactattgggttaattcttatcaggaaatgaaaaagagttgttagattaaacttcttcagtcattgtcgttctttgtaatcagagaaagaaaaactgagagatcaggaagagaagagacagatggatagaagaagtttgggtggccacaggaaacaagaaaagaaacaagctgaggtgtcaacccacaggataatattttgtcattttcatttttttcccccaagtcagaaactaaattccagtaattggatgccaatttgctgatgacaaggcacttcctgataatgagtctggaattctgagcagcagtttcacaatctgtaattacacgtttccgccctttgcaataaggaaatacatagtttactttcatttttgactctgaggctctttccaacgctgtaaaaaaggacagaggctgttccctatggcagaaggcaaccacagaaaaaagccacttaaggtgttggaatccctgggcaaagatttcctcactggtgttttggataacttggtggaacaaaatgtactgaactggaaggaagaggaaaaaaagaaatattacgatgctaaaactgaagacaaagttcgggtcatggcagactctatgcaagagaagcaacgtatggcaggacaaatgcttcttcaaaccttttttaacatagaccaaatatcccccaataaaaaagctcatccgaatatggaggctggaccacctgagtcaggagaatctacagatgccctcaagctttgtcctcatgaagaattcctgagactatgtaaagaaagagctgaagagatctatccaataaaggagagaaacaaccgcacacgcctggctctcatcatatgcaatacagagtttgaccatctgcctccgaggaatggagctgactttgacatcacagggatgaaggagctacttgagggtctggactatagtgtagatgtagaagagaatctgacagccagggatatggagtcagcgctgagggcatttgctaccagaccagagcacaagtcctctgacagcacattcttggtactcatgtctcatggcatcctggagggaatctgcggaactgtgcatgatgagaaaaaaccagatgtgctgctttatgacaccatcttccagatattcaacaaccgcaactgcctcagtctgaaggacaaacccaaggtcatcattgtccaggcctgcagaggtgcaaaccgtggggaactgtgggtcagagactctccagcatccttggaagtggcctcttcacagtcatctgagaacctagaggaagatgctgtttacaagacccacgtggagaaggacttcattgctttctgctcttcaacgccacacaacgtgtcctggagagacagcacaatgggctctatcttcatcacacaactcatcacatgcttccagaaatattcttggtgctgccacctagaggaagtatttcggaaggtacagcaatcatttgaaactccaagggccaaagctcaaatgcccaccatagaacgactgtccatgacaagatatttctacctctttcctggcaattgaaaatggaagccacaagcagcccagccctccttaatcaacttcaaggagcaccttcattagtacagcttgcatatttaacattttgtatttcaataaaagtgaagacaaacgaa

SEQ ID NO: 114713 - DNA, 763 bp, Homo sapiens
  Payload ID: 2413
  Gene Symbol: CASP4
  Gene Name: caspase 4, apoptosis-related cysteine peptidase
  ENST ID: ENST00000417440
  CDS Start-End: 321-763
ggagggatggatcccggtcccacctaaagaagcagtctggccatgatctgccacagcggctgtgctgcactgtgaagactgctgcccagtccaatctgcccagcctccctagcactgtcagaaactaaattccagtaattggatgccaatttgctgatgacaaggcacttcctgataatgagtctggaattctgagcagcagtttcacaatctgtaattacacgtttccgccctttgcaataaggaaatacatagtttactttcatttttgactctgaggctctttccaacgctgtaaaaaaggacagaggctgttccctatggcagaaggcaaccacagaaaaaagccacttaaggtgttggaatccctgggcaaagatttcctcactggtgttttggataacttggtggaacaaaatgtactgaactggaaggaagaggaaaaaaagaaatattacgatgctaaaactgaagacaaagttcgggtcatggcagactctatgcaagagaagcaacgtatggcaggacaaatgcttcttcaaaccttttttaacatagaccaaatatcccccaataaaaaagctcatccgaatatggaggctggaccacctgagtcaggagaatctacagatgccctcaagctttgtcctcatgaagaattcctgagactatgtaaagaaagagctgaagagatctatccaataaaggagagaaacaaccgcacacgcctggctctcatcatatgcaatacagagtttgacca

SEQ ID NO: 114714 - DNA, 215 bp, Homo sapiens
  Payload ID: 2413
  Gene Symbol: CASP4
  Gene Name: caspase 4, apoptosis-related cysteine peptidase
  ENST ID: ENST00000533252
  CDS Start-End: 1-215
acaacgtgtcctggagagacagcacaatgggctctatcttcatcacacaactcatcacatgcttccagaaatattcttggtgctgccacctagaggaagtatttcggaaggaagccacaagcagcccagccctccttaatcaacttcaaggagcaccttcattagtacagcttgcatatttaacattttgtatttcaataaaagtgaagacaaac

SEQ ID NO: 114715 - DNA, 1338 bp, Homo sapiens
  Payload ID: 2413
  Gene Symbol: CASP4
  Gene Name: caspase 4, apoptosis-related cysteine peptidase
  ENST ID: ENST00000613196
  CDS Start-End: 235-1227
cagaagcctttgtgatctcacctgttggaatgcactaatgttttctgagccccttaaatatcttgtctacattcttttaagaagctcttcaccaactgtcagaaggcaaccacagaaaaaagccacttaaggtgttggaatccctgggcaaagatttcctcactggtgttttggataacttggtggaacaaaatgtactgaactggaaggaagaggaaaaaaagaaatattacgatgctaaaactgaagacaaagttcgggtcatggcagactctatgcaagagaagcaacgtatggcaggacaaatgcttcttcaaaccttttaacatagaccaaatatcccccaataaaaaagctcatccgaatatggaggctggaccacctgagtcaggagaatctacagatgccctcaagctttgtcctcatgaagaattcctgagactatgtaaagaaagagctgaagagatctatccaataaaggagagaaacaaccgcacacgcctggctctcatcatatgcaatacagagtttgaccatctgcctccgaggaatggagctgactttgacatcacagggatgaaggagctacttgagggtctggactatagtgtagatgtagaagagaatctgacagccagggatatggagtcagcgctgagggcatttgctaccagaccagagcacaagtcctctgacagcacattcttggtactcatgtctcatggcatcctggagggaatctgcggaactgtgcatgatgagaaaaaaccagatgtgctgctttatgacaccatcttccagatattcaacaaccgcaactgcctcagtctgaaggacaaacccaaggtcatcattgtccaggcctgcagaggtgcaaaccgtggggaactgtgggtcagagactctccagcatccttggaagtggcctcttcacagtcatctgagaacctagaggaagatgctgtttacaagacccacgtggagaaggacttcattgctttctgctcttcaacgccacacaacgtgtcctggagagacagcacaatgggctctatcttcatcacacaactcatcacatgcttccagaaatattcttggtgctgccacctagaggaagtatttcggaaggtacagcaatcatttgaaactccaagggccaaagctcaaatgcccaccatagaacgactgtccatgacaagatatttctacctctttcctggcaattgaaaatggaagccacaagcagcccagccctccttaatcaacttcaaggagcaccttcattagtacagcttgcatatttaacattttgtatttcaataaaagtgaagacaaacg

SEQ ID NO: 114716 - DNA, 1414 bp, Homo sapiens
  Payload ID: 2414
  Gene Symbol: CASP5
  Gene Name: caspase 5, apoptosis-related cysteine peptidase
  Uniprot ID: P51878
  ENST ID: ENST00000260315
  CDS Start-End: 1-1305
atggctgaagacagtggcaaaaaaaaaaggcgtaagaattttgaagctatgttcaaaggtatccttcagagtggattggataacttcgtgataaaccacatgctaaagaacaacgtggctggacaaacatctatccagaccctagtacctaatacggatcaaaagtcgaccagtgtaaaaaaagacaaccacaaaaaaaaaacagttaagatgttggaatacctgggcaaagatgttcttcatggtgtttttaattatttggcaaaacacgatgttctgacattgaaggaagaggaaaagaaaaaatattatgataccaaaattgaagacaaggccctgatcttggtagactctttgcgaaagaatcgcgtggctcatcaaatgtttacccaaacacttctcaatatggaccaaaagatcaccagtgtaaaacctcttctgcaaatcgaggctggaccacctgagtcagcagaatctacaaatatactcaaactttgtcctcgtgaagaattcctgagactgtgtaaaaaaaatcatgatgagatctatccaataaaaaagagagaggaccgcagacgcctggctctcatcatatgcaatacaaagtttgatcacctgcctgcaaggaatggggctcactatgacatcgtggggatgaaaaggctgcttcaaggcctgggctacactgtggttgacgaaaagaatctcacagccagggatatggagtcagtgctgagggcatttgctgccagaccagagcacaagtcctctgacagcacgttcttggtactcatgtctcatggcatcctagagggaatctgcggaactgcgcataaaaagaaaaaaccggatgtgctgctttatgacaccatcttccagatattcaacaaccgcaactgcctcagtctaaaggacaaacccaaggtcatcattgtccaggcctgcagaggtgaaaaacatggggaactctgggtcagagactctccagcatccttggcactcatctcttcacagtcatctgagaacctggaggcagattctgtttgcaagatccacgaggagaaggacttcattgctttctgttcttcaacaccacataacgtgtcctggagagaccgcacaaggggctccatcttcattacggaactcatcacatgcttccagaaatattcttgctgctgccacctaatggaaatatttcggaaggtacagaaatcatttgaagttccacaggctaaagcccagatgcccaccatagaacgagcaaccttgacaagagatttctacctctttcctggcaattgaaaatgaaaccacaggcagcccagccctcctctgtcaacatcaaagagcacatttaccagtatagcttgcatagtcaatatttggtatttcaataaaagtaaagactgta

SEQ ID NO: 114717 - DNA, 1488 bp, Homo sapiens
  Payload ID: 2414
  Gene Symbol: CASP5
  Gene Name: caspase 5, apoptosis-related cysteine peptidase
  Uniprot ID: P51878
  ENST ID: ENST00000393141
  CDS Start-End: 33-1376
agtgctgtacaaagagacagaggctgttagctatggctgctgtgcccagagttgaaggagtctttatatttctgatagaagacagtggcaaaaaaaaaaggcgtaagaattttgaagctatgttcaaaggtatccttcagagtggattggataacttcgtgataaaccacatgctaaagaacaacgtggctggacaaacatctatccagaccctagtacctaatacggatcaaaagtcgaccagtgtaaaaaaagacaaccacaaaaaaaaaacagttaagatgttggaatacctgggcaaagatgttcttcatggtgtttttaattatttggcaaaacacgatgttctgacattgaaggaagaggaaaagaaaaaatattatgataccaaaattgaagacaaggccctgatcttggtagactctttgcgaaagaatcgcgtggctcatcaaatgtttacccaaacacttctcaatatggaccaaaagatcaccagtgtaaaacctcttctgcaaatcgaggctggaccacctgagtcagcagaatctacaaatatactcaaactttgtcctcgtgaagaattcctgagactgtgtaaaaaaaatcatgatgagatctatccaataaaaaagagagaggaccgcagacgcctggctctcatcatatgcaatacaaagtttgatcacctgcctgcaaggaatggggctcactatgacatcgtggggatgaaaaggctgcttcaaggcctgggctacactgtggttgacgaaaagaatctcacagccagggatatggagtcagtgctgagggcatttgctgccagaccagagcacaagtcctctgacagcacgttcttggtactcatgtctcatggcatcctagagggaatctgcggaactgcgcataaaaagaaaaaaccggatgtgctgctttatgacaccatcttccagatattcaacaaccgcaactgcctcagtctaaaggacaaacccaaggtcatcattgtccaggcctgcagaggtgaaaaacatggggaactctgggtcagagactctccagcatccttggcactcatctcttcacagtcatctgagaacctggaggcagattctgtttgcaagatccacgaggagaaggacttcattgctttctgttcttcaacaccacataacgtgtcctggagagaccgcacaaggggctccatcttcattacggaactcatcacatgcttccagaaatattcttgctgctgccacctaatggaaatatttcggaaggtacagaaatcatttgaagttccacaggctaaagcccagatgcccaccatagaacgagcaaccttgacaagagatttctacctctttcctggcaattgaaaatgaaaccacaggcagcccagccctcctctgtcaacatcaaagagcacatttaccagtatagcttgcatagtcaatatttggtatttcaataaaagtaaagactgtatct

SEQ ID NO: 114718 - DNA, 1237 bp, Homo sapiens
  Payload ID: 2414
  Gene Symbol: CASP5
  Gene Name: caspase 5, apoptosis-related cysteine peptidase
  Uniprot ID: P51878
  ENST ID: ENST00000444749
  CDS Start-End: 32-1162
gtgctgtacaaagagacagaggctgttagctatggctgaagacaaccacaaaaaaaaaacagttaagatgttggaatacctgggcaaagatgttcttcatggtgtttttaattatttggcaaaacacgatgttctgacattgaaggaagaggaaaagaaaaaatattatgataccaaaattgaagacaaggccctgatcttggtagactctttgcgaaagaatcgcgtggctcatcaaatgtttacccaaacacttctcaatatggaccaaaagatcaccagtgtaaaacctcttctgcaaatcgaggctggaccacctgagtcagcagaatctacaaatatactcaaactttgtcctcgtgaagaattcctgagactgtgtaaaaaaaatcatgatgagatctatccaataaaaaagagagaggaccgcagacgcctggctctcatcatatgcaatacaaagtttgatcacctgcctgcaaggaatggggctcactatgacatcgtggggatgaaaaggctgcttcaaggcctgggctacactgtggttgacgaaaagaatctcacagccagggatatggagtcagtgctgagggcatttgctgccagaccagagcacaagtcctctgacagcacgttcttggtactcatgtctcatggcatcctagagggaatctgcggaactgcgcataaaaagaaaaaaccggatgtgctgctttatgacaccatcttccagatattcaacaaccgcaactgcctcagtctaaaggacaaacccaaggtcatcattgtccaggcctgcagaggtgaaaaacatggggaactctgggtcagagactctccagcatccttggcactcatctcttcacagtcatctgagaacctggaggcagattctgtttgcaagatccacgaggagaaggacttcattgctttctgttcttcaacaccacataacgtgtcctggagagaccgcacaaggggctccatcttcattacggaactcatcacatgcttccagaaatattcttgctgctgccacctaatggaaatatttcggaaggtacagaaatcatttgaagttccacaggctaaagcccagatgcccaccatagaacgagcaaccttgacaagagatttctacctctttcctggcaattgaaaatgaaaccacaggcagcccagccctcctctgtcaacatcaaagagcacatttaccagtatagcttgcatagtc

SEQ ID NO: 114719 - DNA, 535 bp, Homo sapiens
  Payload ID: 2414
  Gene Symbol: CASP5
  Gene Name: caspase 5, apoptosis-related cysteine peptidase
  ENST ID: ENST00000438448
  CDS Start-End: 1-353
aaaaacatggggaactctgggtcagagactctccagcatccttggcactcatctcttcacagtcatctgagaacctggaggcagattctgtttgcaagatccacgaggagaaggacttcattgctttctgttcttcaacaccacataacgtgtcctggagagaccgcacaaggggctccatcttcattacggaactcatcacatgcttccagaaatattcttgctgctgccacctaatggaaatatttcggaaggtacagaaatcatttgaagttccacaggctaaagcccagatgcccaccatagaacgagcaaccttgacaagagatttctacctctttcctggcaattgaaaatttcagctaaagatggggtccttgtcacacgaccatgagaaattagactcacagacaatctgaaaggaaaccacaggcagcccagccctcctctgtcaacatcaaagagcacatttaccagtatagcttgcatagtcaatatttggtatttcaataaaagtaaagactgtatcttttta

SEQ ID NO: 114720 - DNA, 1023 bp, Homo sapiens
  Payload ID: 2414
  Gene Symbol: CASP5
  Gene Name: caspase 5, apoptosis-related cysteine peptidase
  Uniprot ID: P51878
  ENST ID: ENST00000418434
  CDS Start-End: 33-911
agtgctgtacaaagagacagaggctgttagctatggctgctcttctgcaaatcgaggctggaccacctgagtcagcagaatctacaaatatactcaaactttgtcctcgtgaagaattcctgagactgtgtaaaaaaaatcatgatgagatctatccaataaaaaagagagaggaccgcagacgcctggctctcatcatatgcaatacaaagtttgatcacctgcctgcaaggaatggggctcactatgacatcgtggggatgaaaaggctgcttcaaggcctgggctacactgtggttgacgaaaagaatctcacagccagggatatggagtcagtgctgagggcatttgctgccagaccagagcacaagtcctctgacagcacgttcttggtactcatgtctcatggcatcctagagggaatctgcggaactgcgcataaaaagaaaaaaccggatgtgctgctttatgacaccatcttccagatattcaacaaccgcaactgcctcagtctaaaggacaaacccaaggtcatcattgtccaggcctgcagaggtgaaaaacatggggaactctgggtcagagactctccagcatccttggcactcatctcttcacagtcatctgagaacctggaggcagattctgtttgcaagatccacgaggagaaggacttcattgctttctgttcttcaacaccacataacgtgtcctggagagaccgcacaaggggctccatcttcattacggaactcatcacatgcttccagaaatattcttgctgctgccacctaatggaaatatttcggaaggtacagaaatcatttgaagttccacaggctaaagcccagatgcccaccatagaacgagcaaccttgacaagagatttctacctctttcctggcaattgaaaatgaaaccacaggcagcccagccctcctctgtcaacatcaaagagcacatttaccagtatagcttgcatagtcaatatttggtatttcaataaaagtaaagactgtatct

SEQ ID NO: 114721 - DNA, 979 bp, Homo sapiens
  Payload ID: 2414
  Gene Symbol: CASP5
  Gene Name: caspase 5, apoptosis-related cysteine peptidase
  Uniprot ID: P51878
  ENST ID: ENST00000456200
  CDS Start-End: 1-327
atggctgaagacaaccacaaaaaaaaaacagttaagatgttggaatacctgggcaaagatgttcttcatggtgtttttaattatttggcaaaacacgatgttctgacattgaaggaagaggaaaagaaaaaatattatgataccaaaattgaagacaaggccctgatcttggtagactctttgcgaaagaatcgcgtggctcatcaaatgtttacccaaacacttctcaatatggaccaaaagatcaccagtgtaaaacatctatccaataaaaaagagagaggaccgcagacgcctggctctcatcatatgcaatacaaagtttgatcacctgcctgcaaggaatggggctcactatgacatcgtggggatgaaaaggctgcttcaaggcctgggctacactgtggttgacgaaaagaatctcacagccagggatatggagtcagtgctgagggcatttgctgccagaccagagcacaagtcctctgacagcacgttcttggtactcatgtctcatggcatcctagagggaatctgcggaactgcgcataaaaagaaaaaaccggatgtgctgctttatgacaccatcttccagatattcaacaaccgcaactgcctcagtctaaaggacaaacccaaggtcatcattgtccaggcctgcagaggtgaaaaacatggggaactctgggtcagagactctccagcatccttggcactcatctcttcacagtcatctgagaacctggaggcagattctgtttgcaagatccacgaggagaaggacttcattgctttctgttcttcaacaccacataacgtgtcctggagagaccgcacaaggggctccatcttcattacggaactcatcacatgcttccagaaatattcttgctgctgccacctaatggaaatatttcggaaggtacagaaatcatttgaagttccacaggctaaagcccagatgcccaccatagaacga

SEQ ID NO: 114722 - DNA, 623 bp, Homo sapiens
  Payload ID: 2414
  Gene Symbol: CASP5
  Gene Name: caspase 5, apoptosis-related cysteine peptidase
  ENST ID: ENST00000456094
  CDS Start-End: 129-623
gttagctatggctgagctttgtctaaagcaagggcaaaactctttaagctgtgcccagagttgaaggagtctttatatttctgatagaagacagtggcaaaaaaaaaaggcgtaagaattttgaagctatgttcaaaggtatccttcagagtggattggataacttcgtgataaaccacatgctaaagaacaacgtggctggacaaacatctatccagaccctagtacctaatacggatcaaaagtcgaccagtgtaaaaaaagacaaccacaaaaaaaaaacagttaagatgttggaatacctgggcaaagatgttcttcatggtgtttttaattatttggcaaaacacgatgttctgacattgaaggaagaggaaaagaaaaaatattatgataccaaaattgaagacaaggccctgatcttggtagactctttgcgaaagaatcgcgtggctcatcaaatgtttacccaaacacttctcaatatggaccaaaagatcaccagtgtaaaacctcttctgcaaatcgaggctggaccacctgagtcagcagaatctacaaatatactcaaactttgtcctcgtgaagaattcctgagactgtgtaaaaaaaatcatgatgag

SEQ ID NO: 114723 - DNA, 879 bp, Homo sapiens
  Payload ID: 2414
  Gene Symbol: CASP5
  Gene Name: caspase 5, apoptosis-related cysteine peptidase
  Uniprot ID: P51878
  ENST ID: ENST00000531367
  CDS Start-End: 1-879
atggctgctcttctgcaaatcgaggctggaccacctgagtcagcagaatctacaaatatactcaaactttgtcctcgtgaagaattcctgagactgtgtaaaaaaaatcatgatgagatctatccaataaaaaagagagaggaccgcagacgcctggctctcatcatatgcaatacaaagtttgatcacctgcctgcaaggaatggggctcactatgacatcgtggggatgaaaaggctgcttcaaggcctgggctacactgtggttgacgaaaagaatctcacagccagggatatggagtcagtgctgagggcatttgctgccagaccagagcacaagtcctctgacagcacgttcttggtactcatgtctcatggcatcctagagggaatctgcggaactgcgcataaaaagaaaaaaccggatgtgctgctttatgacaccatcttccagatattcaacaaccgcaactgcctcagtctaaaggacaaacccaaggtcatcattgtccaggcctgcagaggtgaaaaacatggggaactctgggtcagagactctccagcatccttggcactcatctcttcacagtcatctgagaacctggaggcagattctgtttgcaagatccacgaggagaaggacttcattgctttctgttcttcaacaccacataacgtgtcctggagagaccgcacaaggggctccatcttcattacggaactcatcacatgcttccagaaatattcttgctgctgccacctaatggaaatatttcggaaggtacagaaatcatttgaagttccacaggctaaagcccagatgcccaccatagaacgagcaaccttgacaagagatttctacctctttcctggcaattga

SEQ ID NO: 114724 - DNA, 1344 bp, Homo sapiens
  Payload ID: 2414
  Gene Symbol: CASP5
  Gene Name: caspase 5, apoptosis-related cysteine peptidase
  Uniprot ID: P51878
  ENST ID: ENST00000526056
  CDS Start-End: 1-1344
atggctgctgtgcccagagttgaaggagtctttatatttctgatagaagacagtggcaaaaaaaaaaggcgtaagaattttgaagctatgttcaaaggtatccttcagagtggattggataacttcgtgataaaccacatgctaaagaacaacgtggctggacaaacatctatccagaccctagtacctaatacggatcaaaagtcgaccagtgtaaaaaaagacaaccacaaaaaaaaaacagttaagatgttggaatacctgggcaaagatgttcttcatggtgtttttaattatttggcaaaacacgatgttctgacattgaaggaagaggaaaagaaaaaatattatgataccaaaattgaagacaaggccctgatcttggtagactctttgcgaaagaatcgcgtggctcatcaaatgtttacccaaacacttctcaatatggaccaaaagatcaccagtgtaaaacctcttctgcaaatcgaggctggaccacctgagtcagcagaatctacaaatatactcaaactttgtcctcgtgaagaattcctgagactgtgtaaaaaaaatcatgatgagatctatccaataaaaaagagagaggaccgcagacgcctggctctcatcatatgcaatacaaagtttgatcacctgcctgcaaggaatggggctcactatgacatcgtggggatgaaaaggctgcttcaaggcctgggctacactgtggttgacgaaaagaatctcacagccagggatatggagtcagtgctgagggcatttgctgccagaccagagcacaagtcctctgacagcacgttcttggtactcatgtctcatggcatcctagagggaatctgcggaactgcgcataaaaagaaaaaaccggatgtgctgctttatgacaccatcttccagatattcaacaaccgcaactgcctcagtctaaaggacaaacccaaggtcatcattgtccaggcctgcagaggtgaaaaacatggggaactctgggtcagagactctccagcatccttggcactcatctcttcacagtcatctgagaacctggaggcagattctgtttgcaagatccacgaggagaaggacttcattgctttctgttcttcaacaccacataacgtgtcctggagagaccgcacaaggggctccatcttcattacggaactcatcacatgcttccagaaatattcttgctgctgccacctaatggaaatatttcggaaggtacagaaatcatttgaagttccacaggctaaagcccagatgcccaccatagaacgagcaaccttgacaagagatttctacctctttcctggcaattga

SEQ ID NO: 114725 - DNA, 1548 bp, Homo sapiens
  Payload ID: 2415
  Gene Symbol: CASP6
  Gene Name: caspase 6, apoptosis-related cysteine peptidase
  Uniprot ID: P55212
  ENST ID: ENST00000265164
  CDS Start-End: 79-960
ccgagggcggggccgggcccgggagcctgtggcttcaggaagaggagggcaaggtgtctggctgcgcgtttggctgcaatgagctcggcctcggggctccgcagggggcacccggcaggtggggaagaaaacatgacagaaacagatgccttctataaaagagaaatgtttgatccggcagaaaagtacaaaatggaccacaggaggagaggaattgctttaatcttcaatcatgagaggttcttttggcacttaacactgccagaaaggcggggcacctgcgcagatagagacaatcttacccgcaggttttcagatctaggatttgaagtgaaatgctttaatgatcttaaagcagaagaactactgctcaaaattcatgaggtgtcaactgttagccacgcagatgccgattgctttgtgtgtgtcttcctgagccatggcgaaggcaatcacatttatgcatatgatgctaaaatcgaaattcagacattaactggcttgttcaaaggagacaagtgtcacagcctggttggaaaacccaagatatttatcattcaggcatgtcggggaaaccagcacgatgtgccagtcattcctttggatgtagtagataatcagacagagaagttggacaccaacataactgaggtggatgcagcctccgtttacacgctgcctgctggagctgacttcctcatgtgttactctgttgcagaaggatattattctcaccgggaaactgtgaacggctcatggtacattcaagatttgtgtgagatgttgggaaaatatggctcctccttagagttcacagaactcctcacactggtgaacaggaaagtttctcagcgccgagtggacttttgcaaagacccaagtgcaattggaaagaagcaggttccctgttttgcctcaatgctaactaaaaagctgcatttctttccaaaatctaattaattaatagaggctatctaattttacactctgtattgaaaatggctttctcagccaggcgtggttactcacacctgtaatcccagcactttgggagtccaaggtgggcggatcacctgaggtcgggagttcgagaccagcctgaccaacatggagaagccccgtctctactaaaaatgcaaaaaaaaatttagctaggcatggcggcgcatgcctgcaatcccagctacttggaaggctgaggcaggagaatcacttgaacccaggaggtggaggctgcggtgagccgagattgcgccattgcactccagcctgggcaacgagtgaaactccgtctcaaaaaaaagaaaatgtctttctcttccttttatataaatatcgttagggtgaagcattatggtctaatgattcaaatgttttaaagtttaatgcctagcagagaactgccttaaaaaaaaaaaaaaaaagttcatgttggccatggtgaaagggtttgatatggagaaacaaaatcctcaggaaattagataaataaaaatttataagcatttgtattattttttaataaactgcagggttacacaaaaatct

SEQ ID NO: 114726 - DNA, 1347 bp, Homo sapiens
  Payload ID: 2415
  Gene Symbol: CASP6
  Gene Name: caspase 6, apoptosis-related cysteine peptidase
  Uniprot ID: P55212
  ENST ID: ENST00000352981
  CDS Start-End: 25-639
tgtctggctgcgcgtttggctgcaatgagctcggcctcggggctccgcagggggcacccggcagtgtcaactgttagccacgcagatgccgattgctttgtgtgtgtcttcctgagccatggcgaaggcaatcacatttatgcatatgatgctaaaatcgaaattcagacattaactggcttgttcaaaggagacaagtgtcacagcctggttggaaaacccaagatatttatcattcaggcatgtcggggaaaccagcacgatgtgccagtcattcctttggatgtagtagataatcagacagagaagttggacaccaacataactgaggtggatgcagcctccgtttacacgctgcctgctggagctgacttcctcatgtgttactctgttgcagaaggatattattctcaccgggaaactgtgaacggctcatggtacattcaagatttgtgtgagatgttgggaaaatatggctcctccttagagttcacagaactcctcacactggtgaacaggaaagtttctcagcgccgagtggacttttgcaaagacccaagtgcaattggaaagaagcaggttccctgttttgcctcaatgctaactaaaaagctgcatttctttccaaaatctaattaattaatagaggctatctaattttacactctgtattgaaaatggctttctcagccaggcgtggttactcacacctgtaatcccagcactttgggagtccaaggtgggcggatcacctgaggtcgggagttcgagaccagcctgaccaacatggagaagccccgtctctactaaaaatgcaaaaaaaaatttagctaggcatggcggcgcatgcctgcaatcccagctacttggaaggctgaggcaggagaatcacttgaacccaggaggtggaggctgcggtgagccgagattgcgccattgcactccagcctgggcaacgagtgaaactccgtctcaaaaaaaagaaaatgtctttctcttccttttatataaatatcgttagggtgaagcattatggtctaatgattcaaatgttttaaagtttaatgcctagcagagaactgccttaaaaaaaaaaaaaaaaagttcatgttggccatggtgaaagggtttgatatggagaaacaaaatcctcaggaaattagataaataaaaatttataagcatttgtattattttttaataaactgcagggttacacaaaaatctagctgatttaacttgtattttgtcacttttttataaaagtttattgtttgatgtttttaaaggtttttgaaatccaggaattaaatcatcccttaataaaatattcgaaattcatatttt

SEQ ID NO: 114727 - DNA, 538 bp, Homo sapiens
  Payload ID: 2415
  Gene Symbol: CASP6
  Gene Name: caspase 6, apoptosis-related cysteine peptidase
  ENST ID: ENST00000505486
  CDS Start-End: 189-431
agctttaactctgggaaggaccagcccgatccacgggagcccgggcggcgcgcaatcagaaccaactggccccacgctcgggggcagggggcggggccgccgaggaagggccgagggcggggccgggcccgggagcctgtggcttcaggaagaggagggcaaggtgtctggctgcgcgtttggctgcaatgagctcggcctcggggctccgcagggggcacccggcaggtggggaagaaaacatgacagaaacagatgccttctataaaagagaaatgtttgatccggcagaaaagtacaaaatggaccacaggaggagaggaattgctttaatcttcaatcatgagaggttcttttggcacttaacactgccagaaaggcggggcacctgcgcagatagagacaatcttacccgcagtgtcaactgttagccacgcagatgccgattgctttgtgtgtgtcttcctgagccatggcgaaggcaatcacatttatgcatatgatgctaaaatcgaaattcagacattaactggcttgt

SEQ ID NO: 114728 - DNA, 587 bp, Homo sapiens
  Payload ID: 2415
  Gene Symbol: CASP6
  Gene Name: caspase 6, apoptosis-related cysteine peptidase
  ENST ID: ENST00000503684
  CDS Start-End: 158-587
gggcttcagctggaggcggccagttcctggcggccagcacaccccggtatctctcttcttcatccaggaaacctgctgctgtctgtcggtttgagccaaaaccacaataacttttttctgcaaagtaatcaactgctaagagcgtggggaagaaaacatgacagaaacagatgccttctataaaagagaaatgtttgatccggcagaaaagtacaaaatggaccacaggaggagaggaattgctttaatcttcaatcatgagaggttcttttggcacttaacactgccagaaaggcggggcacctgcgcagatagagacaatcttacccgcaggttttcagatctaggatttgaagtgaaatgctttaatgatcttaaagcagaagaactactgctcaaaattcatgaggtgtcaactgttagccacgcagatgccgattgctttgtgtgtgtcttcctgagccatggcgaaggcaatcacatttatgcatatgatgctaaaatcgaaattcagacattaactggcttgttcaaaggagacaagtgtcacagcctggttggaaaacccaagatatttatcattcagg

SEQ ID NO: 114729 - DNA, 2659 bp, Homo sapiens
  Payload ID: 2416
  Gene Symbol: CASP7
  Gene Name: caspase 7, apoptosis-related cysteine peptidase
  Uniprot ID: P55210
  ENST ID: ENST00000345633
  CDS Start-End: 385-1296
cccgcgcgcgggctcaactttgtagagcgaggggccaacttggcagagcgcgcggccagctttgcagagagcgccctccagggactatgcgtgcggggacacgggtcgctttgggctcttccacccctgcggagcgcactaccccgagccaggggcggtgcaagccccgcccggccctacccagggcggctcctccctccgcagcgccgagacttttagtttcgctttcgctaaaggggccccagacccttgctgcggagcgacggagagagactgtgccagtcccagccgccctaccgccgtgggaacggcaggaagtggcacttggaaaagaacaccagctgcggtggtagcagtgggatttgtgcttcttatgttacccagatggcagatgatcagggctgtattgaagagcagggggttgaggattcagcaaatgaagattcagtggatgctaagccagaccggtcctcgtttgtaccgtccctcttcagtaagaagaagaaaaatgtcaccatgcgatccatcaagaccacccgggaccgagtgcctacatatcagtacaacatgaattttgaaaagctgggcaaatgcatcataataaacaacaagaactttgataaagtgacaggtatgggcgttcgaaacggaacagacaaagatgccgaggcgctcttcaagtgcttccgaagcctgggttttgacgtgattgtctataatgactgctcttgtgccaagatgcaagatctgcttaaaaaagcttctgaagaggaccatacaaatgccgcctgcttcgcctgcatcctcttaagccatggagaagaaaatgtaatttatgggaaagatggtgtcacaccaataaaggatttgacagcccactttaggggggatagatgcaaaacccttttagagaaacccaaactcttcttcattcaggcttgccgagggaccgagcttgatgatggcatccaggccgactcggggcccatcaatgacacagatgctaatcctcgatacaagatcccagtggaagctgacttcctcttcgcctattccacggttccaggctattactcgtggaggagcccaggaagaggctcctggtttgtgcaagccctctgctccatcctggaggagcacggaaaagacctggaaatcatgcagatcctcaccagggtgaatgacagagttgccaggcactttgagtctcagtctgatgacccacacttccatgagaagaagcagatcccctgtgtggtctccatgctcaccaaggaactctacttcagtcaatagccatatcaggggtacattctagctgagaagcaatgggtcactcattaatgaatcacatttttttatgctcttgaaatattcagaaattctccaggattttaatttcaggaaaatgtattgattcaacagggaagaaactttctggtgctgtcttttgttctctgaattttcagagactttttttataatgttattcatttggtgactgtgtaactttctcttaagattaattttctctttgtatgtctgttaccttgttaatagacttaatacatgcaacagaagtgacttctggagaaagctcatggctgtgtccactgcaattggtggtaacagtggtagagtcatgtttgcacttggcaaaaagaatcccaatgtttgacaaaacacagccaaggggatatttactgctctttattgcagaatgtgggtattgagtgtgatttgaatgatttttcattggcttagggcagattttcatgcaaaagttctcatatgagttagaggagaaaaagcttaatgattctgatatgtatccatcaggatccagtctggaaaacagaaaccattctaggtgtttcaacagagggagtttaatacaggaaattgacttacatagatgataaaagagaagccaaacagcaagaagctgttaccacacccagggctatgaggataatgggaagaggtttggtttcctgtgtccagtagtgggatcatccagaggagctggaaccatggtgggggctgcctagtgggagttaggaccaccaatggattgtggaaaatggagccatgacaagaacaaagccactgactgagatggagtgagctgagacagataagagaataccttggtctcacctatcctgccctcacatcttccaccagcaccttactgcccaggcctatctggaagccacctcaccaaggaccttggaagagcaagggacagtgaggcaggagaagaacaagaaatggatgtaagcctggcccataatgtgaacataagtaatcactaatgctcaacaatttatccattcaatcatttattcattgggttgtcagatagtctatgtatgtgtaaaacaatctgttttggctttatgtgcaaaatctgttatagctttaaaatatatctggaactttttagattattccaagccttattttgagtaaatatttgttacttttagttctataagtgaggaagagtttatggcaaagatttttggcactttgttttcaagatggtgttatcttttgaattcttgataaatgactgtttttttctgcctaatagtaactggttaaaaaacaaatgttcatatttattgattaaaaatgtggttgcttaattcct

SEQ ID NO: 114730 - DNA, 2421 bp, Homo sapiens
  Payload ID: 2416
  Gene Symbol: CASP7
  Gene Name: caspase 7, apoptosis-related cysteine peptidase
  Uniprot ID: P55210
  ENST ID: ENST00000369315
  CDS Start-End: 147-1058
gactgtgccagtcccagccgccctaccgccgtgggaacgatgctgtaatggactgtgttggttggcctccaggcaggaagtggcacttggaaaagaacaccagctgcggtggtagcagtgggatttgtgcttcttatgttacccagatggcagatgatcagggctgtattgaagagcagggggttgaggattcagcaaatgaagattcagtggatgctaagccagaccggtcctcgtttgtaccgtccctcttcagtaagaagaagaaaaatgtcaccatgcgatccatcaagaccacccgggaccgagtgcctacatatcagtacaacatgaattttgaaaagctgggcaaatgcatcataataaacaacaagaactttgataaagtgacaggtatgggcgttcgaaacggaacagacaaagatgccgaggcgctcttcaagtgcttccgaagcctgggttttgacgtgattgtctataatgactgctcttgtgccaagatgcaagatctgcttaaaaaagcttctgaagaggaccatacaaatgccgcctgcttcgcctgcatcctcttaagccatggagaagaaaatgtaatttatgggaaagatggtgtcacaccaataaaggatttgacagcccactttaggggggatagatgcaaaacccttttagagaaacccaaactcttcttcattcaggcttgccgagggaccgagcttgatgatggcatccaggccgactcggggcccatcaatgacacagatgctaatcctcgatacaagatcccagtggaagctgacttcctcttcgcctattccacggttccaggctattactcgtggaggagcccaggaagaggctcctggtttgtgcaagccctctgctccatcctggaggagcacggaaaagacctggaaatcatgcagatcctcaccagggtgaatgacagagttgccaggcactttgagtctcagtctgatgacccacacttccatgagaagaagcagatcccctgtgtggtctccatgctcaccaaggaactctacttcagtcaatagccatatcaggggtacattctagctgagaagcaatgggtcactcattaatgaatcacatttttttatgctcttgaaatattcagaaattctccaggattttaatttcaggaaaatgtattgattcaacagggaagaaactttctggtgctgtcttttgttctctgaattttcagagactttttttataatgttattcatttggtgactgtgtaactttctcttaagattaattttctctttgtatgtctgttaccttgttaatagacttaatacatgcaacagaagtgacttctggagaaagctcatggctgtgtccactgcaattggtggtaacagtggtagagtcatgtttgcacttggcaaaaagaatcccaatgtttgacaaaacacagccaaggggatatttactgctctttattgcagaatgtgggtattgagtgtgatttgaatgatttttcattggcttagggcagattttcatgcaaaagttctcatatgagttagaggagaaaaagcttaatgattctgatatgtatccatcaggatccagtctggaaaacagaaaccattctaggtgtttcaacagagggagtttaatacaggaaattgacttacatagatgataaaagagaagccaaacagcaagaagctgttaccacacccagggctatgaggataatgggaagaggtttggtttcctgtgtccagtagtgggatcatccagaggagctggaaccatggtgggggctgcctagtgggagttaggaccaccaatggattgtggaaaatggagccatgacaagaacaaagccactgactgagatggagtgagctgagacagataagagaataccttggtctcacctatcctgccctcacatcttccaccagcaccttactgcccaggcctatctggaagccacctcaccaaggaccttggaagagcaagggacagtgaggcaggagaagaacaagaaatggatgtaagcctggcccataatgtgaacataagtaatcactaatgctcaacaatttatccattcaatcatttattcattgggttgtcagatagtctatgtatgtgtaaaacaatctgttttggctttatgtgcaaaatctgttatagctttaaaatatatctggaactttttagattattccaagccttattttgagtaaatatttgttacttttagttctataagtgaggaagagtttatggcaaagatttttggcactttgttttcaagatggtgttatcttttgaattcttgataaatgactgtttttttctgcctaatagtaactggttaaaaaacaaatgttcatatttattgattaaaaatgtggttgcttaattcct

SEQ ID NO: 114731 - DNA, 2377 bp, Homo sapiens
  Payload ID: 2416
  Gene Symbol: CASP7
  Gene Name: caspase 7, apoptosis-related cysteine peptidase
  Uniprot ID: P55210
  ENST ID: ENST00000369318
  CDS Start-End: 103-1014
gagacttttagtttcgctttcgctaaaggggccccagacccttgctgcggagcgacggagagagactgtgccagtcccagccgccctaccgccgtgggaacgatggcagatgatcagggctgtattgaagagcagggggttgaggattcagcaaatgaagattcagtggatgctaagccagaccggtcctcgtttgtaccgtccctcttcagtaagaagaagaaaaatgtcaccatgcgatccatcaagaccacccgggaccgagtgcctacatatcagtacaacatgaattttgaaaagctgggcaaatgcatcataataaacaacaagaactttgataaagtgacaggtatgggcgttcgaaacggaacagacaaagatgccgaggcgctcttcaagtgcttccgaagcctgggttttgacgtgattgtctataatgactgctcttgtgccaagatgcaagatctgcttaaaaaagcttctgaagaggaccatacaaatgccgcctgcttcgcctgcatcctcttaagccatggagaagaaaatgtaatttatgggaaagatggtgtcacaccaataaaggatttgacagcccactttaggggggatagatgcaaaacccttttagagaaacccaaactcttcttcattcaggcttgccgagggaccgagcttgatgatggcatccaggccgactcggggcccatcaatgacacagatgctaatcctcgatacaagatcccagtggaagctgacttcctcttcgcctattccacggttccaggctattactcgtggaggagcccaggaagaggctcctggtttgtgcaagccctctgctccatcctggaggagcacggaaaagacctggaaatcatgcagatcctcaccagggtgaatgacagagttgccaggcactttgagtctcagtctgatgacccacacttccatgagaagaagcagatcccctgtgtggtctccatgctcaccaaggaactctacttcagtcaatagccatatcaggggtacattctagctgagaagcaatgggtcactcattaatgaatcacatttttttatgctcttgaaatattcagaaattctccaggattttaatttcaggaaaatgtattgattcaacagggaagaaactttctggtgctgtcttttgttctctgaattttcagagactttttttataatgttattcatttggtgactgtgtaactttctcttaagattaattttctctttgtatgtctgttaccttgttaatagacttaatacatgcaacagaagtgacttctggagaaagctcatggctgtgtccactgcaattggtggtaacagtggtagagtcatgtttgcacttggcaaaaagaatcccaatgtttgacaaaacacagccaaggggatatttactgctctttattgcagaatgtgggtattgagtgtgatttgaatgatttttcattggcttagggcagattttcatgcaaaagttctcatatgagttagaggagaaaaagcttaatgattctgatatgtatccatcaggatccagtctggaaaacagaaaccattctaggtgtttcaacagagggagtttaatacaggaaattgacttacatagatgataaaagagaagccaaacagcaagaagctgttaccacacccagggctatgaggataatgggaagaggtttggtttcctgtgtccagtagtgggatcatccagaggagctggaaccatggtgggggctgcctagtgggagttaggaccaccaatggattgtggaaaatggagccatgacaagaacaaagccactgactgagatggagtgagctgagacagataagagaataccttggtctcacctatcctgccctcacatcttccaccagcaccttactgcccaggcctatctggaagccacctcaccaaggaccttggaagagcaagggacagtgaggcaggagaagaacaagaaatggatgtaagcctggcccataatgtgaacataagtaatcactaatgctcaacaatttatccattcaatcatttattcattgggttgtcagatagtctatgtatgtgtaaaacaatctgttttggctttatgtgcaaaatctgttatagctttaaaatatatctggaactttttagattattccaagccttattttgagtaaatatttgttacttttagttctataagtgaggaagagtttatggcaaagatttttggcactttgttttcaagatggtgttatcttttgaattcttgataaatgactgtttttttctgcctaatagtaactggttaaaaaacaaatgttcatatttattgattaaaaatgtggttgcttaattcct

SEQ ID NO: 114732 - DNA, 2620 bp, Homo sapiens
  Payload ID: 2416
  Gene Symbol: CASP7
  Gene Name: caspase 7, apoptosis-related cysteine peptidase
  ENST ID: ENST00000369321
  CDS Start-End: 87-1253
cccgcgcgcgggctcaactttgtagagcgaggggccaacttggcagagcgcgcggccagctttgcagagagcgccctccagggactatgcgtgcggggacacgggtcgctttgggctcttccacccctgcggagcgcactaccccgagccaggggcggtgcaagccccgcccggccctacccagggcggctcctccctccgcagcgccgagacttttagtttcgctttcgctaaaggggccccagacccttgctgcggagcgacggagagagactgtgccagtcccagccgccctaccgccgtgggaacgatggcagatgatcagggctgtattgaagagcagggggttgaggattcagcaaatgaagattcagtggatgctaagccagaccggtcctcgtttgtaccgtccctcttcagcccctgactctggaactttatatttcaccagtaagaagaagaaaaatgtcaccatgcgatccatcaagaccacccgggaccgagtgcctacatatcagtacaacatgaattttgaaaagctgggcaaatgcatcataataaacaacaagaactttgataaagtgacaggtatgggcgttcgaaacggaacagacaaagatgccgaggcgctcttcaagtgcttccgaagcctgggttttgacgtgattgtctataatgactgctcttgtgccaagatgcaagatctgcttaaaaaagcttctgaagaggaccatacaaatgccgcctgcttcgcctgcatcctcttaagccatggagaagaaaatgtaatttatgggaaagatggtgtcacaccaataaaggatttgacagcccactttaggggggatagatgcaaaacccttttagagaaacccaaactcttcttcattcaggcttgccgagggaccgagcttgatgatggcatccaggccgactcggggcccatcaatgacacagatgctaatcctcgatacaagatcccagtggaagctgacttcctcttcgcctattccacggttccaggctattactcgtggaggagcccaggaagaggctcctggtttgtgcaagccctctgctccatcctggaggagcacggaaaagacctggaaatcatgcagatcctcaccagggtgaatgacagagttgccaggcactttgagtctcagtctgatgacccacacttccatgagaagaagcagatcccctgtgtggtctccatgctcaccaaggaactctacttcagtcaatagccatatcaggggtacattctagctgagaagcaatgggtcactcattaatgaatcacatttttttatgctcttgaaatattcagaaattctccaggattttaatttcaggaaaatgtattgattcaacagggaagaaactttctggtgctgtcttttgttctctgaattttcagagactttttttataatgttattcatttggtgactgtgtaactttctcttaagattaattttctctttgtatgtctgttaccttgttaatagacttaatacatgcaacagaagtgacttctggagaaagctcatggctgtgtccactgcaattggtggtaacagtggtagagtcatgtttgcacttggcaaaaagaatcccaatgtttgacaaaacacagccaaggggatatttactgctctttattgcagaatgtgggtattgagtgtgatttgaatgatttttcattggcttagggcagattttcatgcaaaagttctcatatgagttagaggagaaaaagcttaatgattctgatatgtatccatcaggatccagtctggaaaacagaaaccattctaggtgtttcaacagagggagtttaatacaggaaattgacttacatagatgataaaagagaagccaaacagcaagaagctgttaccacacccagggctatgaggataatgggaagaggtttggtttcctgtgtccagtagtgggatcatccagaggagctggaaccatggtgggggctgcctagtgggagttaggaccaccaatggattgtggaaaatggagccatgacaagaacaaagccactgactgagatggagtgagctgagacagataagagaataccttggtctcacctatcctgccctcacatcttccaccagcaccttactgcccaggcctatctggaagccacctcaccaaggaccttggaagagcaagggacagtgaggcaggagaagaacaagaaatggatgtaagcctggcccataatgtgaacataagtaatcactaatgctcaacaatttatccattcaatcatttattcattgggttgtcagatagtctatgtatgtgtaaaacaatctgttttggctttatgtgcaaaatctgttatagctttaaaatatatctggaactttttagattattccaagccttattttgagtaaatatttgttacttttagttctataagtgaggaagagtttatggcaaagatttttggcactttgttttcaagatggtgttatcttttgaattcttgataaatgactgtttttttctgcctaatagtaactggttaaaaaacaaatgttcatatttattgattaaaaatgtggttgcttaattcctaacc

SEQ ID NO: 114733 - DNA, 2380 bp, Homo sapiens
  Payload ID: 2416
  Gene Symbol: CASP7
  Gene Name: caspase 7, apoptosis-related cysteine peptidase
  Uniprot ID: P55210
  ENST ID: ENST00000369331
  CDS Start-End: 147-908
gcaagctgggctgctgggtgggtacttccttcaaagctgagggagcgtcctacgcccacgcgcgcaggagggcgccccccgcaaagcaacgtctaggagaccacagtggatgccacagcgggcccgaagcggatcagccttgtgggatggcagatgatcagggctgtattgaagagcagggggttgaggattcagcaaatgaagattcagtggatgctaagccagaccggtcctcgtttgtaccgtccctcttcagtaagaagaagaaaaatgtcaccatgcgatccatcaagaccacccgggaccgagtgcctacatatcagtacaacatgaattttgaaaagctgggcaaatgcatcataataaacaacaagaactttgataaagtgacaggtatgggcgttcgaaacggaacagacaaagatgccgaggcgctcttcaagtgcttccgaagcctgggttttgacgtgattgtctataatgactgctcttgtgccaagatgcaagatctgcttaaaaaagcttctgaagaggaccatacaaatgccgcctgcttcgcctgcatcctcttaagccatggagaagaaaatatggaatcttgctctgtcacccaggctggagtgcagcggcgtgatctcggaagactgcaacctccacctcccaggcttgccgagggaccgagcttgatgatggcatccaggccgactcggggcccatcaatgacacagatgctaatcctcgatacaagatcccagtggaagctgacttcctcttcgcctattccacggttccaggctattactcgtggaggagcccaggaagaggctcctggtttgtgcaagccctctgctccatcctggaggagcacggaaaagacctggaaatcatgcagatcctcaccagggtgaatgacagagttgccaggcactttgagtctcagtctgatgacccacacttccatgagaagaagcagatcccctgtgtggtctccatgctcaccaaggaactctacttcagtcaatagccatatcaggggtacattctagctgagaagcaatgggtcactcattaatgaatcacatttttttatgctcttgaaatattcagaaattctccaggattttaatttcaggaaaatgtattgattcaacagggaagaaactttctggtgctgtcttttgttctctgaattttcagagactttttttataatgttattcatttggtgactgtgtaactttctcttaagattaattttctctttgtatgtctgttaccttgttaatagacttaatacatgcaacagaagtgacttctggagaaagctcatggctgtgtccactgcaattggtggtaacagtggtagagtcatgtttgcacttggcaaaaagaatcccaatgtttgacaaaacacagccaaggggatatttactgctctttattgcagaatgtgggtattgagtgtgatttgaatgatttttcattggcttagggcagattttcatgcaaaagttctcatatgagttagaggagaaaaagcttaatgattctgatatgtatccatcaggatccagtctggaaaacagaaaccattctaggtgtttcaacagagggagtttaatacaggaaattgacttacatagatgataaaagagaagccaaacagcaagaagctgttaccacacccagggctatgaggataatgggaagaggtttggtttcctgtgtccagtagtgggatcatccagaggagctggaaccatggtgggggctgcctagtgggagttaggaccaccaatggattgtggaaaatggagccatgacaagaacaaagccactgactgagatggagtgagctgagacagataagagaataccttggtctcacctatcctgccctcacatcttccaccagcaccttactgcccaggcctatctggaagccacctcaccaaggaccttggaagagcaagggacagtgaggcaggagaagaacaagaaatggatgtaagcctggcccataatgtgaacataagtaatcactaatgctcaacaatttatccattcaatcatttattcattgggttgtcagatagtctatgtatgtgtaaaacaatctgttttggctttatgtgcaaaatctgttatagctttaaaatatatctggaactttttagattattccaagccttattttgagtaaatatttgttacttttagttctataagtgaggaagagtttatggcaaagatttttggcactttgttttcaagatggtgttatcttttgaattcttgataaatgactgtttttttctgcctaatagtaactggttaaaaaacaaatgttcatatttattgattaaaaatgtggttgctt

SEQ ID NO: 114734 - DNA, 2271 bp, Homo sapiens
  Payload ID: 2416
  Gene Symbol: CASP7
  Gene Name: caspase 7, apoptosis-related cysteine peptidase
  Uniprot ID: P55210
  ENST ID: ENST00000452490
  CDS Start-End: 68-904
gagtttttattattacagagaagaaggaaactcacttcctgtcgtcgcagagcacagcctagttctgatgcagaggggactgttttcagatggagacactagtaagaagaagaaaaatgtcaccatgcgatccatcaagaccacccgggaccgagtgcctacatatcagtacaacatgaattttgaaaagctgggcaaatgcatcataataaacaacaagaactttgataaagtgacaggtatgggcgttcgaaacggaacagacaaagatgccgaggcgctcttcaagtgcttccgaagcctgggttttgacgtgattgtctataatgactgctcttgtgccaagatgcaagatctgcttaaaaaagcttctgaagaggaccatacaaatgccgcctgcttcgcctgcatcctcttaagccatggagaagaaaatgtaatttatgggaaagatggtgtcacaccaataaaggatttgacagcccactttaggggggatagatgcaaaacccttttagagaaacccaaactcttcttcattcaggcttgccgagggaccgagcttgatgatggcatccaggccgactcggggcccatcaatgacacagatgctaatcctcgatacaagatcccagtggaagctgacttcctcttcgcctattccacggttccaggctattactcgtggaggagcccaggaagaggctcctggtttgtgcaagccctctgctccatcctggaggagcacggaaaagacctggaaatcatgcagatcctcaccagggtgaatgacagagttgccaggcactttgagtctcagtctgatgacccacacttccatgagaagaagcagatcccctgtgtggtctccatgctcaccaaggaactctacttcagtcaatagccatatcaggggtacattctagctgagaagcaatgggtcactcattaatgaatcacatttttttatgctcttgaaatattcagaaattctccaggattttaatttcaggaaaatgtattgattcaacagggaagaaactttctggtgctgtcttttgttctctgaattttcagagactttttttataatgttattcatttggtgactgtgtaactttctcttaagattaattttctctttgtatgtctgttaccttgttaatagacttaatacatgcaacagaagtgacttctggagaaagctcatggctgtgtccactgcaattggtggtaacagtggtagagtcatgtttgcacttggcaaaaagaatcccaatgtttgacaaaacacagccaaggggatatttactgctctttattgcagaatgtgggtattgagtgtgatttgaatgatttttcattggcttagggcagattttcatgcaaaagttctcatatgagttagaggagaaaaagcttaatgattctgatatgtatccatcaggatccagtctggaaaacagaaaccattctaggtgtttcaacagagggagtttaatacaggaaattgacttacatagatgataaaagagaagccaaacagcaagaagctgttaccacacccagggctatgaggataatgggaagaggtttggtttcctgtgtccagtagtgggatcatccagaggagctggaaccatggtgggggctgcctagtgggagttaggaccaccaatggattgtggaaaatggagccatgacaagaacaaagccactgactgagatggagtgagctgagacagataagagaataccttggtctcacctatcctgccctcacatcttccaccagcaccttactgcccaggcctatctggaagccacctcaccaaggaccttggaagagcaagggacagtgaggcaggagaagaacaagaaatggatgtaagcctggcccataatgtgaacataagtaatcactaatgctcaacaatttatccattcaatcatttattcattgggttgtcagatagtctatgtatgtgtaaaacaatctgttttggctttatgtgcaaaatctgttatagctttaaaatatatctggaactttttagattattccaagccttattttgagtaaatatttgttacttttagttctataagtgaggaagagtttatggcaaagatttttggcactttgttttcaagatggtgttatcttttgaattcttgataaatgactgtttttttctgcctaatagtaactggttaaaaaacaaatgttcatatttattgattaaaaatgtggttgcttaattcctaacc

SEQ ID NO: 114735 - DNA, 834 bp, Homo sapiens
  Payload ID: 2416
  Gene Symbol: CASP7
  Gene Name: caspase 7, apoptosis-related cysteine peptidase
  ENST ID: ENST00000429617
  CDS Start-End: 168-834
ccaggagcagcatctccaccagcaagctgggctgctgggtgggtacttccttcaaagctgagggagcgtcctacgcccacgcgcgcaggagggcgccccccgcaaagcaacgtctaggagaccacagtggatgccacagcgggcccgaagcggatcagccttgtgggatggcagatgatcagggctgtattgaagagcagggggttgaggattcagcaaatgaagattcagtggatgctaagccagaccggtcctcgtttgtaccgtccctcttcagtaagaagaagaaaaatgtcaccatgcgatccatcaagaccacccgggaccgagtgcctacatatcagtacaacatgaattttgaaaagctgggcaaatgcatcataataaacaacaagaactttgataaagtgacaggtatgggcgttcgaaacggaacagacaaagatgccgaggcgctcttcaagtgcttccgaagcctgggttttgacgtgattgtctataatgactgctcttgtgccaagatgcaagatctgcttaaaaaagcttctgaagaggaccatacaaatgccgcctgcttcgcctgcatcctcttaagccatggagaagaaaatgtaatttatgggaaagatggtgtcacaccaataaaggatttgacagcccactttaggggggatagatgcaaaacccttttagagaaacccaaactcttcttcattcaggcttgccgagggaccgagcttgatgatggcatccaggccgactcggggcccatcaatgacacagatgctaatcctcgatacaagatcccagtggaagctgacttcctcttcgcct

SEQ ID NO: 114736 - DNA, 2555 bp, Homo sapiens
  Payload ID: 2416
  Gene Symbol: CASP7
  Gene Name: caspase 7, apoptosis-related cysteine peptidase
  Uniprot ID: P55210
  ENST ID: ENST00000614447
  CDS Start-End: 311-1072
cccgcgcgcgggctcaactttgtagagcgaggggccaacttggcagagcgcgcggccagctttgcagagagcgccctccagggactatgcgtgcggggacacgggtcgctttgggctcttccacccctgcggagcgcactaccccgagccaggggcggtgcaagccccgcccggccctacccagggcggctcctccctccgcagcgccgagacttttagtttcgctttcgctaaaggggccccagacccttgctgcggagcgacggagagagactgtgccagtcccagccgccctaccgccgtgggaacgatggcagatgatcagggctgtattgaagagcagggggttgaggattcagcaaatgaagattcagtggatgctaagccagaccggtcctcgtttgtaccgtccctcttcagtaagaagaagaaaaatgtcaccatgcgatccatcaagaccacccgggaccgagtgcctacatatcagtacaacatgaattttgaaaagctgggcaaatgcatcataataaacaacaagaactttgataaagtgacaggtatgggcgttcgaaacggaacagacaaagatgccgaggcgctcttcaagtgcttccgaagcctgggttttgacgtgattgtctataatgactgctcttgtgccaagatgcaagatctgcttaaaaaagcttctgaagaggaccatacaaatgccgcctgcttcgcctgcatcctcttaagccatggagaagaaaatatggaatcttgctctgtcacccaggctggagtgcagcggcgtgatctcggaagactgcaacctccacctcccaggcttgccgagggaccgagcttgatgatggcatccaggccgactcggggcccatcaatgacacagatgctaatcctcgatacaagatcccagtggaagctgacttcctcttcgcctattccacggttccaggctattactcgtggaggagcccaggaagaggctcctggtttgtgcaagccctctgctccatcctggaggagcacggaaaagacctggaaatcatgcagatcctcaccagggtgaatgacagagttgccaggcactttgagtctcagtctgatgacccacacttccatgagaagaagcagatcccctgtgtggtctccatgctcaccaaggaactctacttcagtcaatagccatatcaggggtacattctagctgagaagcaatgggtcactcattaatgaatcacatttttttatgctcttgaaatattcagaaattctccaggattttaatttcaggaaaatgtattgattcaacagggaagaaactttctggtgctgtcttttgttctctgaattttcagagactttttttataatgttattcatttggtgactgtgtaactttctcttaagattaattttctctttgtatgtctgttaccttgttaatagacttaatacatgcaacagaagtgacttctggagaaagctcatggctgtgtccactgcaattggtggtaacagtggtagagtcatgtttgcacttggcaaaaagaatcccaatgtttgacaaaacacagccaaggggatatttactgctctttattgcagaatgtgggtattgagtgtgatttgaatgatttttcattggcttagggcagattttcatgcaaaagttctcatatgagttagaggagaaaaagcttaatgattctgatatgtatccatcaggatccagtctggaaaacagaaaccattctaggtgtttcaacagagggagtttaatacaggaaattgacttacatagatgataaaagagaagccaaacagcaagaagctgttaccacacccagggctatgaggataatgggaagaggtttggtttcctgtgtccagtagtgggatcatccagaggagctggaaccatggtgggggctgcctagtgggagttaggaccaccaatggattgtggaaaatggagccatgacaagaacaaagccactgactgagatggagtgagctgagacagataagagaataccttggtctcacctatcctgccctcacatcttccaccagcaccttactgcccaggcctatctggaagccacctcaccaaggaccttggaagagcaagggacagtgaggcaggagaagaacaagaaatggatgtaagcctggcccataatgtgaacataagtaatcactaatgctcaacaatttatccattcaatcatttattcattgggttgtcagatagtctatgtatgtgtaaaacaatctgttttggctttatgtgcaaaatctgttatagctttaaaatatatctggaactttttagattattccaagccttattttgagtaaatatttgttacttttagttctataagtgaggaagagtttatggcaaagatttttggcactttgttttcaagatggtgttatcttttgaattcttgataaatgactgtttttttctgcctaatagtaactggttaaaaaacaaatgttcatatttattgattaaaaatgtggttgcttaattcctaacc

SEQ ID NO: 114737 - DNA, 2378 bp, Homo sapiens
  Payload ID: 2416
  Gene Symbol: CASP7
  Gene Name: caspase 7, apoptosis-related cysteine peptidase
  Uniprot ID: P55210
  ENST ID: ENST00000621607
  CDS Start-End: 1-1011
atggactgtgttggttggcctccaggcaggaagtggcacttggaaaagaacaccagctgcggtggtagcagtgggatttgtgcttcttatgttacccagatggcagatgatcagggctgtattgaagagcagggggttgaggattcagcaaatgaagattcagtggatgctaagccagaccggtcctcgtttgtaccgtccctcttcagtaagaagaagaaaaatgtcaccatgcgatccatcaagaccacccgggaccgagtgcctacatatcagtacaacatgaattttgaaaagctgggcaaatgcatcataataaacaacaagaactttgataaagtgacaggtatgggcgttcgaaacggaacagacaaagatgccgaggcgctcttcaagtgcttccgaagcctgggttttgacgtgattgtctataatgactgctcttgtgccaagatgcaagatctgcttaaaaaagcttctgaagaggaccatacaaatgccgcctgcttcgcctgcatcctcttaagccatggagaagaaaatgtaatttatgggaaagatggtgtcacaccaataaaggatttgacagcccactttaggggggatagatgcaaaacccttttagagaaacccaaactcttcttcattcaggcttgccgagggaccgagcttgatgatggcatccaggccgactcggggcccatcaatgacacagatgctaatcctcgatacaagatcccagtggaagctgacttcctcttcgcctattccacggttccaggctattactcgtggaggagcccaggaagaggctcctggtttgtgcaagccctctgctccatcctggaggagcacggaaaagacctggaaatcatgcagatcctcaccagggtgaatgacagagttgccaggcactttgagtctcagtctgatgacccacacttccatgagaagaagcagatcccctgtgtggtctccatgctcaccaaggaactctacttcagtcaatagccatatcaggggtacattctagctgagaagcaatgggtcactcattaatgaatcacatttttttatgctcttgaaatattcagaaattctccaggattttaatttcaggaaaatgtattgattcaacagggaagaaactttctggtgctgtcttttgttctctgaattttcagagactttttttataatgttattcatttggtgactgtgtaactttctcttaagattaattttctctttgtatgtctgttaccttgttaatagacttaatacatgcaacagaagtgacttctggagaaagctcatggctgtgtccactgcaattggtggtaacagtggtagagtcatgtttgcacttggcaaaaagaatcccaatgtttgacaaaacacagccaaggggatatttactgctctttattgcagaatgtgggtattgagtgtgatttgaatgatttttcattggcttagggcagattttcatgcaaaagttctcatatgagttagaggagaaaaagcttaatgattctgatatgtatccatcaggatccagtctggaaaacagaaaccattctaggtgtttcaacagagggagtttaatacaggaaattgacttacatagatgataaaagagaagccaaacagcaagaagctgttaccacacccagggctatgaggataatgggaagaggtttggtttcctgtgtccagtagtgggatcatccagaggagctggaaccatggtgggggctgcctagtgggagttaggaccaccaatggattgtggaaaatggagccatgacaagaacaaagccactgactgagatggagtgagctgagacagataagagaataccttggtctcacctatcctgccctcacatcttccaccagcaccttactgcccaggcctatctggaagccacctcaccaaggaccttggaagagcaagggacagtgaggcaggagaagaacaagaaatggatgtaagcctggcccataatgtgaacataagtaatcactaatgctcaacaatttatccattcaatcatttattcattgggttgtcagatagtctatgtatgtgtaaaacaatctgttttggctttatgtgcaaaatctgttatagctttaaaatatatctggaactttttagattattccaagccttattttgagtaaatatttgttacttttagttctataagtgaggaagagtttatggcaaagatttttggcactttgttttcaagatggtgttatcttttgaattcttgataaatgactgtttttttctgcctaatagtaactggttaaaaaacaaatgttcatatttattgattaaaaatgtggttgcttaattcctaacc

SEQ ID NO: 114738 - DNA, 2467 bp, Homo sapiens
  Payload ID: 2416
  Gene Symbol: CASP7
  Gene Name: caspase 7, apoptosis-related cysteine peptidase
  Uniprot ID: P55210
  ENST ID: ENST00000621345
  CDS Start-End: 189-1100
aacaaatatttcccgaaagatccaggagcagcatctccaccagcaagctgggctgctgggtgggtacttccttcaaagctgagggagcgtcctacgcccacgcgcgcaggagggcgccccccgcaaagcaacgtctaggagaccacagtggatgccacagcgggcccgaagcggatcagccttgtgggatggcagatgatcagggctgtattgaagagcagggggttgaggattcagcaaatgaagattcagtggatgctaagccagaccggtcctcgtttgtaccgtccctcttcagtaagaagaagaaaaatgtcaccatgcgatccatcaagaccacccgggaccgagtgcctacatatcagtacaacatgaattttgaaaagctgggcaaatgcatcataataaacaacaagaactttgataaagtgacaggtatgggcgttcgaaacggaacagacaaagatgccgaggcgctcttcaagtgcttccgaagcctgggttttgacgtgattgtctataatgactgctcttgtgccaagatgcaagatctgcttaaaaaagcttctgaagaggaccatacaaatgccgcctgcttcgcctgcatcctcttaagccatggagaagaaaatgtaatttatgggaaagatggtgtcacaccaataaaggatttgacagcccactttaggggggatagatgcaaaacccttttagagaaacccaaactcttcttcattcaggcttgccgagggaccgagcttgatgatggcatccaggccgactcggggcccatcaatgacacagatgctaatcctcgatacaagatcccagtggaagctgacttcctcttcgcctattccacggttccaggctattactcgtggaggagcccaggaagaggctcctggtttgtgcaagccctctgctccatcctggaggagcacggaaaagacctggaaatcatgcagatcctcaccagggtgaatgacagagttgccaggcactttgagtctcagtctgatgacccacacttccatgagaagaagcagatcccctgtgtggtctccatgctcaccaaggaactctacttcagtcaatagccatatcaggggtacattctagctgagaagcaatgggtcactcattaatgaatcacatttttttatgctcttgaaatattcagaaattctccaggattttaatttcaggaaaatgtattgattcaacagggaagaaactttctggtgctgtcttttgttctctgaattttcagagactttttttataatgttattcatttggtgactgtgtaactttctcttaagattaattttctctttgtatgtctgttaccttgttaatagacttaatacatgcaacagaagtgacttctggagaaagctcatggctgtgtccactgcaattggtggtaacagtggtagagtcatgtttgcacttggcaaaaagaatcccaatgtttgacaaaacacagccaaggggatatttactgctctttattgcagaatgtgggtattgagtgtgatttgaatgatttttcattggcttagggcagattttcatgcaaaagttctcatatgagttagaggagaaaaagcttaatgattctgatatgtatccatcaggatccagtctggaaaacagaaaccattctaggtgtttcaacagagggagtttaatacaggaaattgacttacatagatgataaaagagaagccaaacagcaagaagctgttaccacacccagggctatgaggataatgggaagaggtttggtttcctgtgtccagtagtgggatcatccagaggagctggaaccatggtgggggctgcctagtgggagttaggaccaccaatggattgtggaaaatggagccatgacaagaacaaagccactgactgagatggagtgagctgagacagataagagaataccttggtctcacctatcctgccctcacatcttccaccagcaccttactgcccaggcctatctggaagccacctcaccaaggaccttggaagagcaagggacagtgaggcaggagaagaacaagaaatggatgtaagcctggcccataatgtgaacataagtaatcactaatgctcaacaatttatccattcaatcatttattcattgggttgtcagatagtctatgtatgtgtaaaacaatctgttttggctttatgtgcaaaatctgttatagctttaaaatatatctggaactttttagattattccaagccttattttgagtaaatatttgttacttttagttctataagtgaggaagagtttatggcaaagatttttggcactttgttttcaagatggtgttatcttttgaattcttgataaatgactgtttttttctgcctaatagtaactggttaaaaaacaaatgttcatatttattgattaaaaatgtggttgcttaattcctaacc

SEQ ID NO: 114739 - DNA, 6151 bp, Homo sapiens
  Payload ID: 2417
  Gene Symbol: CASP8AP2
  Gene Name: caspase 8 associated protein 2
  ENST ID: ENST00000551025
  CDS Start-End: 236-6151
aaaggaaccgggttgtcttgggccgggcagggcgggtaagttgtcgtaggggcccggtccgtgagggactgctaaggaagaggctgcatggcgcggtagtcccccgagtggaggtcggctgcccctgggaaaccagagagtcggagggagtccatctggagcggccaagtaggtcggggaagggccgcgcctgacgtctggccgcaggtggtgactctcaaaaggaaataggatcatggcagcagatgatgacaatggtgatggaacaagtttatttgatgtcttttctgcttctcctcttaagaacaatgatgaaggctcactggacatatacgctgggttggacagtgctgtttctgacagcgcttccaaatcctgtgtaccatcaagaaattgtttggacttatatgaagagatcctgactgaagaaggaactgcaaaggaggcaacatataatgatttgcaagtagaatatggaaaatgtcaactacaaatgaaagagctgatgaaaaaatttaaagaaatacagacacagaatttcagcttaataaacgaaaaccagtctcttaagaagaatatttcagcacttatcaaaactgccagagtggaaataaaccgcaaggatgaagaaataagtaatcttcaccaaagattgtctgagtttccacattttcgaaataatcataaaactgcaaggacatttgatacagttaaaacaaaagatcttaaatctagatctccacatttggatgattgttcaaagactgatcacagagctaaaagtgatgtttctaaagatgtacatcatagcacttcactgccaaatctggaaaaggaaggaaaaccacattctgataaaaggagtacttcacatttacctacatctgttgagaaacactgcactaatggtgtttggtcacgttctcattatcaggttggcgagggtagctcaaatgaggatagtagaagaggaagaaaagatattagacatagccagtttaacagaggaactgaaagagtacgaaaagacttaagtactggctgtggtgatggtgaaccaaggatattggaggctagtcaaaggctacaaggacatcctgagaaatatggtaaaggtgaaccaaagactgaaagcaaaagttcgaagtttaaaagtaactcagattctgactataaaggtgaacgcattaactcttcttgggagaaagagacccctggagaaaggtcacacagtcgagtagactctcaaagtgacaaaaaactagaaagacaaagtgaaagatcacaaaatataaataggaaagaagttaaatcacaagacaaagaagaaagaaaagttgatcaaaaacctaaatcagtagtaaaggaccaagatcactggagaagatctgaacgagcatcacttcctcattccaagaatgaaataacattttctcataattcaagtaaataccatctagaagagagaagaggatgggaagattgtaaaagagacaagagtgtaaacagtcatagttttcaagatggaagatgtccatcttctctttcaaacagtagaactcacaaaaacattgactctaaggaagttgatgccatgcatcagtgggaaaatacacctttaaaagcagaaagacatagaactgaagataagaggaaaagagaacaagaaagcaaagaagaaaataggcatattagaaatgaaaaaagagtacctacagaacatttgcagaagactaataaggaaactaagaaaaccactactgatttaaagaaacagaatgaaccaaagactgataagggagaagtccttgataatggtgtttctgaaggagcagataataaagagcttgcaatgaaagctgagagtggtccaaatgaaacaaaaaacaaggacctaaaattgagttttatgaaaaaattgaacttaactctttctcctgctaaaaagcaacctgtttcccaggataatcagcataaaataactgatattcccaagtccagtggtgtatgtgattcagagtcttcaatgcaagttaaaacagtggcatatgttccctccataagtgaacatatcttgggggaagcagctgtcagtgaacataccatgggggaaaccaagtcaacgttattggaaccaaaggttgctcttctagcagtgactgaacccaggatcggtatctcagaaaccaacaaggaagacgaaaatagtttgttagttaggtctgttgacaatactatgcattgtgaagagcccatttgtggtacagagacttccttcccatctcctatggaaatacaacagacagaatccttgtttccatcaacaggaatgaaacaaaccattaataatggaagggcagcagctcctgtggtaatggatgtattacaaacagatgtgtctcaaaactttggcttggaattggataccaaaagaaatgataattcagattattgtggtatttctgaaggtatggagatgaaggtggcactttcaacaacagtgagtgaaaccactgaaagcattttgcagccttcaattgaggaagctgatattttgccaataatgctttcagaagataataacccaaaatttgagccttctgttatagttacaccactggttgagagtaagtcgtgtcatctggagccttgcttacctaaagagactctagattcttcacttcagcagactgagttaatggaccacagaatggcaactggtgaaacaaactcagtatatcatgatgatgataactcggttttgagcattgaccttaatcacctgagacctattccagaagccatcagtcctctgaatagtccagtgagacctgtagcaaaagttcttagaaatgaaagcccacctcaagttccagtgtataataacagtcataaagatgtgtttttaccaaattcagctcattctacctctaagagtcagtctgatctcaataaggaaaatcaaaagccaatttacaaatctgacaaatgtacagaagcagacacatgtaagaattcaccattagatgaattagaagaaggagaaattagaagtgatagtgaaacatctaaaccacaagaaagttttgaaaaaaattccaaacgtagagtgtcagctgatgtgcggaagtcaaagactatcccacgacgtgggaaaagtactgtgtgtttagataaagacagtaggaaaacacatgtaagaatccatcagaccaataacaaatggaataaaagacctgataaatctagcagatcttcaaaaacagagaagaaagataaagtgatgagcacttccagcttggaaaaaatagttccaattattgctgtaccctcttctgaacaagagatcatgcacatgttacgaatgataagaaaacatgtaagaaaaaattatatgaaattcaaggcaaaattttcattaatacaatttcacagaattattgagtcagcaattttgagttttacatctttaattaaacatctcaacttacacaaaatctctaagtcagtgactaccttacagaagaatctctgtgatattatagagtctaaacttaagcaagttaaaaagaatggcatagttgatcgtttatttgaacagcaactaccagatatgaaaaaaaaattgtggaagtttgtagatgaccaacttgattatttgtttgcaaagcttaagaaaatcttagtatgtgattccaaaagctttggaagagatagtgatgaaggcaaacttgaaaaaacaagtaaacagaatgcacagtattcaaatagtcagaaaaggagtgtggacaactccaacagagaattgctgaaagaaaaattatcaaaatcagaagaccctgttcattataagtctttagtgggatgtaaaaaatctgaggaaaattatcaagaccaaaataactccagtattaacactgtaaagcatgacattaaaaaaaattttaacatctgctttgataatataaagaactctcaatccgaagagcgctccttggaagtacactgtccaagcaccccaaagtcagaaaaaaacgaaggaagcagcatagaggatgcacagacatcccagcatgcaactttgaagccagaacgaagtttcgagattcttaccgaacagcaagcatcgagccttacttttaatttagtgagtgatgcacaaatgggtgaaatatttaaaagtttgttgcaaggttctgatcttttagacagcagtgttaactgtactgaaaaaagtgagtgggagttaaagactccagagaagcagctgctagagactcttaagtgcgagtctataccagcttgtacaacagaagagctagtttcaggggtggcttctccatgtcctaaaatgattagtgatgataattggtcattattatcatctgaaaaaggtccatctctgtcttcagggctttcattgccggttcatcctgatgtgttggatgaaagttgtatgtttgaagtgtctactaacctacctttaagtaaagataatgtgtgtagtgtagaaaagagcaagccctgcgtttcttccatacttcttgaagatctagcagtctctttaacagtaccatcgcctctgaagtcagatggtcatctcagttttttaaagcctgatatgtcgtccagttcaactcctgaagaagtcattagtgctcattttagtgaagatgccttacttgaggaagaggatgcatctgagcaagatattcatttagctctggagtctgataattcaagcagtaaatcaagttgttcttcttcctggacaagccgatctgttgctccaggctttcagtaccaccctaatctacctatgcatgccgtcataatggaaaagtccaatgatcatttcattgtgaaaatacgacgtgcaacaccatctacctcttctggccttaaacagagtatgatgcctgatgaattattgacatctttgcccagacatggaaaggaagctgatgaaggaccagagaaagaatatatttcatgtcagaacacagtttttaaatctgtggaggaattggaaaactccaacaaaaatgttgatggcagcaagtcaactcatgaagaacagagctctatgatacaaacacaggttcctgatatatatgaatttcttaaagatgcttcagataagatgggtcatagtgatgaagtggctgatgaatgtttcaaattgcatcaagtatgggaaacaaaagtgcctgaaagcattgaagaattgccttcaatggaagaaatctcacactctgttggggaacatcttccaaacacatacgtagatctaacgaaagatccagtcactgaaaccaaaaacttgggggaattcatagaagtaacagttttacatattgatcagttgggatgttctggaggcaatttaaatcagagtgctcaaatattagacaattctttgcaggctgatactgtaggtgcttttattgatttgacacaagatgcttcaagtgaggctaaaagtgaaggtaatcatcctgcattagctgtggaagacttgggatgtggggtgatacaggtagatgaagataattgtaaggaagaaaaggcacaagtggcaaacaggcctttaaaatgcattgttgaggaaacctatatcgacttgaccacagaatctcccagttcatgtgaagtaaaaaaagatgagttaaaatcagagccaggatcaaattgtgataactcggagttgcctgggactttgcataattctcacaaaaagagaagaaacatttctgatctaaatcatcctcataaaaaacaaagaaaggaaacagacttaactaataaggaaaagaccaagaaacctacccaagattcttgtgagaatactgaagctcaccaaaagaaagccagtaagaagaaggcccctcctgtgactaaagatccctcatcattaaaggcaaccccagggattaaggattcatcagcagcacttgccacttctacaagtctttctgcaaaaaatgttattaaaaagaagggagaaattatcattttatggacaagaaatgatgaccgggaaattttattggagtgtcagaaaagagggccatcatttaaaacatttgcatatttagccgccaagttggataaaaatccaaatcaggtaactacccaatttttacatctc

SEQ ID NO: 114740 - DNA, 1153 bp, Homo sapiens
  Payload ID: 2417
  Gene Symbol: CASP8AP2
  Gene Name: caspase 8 associated protein 2
  ENST ID: ENST00000552401
  CDS Start-End: 70-1153
gggcagaaaggaaccgggttgtcttgggccgggcagggcgggtggtgactctcaaaaggaaataggatcatggcagcagatgatgacaatggtgatggaacaagtttatttgatgtcttttctgcttctcctcttaagaacaatgatgaaggctcactggacatatacgctgggttggacagtgctgtttctgacagcgcttccaaatcctgtgtaccatcaagaaattgtttggacttatatgaagagatcctgactgaagaaggaactgcaaaggaggcaacatataatgatttgcaagtagaatatggaaaatgtcaactacaaatgaaagagctgatgaaaaaatttaaagaaatacagacacagaatttcagcttaataaacgaaaaccagtctcttaagaagaatatttcagcacttatcaaaactgccagagtggaaataaaccgcaaggatgaagaaataagtaatcttcaccaaagattgtctgagtttccacattttcgaaataatcataaaactgcaaggacatttgatacagttaaaacaaaagatcttaaatctagatctccacatttggatgattgttcaaagactgatcacagagctaaaagtgatgtttctaaagatgtacatcatagcacttcactgccaaatctggaaaaggaaggaaaaccacattctgataaaaggagtacttcacatttacctacatctgttgagaaacactgcactaatggtgtttggtcacgttctcattatcaggttggcgagggtagctcaaatgaggatagtagaagaggaagaaaagatattagacatagccagtttaacagaggaactgaaagagtacgaaaagacttaagtactggctgtggtgatggtgaaccaaggatattggaggctagtcaaaggctacaaggacatcctgagaaatatggtaaaggtgaaccaaagactgaaagcaaaagttcgaagtttaaaagtaactcagattctgactataaaggtgaacgcattaactcttcttgggagaaagagacccctggagaaaggtcacacagtcgagtagactctcaaagtgacaaaaaactagaaagacaaagtgaaagatcacaaaatataaataggaaagaagttaaatcacaag

SEQ ID NO: 114741 - DNA, 1280 bp, Homo sapiens
  Payload ID: 2417
  Gene Symbol: CASP8AP2
  Gene Name: caspase 8 associated protein 2
  ENST ID: ENST00000419040
  CDS Start-End: 197-1280
aaaggaaccgggttgtcttgggccgggcagggcgggtaagttgtcgtaggggcccggtccgtgagggactgctaaggaagaggctgcatggcgcggtagtcccccgagtggaggtcggctgcccctgggaaaccagagagtcggagggagtccatctggagcggccaagtggtgactctcaaaaggaaataggatcatggcagcagatgatgacaatggtgatggaacaagtttatttgatgtcttttctgcttctcctcttaagaacaatgatgaaggctcactggacatatacgctgggttggacagtgctgtttctgacagcgcttccaaatcctgtgtaccatcaagaaattgtttggacttatatgaagagatcctgactgaagaaggaactgcaaaggaggcaacatataatgatttgcaagtagaatatggaaaatgtcaactacaaatgaaagagctgatgaaaaaatttaaagaaatacagacacagaatttcagcttaataaacgaaaaccagtctcttaagaagaatatttcagcacttatcaaaactgccagagtggaaataaaccgcaaggatgaagaaataagtaatcttcaccaaagattgtctgagtttccacattttcgaaataatcataaaactgcaaggacatttgatacagttaaaacaaaagatcttaaatctagatctccacatttggatgattgttcaaagactgatcacagagctaaaagtgatgtttctaaagatgtacatcatagcacttcactgccaaatctggaaaaggaaggaaaaccacattctgataaaaggagtacttcacatttacctacatctgttgagaaacactgcactaatggtgtttggtcacgttctcattatcaggttggcgagggtagctcaaatgaggatagtagaagaggaagaaaagatattagacatagccagtttaacagaggaactgaaagagtacgaaaagacttaagtactggctgtggtgatggtgaaccaaggatattggaggctagtcaaaggctacaaggacatcctgagaaatatggtaaaggtgaaccaaagactgaaagcaaaagttcgaagtttaaaagtaactcagattctgactataaaggtgaacgcattaactcttcttgggagaaagagacccctggagaaaggtcacacagtcgagtagactctcaaagtgacaaaaaactagaaagacaaagtgaaagatcacaaaatataaataggaaagaagttaaatcacaag

SEQ ID NO: 114742 - DNA, 2540 bp, Homo sapiens
  Payload ID: 2418
  Gene Symbol: CASP8
  Gene Name: caspase 8, apoptosis-related cysteine peptidase
  Uniprot ID: Q14790
  ENST ID: ENST00000264274
  CDS Start-End: 236-1423
gtgctctgagtttttggtttctgtttcaccttgtgtctgagctggtctgaaggctggttgttcagactgagcttcctgcctgcctgtaccccgccaacagcttcagaagaaggagcagcccctgggtgcgtccactttctgggcacgtgaggttgggccttggccgcctgagcccttgagttggtcacttgaaccttgggaatattgagattatattctcctgccttttaaaaagatggacttcagcagaaatctttatgatattggggaacaactggacagtgaagatctggcctccctcaagttcctgagcctggactacattccgcaaaggaagcaagaacccatcaaggatgccttgatgttattccagagactccaggaaaagagaatgttggaggaaagcaatctgtccttcctgaaggagctgctcttccgaattaatagactggatttgctgattacctacctaaacactagaaaggaggagatggaaagggaacttcagacaccaggcagggctcaaatttctgcctacagggtcatgctctatcagatttcagaagaagtgagcagatcagaattgaggtcttttaagtttcttttgcaagaggaaatctccaaatgcaaactggatgatgacatgaacctgctggatattttcatagagatggagaagagggtcatcctgggagaaggaaagttggacatcctgaaaagagtctgtgcccaaatcaacaagagcctgctgaagataatcaacgactatgaagaattcagcaaaggggctttgaccacgacctttgaagagcttcattttgagatcaagccccacgatgactgcacagtagagcaaatctatgagattttgaaaatctaccaactcatggaccacagtaacatggactgcttcatctgctgtatcctctcccatggagacaagggcatcatctatggcactgatggacaggaggcccccatctatgagctgacatctcagttcactggtttgaagtgcccttcccttgctggaaaacccaaagtgttttttattcaggcttgtcagggggataactaccagaaaggtatacctgttgagactgattcagaggagcaaccctatttagaaatggatttatcatcacctcaaacgagatatatcccggatgaggctgactttctgctggggatggccactgtgaataactgtgtttcctaccgaaaccctgcagagggaacctggtacatccagtcactttgccagagcctgagagagcgatgtcctcgaggcgatgatattctcaccatcctgactgaagtgaactatgaagtaagcaacaaggatgacaagaaaaacatggggaaacagatgcctcagcctactttcacactaagaaaaaaacttgtcttcccttctgattgatggtgctattttgtttgttttgttttgttttgtttttttgagacagaatctcgctctgtcgcccaggctggagtgcagtggcgtgatctcggctcaccgcaagctccgcctcccgggttcaggccattctcctgcctcagcctcccgagtagctgggactacaggggcccgccaccacacctggctaattttttaaaaatatttttagtagagacagggtttcactgtgttagccagggtggtcttgatctcctgacctcgtgatccacccacctcggcctcccaaagtgctgggattacaggcgtgagccaccgcgcctggccgatggtactatttagatataacactatgtttatttactaattttctagattttctactttattaattgttttgcacttttttataagagctaaagttaaataggatattaacaacaataacactgtctcctttctcttatgcttaaggctttgggaatgtttttagctggtggcaataaataccagacacgtacaaaatccagctatgaatatagagggcttatgattcagattgttatctatcaactataagcccactgttaatattctattaactttaattctctttcaaagctaaattccacactaccacattaaaaaaattagaaagtagccacgtatggtggctcatgtctataatcccagcactttgggaggttgaggtgggaggattgcttgaacccaagaggtcaaggctgcagtgagccatgttcacaccgctgcactcaagcttgggtgacagaacaagaccccgtctcaaaaaaaattttttttttaataaaacaaaatttgtttgaaatcttttaaaaattcaaatgatttttacaagttttaaataagctctccccaaacttgctttatgccttcttattgcttttatgatatatatatgcttggctaactatatttgctttttgctaacaatgctctggggtctttttatgcatttgcatttgctctttcatctctgcttggattattttaaatcattaggaattaagttatctttaaaatttaagtatcttttttcaaaaacattttttaatagaataaaatataatttgatcttatt

SEQ ID NO: 114743 - DNA, 1906 bp, Homo sapiens
  Payload ID: 2418
  Gene Symbol: CASP8
  Gene Name: caspase 8, apoptosis-related cysteine peptidase
  Uniprot ID: Q14790
  ENST ID: ENST00000264275
  CDS Start-End: 281-1771
tttcaccttgtgtctgagctggtctgaaggctggttgttcagactgagcttcctgcctgcctgtaccccgccaacagcttcagaagaaggtgactggtggctgcctgaggaataccagtgggcaagagaattagcatttctggagcatctgctgtctgagcagcccctgggtgcgtccactttctgggcacgtgaggttgggccttggccgcctgagcccttgagttggtcacttgaaccttgggaatattgagattatattctcctgccttttaaaaagatggacttcagcagaaatctttatgatattggggaacaactggacagtgaagatctggcctccctcaagttcctgagcctggactacattccgcaaaggaagcaagaacccatcaaggatgccttgatgttattccagagactccaggaaaagagaatgttggaggaaagcaatctgtccttcctgaaggagctgctcttccgaattaatagactggatttgctgattacctacctaaacactagaaaggaggagatggaaagggaacttcagacaccaggcagggctcaaatttctgcctacaggttccacttctgccgcatgagctgggctgaagcaaacagccagtgccagacacagtctgtacctttctggcggagggtcgatcatctattaataagggtcatgctctatcagatttcagaagaagtgagcagatcagaattgaggtcttttaagtttcttttgcaagaggaaatctccaaatgcaaactggatgatgacatgaacctgctggatattttcatagagatggagaagagggtcatcctgggagaaggaaagttggacatcctgaaaagagtctgtgcccaaatcaacaagagcctgctgaagataatcaacgactatgaagaattcagcaaaggggaggagttgtgtggggtaatgacaatctcggactctccaagagaacaggatagtgaatcacagactttggacaaagtttaccaaatgaaaagcaaacctcggggatactgtctgatcatcaacaatcacaattttgcaaaagcacgggagaaagtgcccaaacttcacagcattagggacaggaatggaacacacttggatgcaggggctttgaccacgacctttgaagagcttcattttgagatcaagccccacgatgactgcacagtagagcaaatctatgagattttgaaaatctaccaactcatggaccacagtaacatggactgcttcatctgctgtatcctctcccatggagacaagggcatcatctatggcactgatggacaggaggcccccatctatgagctgacatctcagttcactggtttgaagtgcccttcccttgctggaaaacccaaagtgttttttattcaggcttgtcagggggataactaccagaaaggtatacctgttgagactgattcagaggagcaaccctatttagaaatggatttatcatcacctcaaacgagatatatcccggatgaggctgactttctgctggggatggccactgtgaataactgtgtttcctaccgaaaccctgcagagggaacctggtacatccagtcactttgccagagcctgagagagcgatgtcctcgaggcgatgatattctcaccatcctgactgaagtgaactatgaagtaagcaacaaggatgacaagaaaaacatggggaaacagatgcctcagcctactttcacactaagaaaaaaacttgtcttcccttctgattgatggtgctattttgtttgttttgttttgttttgtttttttgagacagaatctcgctctgtcgcccaggctggagtgcagtggcgtgatctcggctcaccgcaagctccgcctcccgggttcaggccattctcctgc

SEQ ID NO: 114744 - DNA, 2650 bp, Homo sapiens
  Payload ID: 2418
  Gene Symbol: CASP8
  Gene Name: caspase 8, apoptosis-related cysteine peptidase
  Uniprot ID: Q14790
  ENST ID: ENST00000323492
  CDS Start-End: 141-1535
gtagagctggctggctgtgcccttccgtccttcattagacgtttgctcttgtcttagatgctcagatggtagtggataggcctgtgacgaaggtgctaccatcgtgagagtaagattatattctcctgccttttaaaaagatggacttcagcagaaatctttatgatattggggaacaactggacagtgaagatctggcctccctcaagttcctgagcctggactacattccgcaaaggaagcaagaacccatcaaggatgccttgatgttattccagagactccaggaaaagagaatgttggaggaaagcaatctgtccttcctgaaggagctgctcttccgaattaatagactggatttgctgattacctacctaaacactagaaaggaggagatggaaagggaacttcagacaccaggcagggctcaaatttctgcctacagggtcatgctctatcagatttcagaagaagtgagcagatcagaattgaggtcttttaagtttcttttgcaagaggaaatctccaaatgcaaactggatgatgacatgaacctgctggatattttcatagagatggagaagagggtcatcctgggagaaggaaagttggacatcctgaaaagagtctgtgcccaaatcaacaagagcctgctgaagataatcaacgactatgaagaattcagcaaaggggaggagttgtgtggggtaatgacaatctcggactctccaagagaacaggatagtgaatcacagactttggacaaagtttaccaaatgaaaagcaaacctcggggatactgtctgatcatcaacaatcacaattttgcaaaagcacgggagaaagtgcccaaacttcacagcattagggacaggaatggaacacacttggatgcaggggctttgaccacgacctttgaagagcttcattttgagatcaagccccacgatgactgcacagtagagcaaatctatgagattttgaaaatctaccaactcatggaccacagtaacatggactgcttcatctgctgtatcctctcccatggagacaagggcatcatctatggcactgatggacaggaggcccccatctatgagctgacatctcagttcactggtttgaagtgcccttcccttgctggaaaacccaaagtgttttttattcaggcttgtcagggggataactaccagaaaggtatacctgttgagactgattcagaggagcaaccctatttagaaatggatttatcatcacctcaaacgagatatatcccggatgaggctgactttctgctggggatggccactgtgaataactgtgtttcctaccgaaaccctgcagagggaacctggtacatccagtcactttgccagagcctgagagagcgatgtcctcgaggcgatgatattctcaccatcctgactgaagtgaactatgaagtaagcaacaaggatgacaagaaaaacatggggaaacagatgcctcagcctactttcacactaagaaaaaaacttgtcttcccttctgattgatggtgctattttgtttgttttgttttgttttgtttttttgagacagaatctcgctctgtcgcccaggctggagtgcagtggcgtgatctcggctcaccgcaagctccgcctcccgggttcaggccattctcctgcctcagcctcccgagtagctgggactacaggggcccgccaccacacctggctaattttttaaaaatatttttagtagagacagggtttcactgtgttagccagggtggtcttgatctcctgacctcgtgatccacccacctcggcctcccaaagtgctgggattacaggcgtgagccaccgcgcctggccgatggtactatttagatataacactatgtttatttactaattttctagattttctactttattaattgttttgcacttttttataagagctaaagttaaataggatattaacaacaataacactgtctcctttctcttatgcttaaggctttgggaatgtttttagctggtggcaataaataccagacacgtacaaaatccagctatgaatatagagggcttatgattcagattgttatctatcaactataagcccactgttaatattctattaactttaattctctttcaaagctaaattccacactaccacattaaaaaaattagaaagtagccacgtatggtggctcatgtctataatcccagcactttgggaggttgaggtgggaggattgcttgaacccaagaggtcaaggctgcagtgagccatgttcacaccgctgcactcaagcttgggtgacagaacaagaccccgtctcaaaaaaaattttttttttaataaaacaaaatttgtttgaaatcttttaaaaattcaaatgatttttacaagttttaaataagctctccccaaacttgctttatgccttcttattgcttttatgatatatatatgcttggctaactatatttgctttttgctaacaatgctctggggtctttttatgcatttgcatttgctctttcatctctgcttggattattttaaatcattaggaattaagttatctttaaaatttaagtatcttttttcaaaaacattttttaatagaataaaatataatttgatctta

SEQ ID NO: 114745 - DNA, 2930 bp, Homo sapiens
  Payload ID: 2418
  Gene Symbol: CASP8
  Gene Name: caspase 8, apoptosis-related cysteine peptidase
  Uniprot ID: Q14790
  ENST ID: ENST00000358485
  CDS Start-End: 197-1813
agtcatctctgttctgctttaggagtaaagtttaccctgcagttccttctgtggtgaagttttctctttctctcggagaccagattctgcctttctgctggagggaagtgttttcacaggttctcctccttttatcttttgtgttttttttcaagccctgctgaatttgctagtcaactcaacaggaagtgaggccatggagggaggcagaagagccagggtggttattgaaagtaaaagaaacttcttcctgggagcctttcccacccccttccctgctgagcacgtggagttaggcaggttaggggactcggagactgcgatggtgccaggaaagggtggagcggattatattctcctgccttttaaaaagatggacttcagcagaaatctttatgatattggggaacaactggacagtgaagatctggcctccctcaagttcctgagcctggactacattccgcaaaggaagcaagaacccatcaaggatgccttgatgttattccagagactccaggaaaagagaatgttggaggaaagcaatctgtccttcctgaaggagctgctcttccgaattaatagactggatttgctgattacctacctaaacactagaaaggaggagatggaaagggaacttcagacaccaggcagggctcaaatttctgcctacagggtcatgctctatcagatttcagaagaagtgagcagatcagaattgaggtcttttaagtttcttttgcaagaggaaatctccaaatgcaaactggatgatgacatgaacctgctggatattttcatagagatggagaagagggtcatcctgggagaaggaaagttggacatcctgaaaagagtctgtgcccaaatcaacaagagcctgctgaagataatcaacgactatgaagaattcagcaaagagagaagcagcagccttgaaggaagtcctgatgaattttcaaatggggaggagttgtgtggggtaatgacaatctcggactctccaagagaacaggatagtgaatcacagactttggacaaagtttaccaaatgaaaagcaaacctcggggatactgtctgatcatcaacaatcacaattttgcaaaagcacgggagaaagtgcccaaacttcacagcattagggacaggaatggaacacacttggatgcaggggctttgaccacgacctttgaagagcttcattttgagatcaagccccacgatgactgcacagtagagcaaatctatgagattttgaaaatctaccaactcatggaccacagtaacatggactgcttcatctgctgtatcctctcccatggagacaagggcatcatctatggcactgatggacaggaggcccccatctatgagctgacatctcagttcactggtttgaagtgcccttcccttgctggaaaacccaaagtgttttttattcaggcttgtcagggggataactaccagaaaggtatacctgttgagactgattcagaggagcaaccctatttagaaatggatttatcatcacctcaaacgagatatatcccggatgaggctgactttctgctggggatggccactgtgaataactgtgtttcctaccgaaaccctgcagagggaacctggtacatccagtcactttgccagagcctgagagagcgatgtcctcgaggcgatgatattctcaccatcctgactgaagtgaactatgaagtaagcaacaaggatgacaagaaaaacatggggaaacagatgcctcagcctactttcacactaagaaaaaaacttgtcttcccttctgattgatggtgctattttgtttgttttgttttgttttgtttttttgagacagaatctcgctctgtcgcccaggctggagtgcagtggcgtgatctcggctcaccgcaagctccgcctcccgggttcaggccattctcctgcctcagcctcccgagtagctgggactacaggggcccgccaccacacctggctaattttttaaaaatatttttagtagagacagggtttcactgtgttagccagggtggtcttgatctcctgacctcgtgatccacccacctcggcctcccaaagtgctgggattacaggcgtgagccaccgcgcctggccgatggtactatttagatataacactatgtttatttactaattttctagattttctactttattaattgttttgcacttttttataagagctaaagttaaataggatattaacaacaataacactgtctcctttctcttatgcttaaggctttgggaatgtttttagctggtggcaataaataccagacacgtacaaaatccagctatgaatatagagggcttatgattcagattgttatctatcaactataagcccactgttaatattctattaactttaattctctttcaaagctaaattccacactaccacattaaaaaaattagaaagtagccacgtatggtggctcatgtctataatcccagcactttgggaggttgaggtgggaggattgcttgaacccaagaggtcaaggctgcagtgagccatgttcacaccgctgcactcaagcttgggtgacagaacaagaccccgtctcaaaaaaaattttttttttaataaaacaaaatttgtttgaaatcttttaaaaattcaaatgatttttacaagttttaaataagctctccccaaacttgctttatgccttcttattgcttttatgatatatatatgcttggctaactatatttgctttttgctaacaatgctctggggtctttttatgcatttgcatttgctctttcatctctgcttggattattttaaatcattaggaattaagttatctttaaaatttaagtatcttttttcaaaaacattttttaatagaataaaatataatttgatcttatt

SEQ ID NO: 114746 - DNA, 1060 bp, Homo sapiens
  Payload ID: 2418
  Gene Symbol: CASP8
  Gene Name: caspase 8, apoptosis-related cysteine peptidase
  Uniprot ID: Q14790
  ENST ID: ENST00000392258
  CDS Start-End: 241-948
agactgagcttcctgcctgcctgtaccccgccaacagcttcagaagaaggtgactggtggctgcctgaggaataccagtgggcaagagaattagcatttctggagcatctgctgtctgagcagcccctgggtgcgtccactttctgggcacgtgaggttgggccttggccgcctgagcccttgagttggtcacttgaaccttgggaatattgagattatattctcctgccttttaaaaagatggacttcagcagaaatctttatgatattggggaacaactggacagtgaagatctggcctccctcaagttcctgagcctggactacattccgcaaaggaagcaagaacccatcaaggatgccttgatgttattccagagactccaggaaaagagaatgttggaggaaagcaatctgtccttcctgaaggagctgctcttccgaattaatagactggatttgctgattacctacctaaacactagaaaggaggagatggaaagggaacttcagacaccaggcagggctcaaatttctgcctacagggtcatgctctatcagatttcagaagaagtgagcagatcagaattgaggtcttttaagtttcttttgcaagaggaaatctccaaatgcaaactggatgatgacatgaacctgctggatattttcatagagatggagaagagggtcatcctgggagaaggaaagttggacatcctgaaaagagtctgtgcccaaatcaacaagagcctgctgaagataatcaacgactatgaagaattcagcaaagagagaagcagcagccttgaaggaagtcctgatgaattttcaaatgactttggacaaagtttaccaaatgaaaagcaaacctcggggatactgtctgatcatcaacaatcacaattttgcaaaagcacgggagaaagtgcccaaacttcacagcattagggacaggaatggaacacacttggatgcagggtttgagaatgtttttagctggtggcaataaatattagaagcctgcagaatccagctacgaatatagagggttttgctcttg

SEQ ID NO: 114747 - DNA, 1630 bp, Homo sapiens
  Payload ID: 2418
  Gene Symbol: CASP8
  Gene Name: caspase 8, apoptosis-related cysteine peptidase
  Uniprot ID: Q14790
  ENST ID: ENST00000392263
  CDS Start-End: 236-1630
gtgctctgagtttttggtttctgtttcaccttgtgtctgagctggtctgaaggctggttgttcagactgagcttcctgcctgcctgtaccccgccaacagcttcagaagaaggagcagcccctgggtgcgtccactttctgggcacgtgaggttgggccttggccgcctgagcccttgagttggtcacttgaaccttgggaatattgagattatattctcctgccttttaaaaagatggacttcagcagaaatctttatgatattggggaacaactggacagtgaagatctggcctccctcaagttcctgagcctggactacattccgcaaaggaagcaagaacccatcaaggatgccttgatgttattccagagactccaggaaaagagaatgttggaggaaagcaatctgtccttcctgaaggagctgctcttccgaattaatagactggatttgctgattacctacctaaacactagaaaggaggagatggaaagggaacttcagacaccaggcagggctcaaatttctgcctacagggtcatgctctatcagatttcagaagaagtgagcagatcagaattgaggtcttttaagtttcttttgcaagaggaaatctccaaatgcaaactggatgatgacatgaacctgctggatattttcatagagatggagaagagggtcatcctgggagaaggaaagttggacatcctgaaaagagtctgtgcccaaatcaacaagagcctgctgaagataatcaacgactatgaagaattcagcaaaggggaggagttgtgtggggtaatgacaatctcggactctccaagagaacaggatagtgaatcacagactttggacaaagtttaccaaatgaaaagcaaacctcggggatactgtctgatcatcaacaatcacaattttgcaaaagcacgggagaaagtgcccaaacttcacagcattagggacaggaatggaacacacttggatgcaggggctttgaccacgacctttgaagagcttcattttgagatcaagccccacgatgactgcacagtagagcaaatctatgagattttgaaaatctaccaactcatggaccacagtaacatggactgcttcatctgctgtatcctctcccatggagacaagggcatcatctatggcactgatggacaggaggcccccatctatgagctgacatctcagttcactggtttgaagtgcccttcccttgctggaaaacccaaagtgttttttattcaggcttgtcagggggataactaccagaaaggtatacctgttgagactgattcagaggagcaaccctatttagaaatggatttatcatcacctcaaacgagatatatcccggatgaggctgactttctgctggggatggccactgtgaataactgtgtttcctaccgaaaccctgcagagggaacctggtacatccagtcactttgccagagcctgagagagcgatgtcctcgaggcgatgatattctcaccatcctgactgaagtgaactatgaagtaagcaacaaggatgacaagaaaaacatggggaaacagatgcctcagcctactttcacactaagaaaaaaacttgtcttcccttctgattga

SEQ ID NO: 114748 - DNA, 1283 bp, Homo sapiens
  Payload ID: 2418
  Gene Symbol: CASP8
  Gene Name: caspase 8, apoptosis-related cysteine peptidase
  ENST ID: ENST00000392266
  CDS Start-End: 91-927
gaagttttctctttctctcggagaccagattctgcctttctgctggagggaagtgttttcacagattatattctcctgccttttaaaaagatggacttcagcagaaatctttatgatattggggaacaactggacagtgaagatctggcctccctcaagttcctgagcctggactacattccgcaaaggaagcaagaacccatcaaggatgccttgatgttattccagagactccaggaaaagagaatgttggaggaaagcaatctgtccttcctgaaggagctgctcttccgaattaatagactggatttgctgattacctacctaaacactagaaaggaggagatggaaagggaacttcagacaccaggcagggctcaaatttctgcctacagggtcatgctctatcagatttcagaagaagtgagcagatcagaattgaggtcttttaagtttcttttgcaagaggaaatctccaaatgcaaactggatgatgacatgaacctgctggatattttcatagagatggagaagagggtcatcctgggagaaggaaagttggacatcctgaaaagagtctgtgcccaaatcaacaagagcctgctgaagataatcaacgactatgaagaattcagcaaaggggaggagttgtgtggggtaatgacaatctcggactctccaagagaacaggatagtgaatcacagactttggacaaagtttaccaaatgaaaagcaaacctcggggatactgtctgatcatcaacaatcacaattttgcaaaagcacgggagaaagtgcccaaacttcacagcattagggacaggaatggaacacacttggatgcagggtctcactctgttgcccaggctggagtgcagtggtgtgatctcagctcactgcagcctccacctccctggttcaagtgattctcctgcctcagcctcccaagtagctgggactacaggcacacaccaccacacatggctaatttttgtatttttagtagagatggggttttgccatattggccaggctggtcttgaactcctgacctcaagtgatccgcctgcctcggcctcccaaagtgctggaattacaggtgtcagccacctgtacctggtccctgctaacatttgatttgtttatttaagcaaatctaagcctttaaaaaggcacagagattaagtccattgattacatcattcgtcactatgcgcttggtattgaaaaaaatattttggacccttgatttgtattcttttaaaattaaaacatttctatt

SEQ ID NO: 114749 - DNA, 707 bp, Homo sapiens
  Payload ID: 2418
  Gene Symbol: CASP8
  Gene Name: caspase 8, apoptosis-related cysteine peptidase
  ENST ID: ENST00000447616
  CDS Start-End: 80-707
atggttggaaattgggcatctgttcctttaaacaggaaacatttcttgttcgaattatattctcctgccttttaaaaagatggacttcagcagaaatctttatgatattggggaacaactggacagtgaagatctggcctccctcaagttcctgagcctggactacattccgcaaaggaagcaagaacccatcaaggatgccttgatgttattccagagactccaggaaaagagaatgttggaggaaagcaatctgtccttcctgaaggagctgctcttccgaattaatagactggatttgctgattacctacctaaacactagaaaggaggagatggaaagggaacttcagacaccaggcagggctcaaatttctgcctacagggtcatgctctatcagatttcagaagaagtgagcagatcagaattgaggtcttttaagtttcttttgcaagaggaaatctccaaatgcaaactggatgatgacatgaacctgctggatattttcatagagatggagaagagggtcatcctgggagaaggaaagttggacatcctgaaaagagtctgtgcccaaatcaacaagagcctgctgaagataatcaacgactatgaagaattcagcaaagactttggacaaagtttaccaaatgaaaagcaaacctcggggatactgtctgatcatcaacaatcacaattttgcaaaa

SEQ ID NO: 114750 - DNA, 308 bp, Homo sapiens
  Payload ID: 2418
  Gene Symbol: CASP8
  Gene Name: caspase 8, apoptosis-related cysteine peptidase
  ENST ID: ENST00000424461
  CDS Start-End: 1-252
aacctgctggatattttcatagagatggagaagagggtcatcctgggagaaggaaagttggacatcctgaaaagagtctgtgcccaaatcaacaagagcctgctgaagataatcaacgactatgaagaattcagcaaagactttggacaaagtttaccaaatgaaaagcaaacctcggggatactgtctgatcatcaacaatcacaattttgcaaaagcacgggagaaagtgcccaaacttcacagcattagggacaggaatggaacacacttggatgcagggtttgagaatgtttttagctggtggc

SEQ ID NO: 114751 - DNA, 717 bp, Homo sapiens
  Payload ID: 2418
  Gene Symbol: CASP8
  Gene Name: caspase 8, apoptosis-related cysteine peptidase
  ENST ID: ENST00000429881
  CDS Start-End: 369-717
agattctagcacttcctttgtgaggctctaaccccctctcctatagtggatttgttaagaacttctgtttttgtggctttgttattataaaattttttgaaatgttgttctctaaaaaagttatgattttatgtttttcttcatgagattctttcactgccttccagctgcaagtagaatgacgtctaaatctttgtgatctgtcactgaagcccttgagtgagacacttaaatctggctgtggctctctctcttactagcttatttccaagccgtgatttttcacaacagaaaaatggggacagtaatagtagtttcttcagaggcttttagtgaaatgagattatattctcctgccttttaaaaagatggacttcagcagaaatctttatgatattggggaacaactggacagtgaagatctggcctccctcaagttcctgagcctggactacattccgcaaaggaagcaagaacccatcaaggatgccttgatgttattccagagactccaggaaaagagaatgttggaggaaagcaatctgtccttcctgaaggagctgctcttccgaattaatagactggatttgctgattacctacctaaacactagaaaggaggagatggaaagggaacttcagacaccaggcagggctcaaatttctgcctacagggtcatgctctatcagatttcagaagaagtgagcagatcagaat

SEQ ID NO: 114752 - DNA, 686 bp, Homo sapiens
  Payload ID: 2418
  Gene Symbol: CASP8
  Gene Name: caspase 8, apoptosis-related cysteine peptidase
  ENST ID: ENST00000450491
  CDS Start-End: 239-686
ggtctgaaggctggttgttcagactgagcttcctgcctgcctgtaccccgccaacagcttcagaagaaggtgactggtggctgcctgaggaataccagtgggcaagagaattagcatttctggagcatctgctgtctgagcagcccctgggtgcgtccactttctgggcacgtgaggttgggccttggccgcctgagcccttgagttggtcacttgaaccttgggaatattgagggtcatgctctatcagatttcagaagaagtgagcagatcagaattgaggtcttttaagtttcttttgcaagaggaaatctccaaatgcaaactggatgatgacatgaacctgctggatattttcatagagatggagaagagggtcatcctgggagaaggaaagttggacatcctgaaaagagtctgtgcccaaatcaacaagagcctgctgaagataatcaacgactatgaagaattcagcaaaggggaggagttgtgtggggtaatgacaatctcggactctccaagagaacaggatagtgaatcacagactttggacaaagtttaccaaatgaaaagcaaacctcggggatactgtctgatcatcaacaatcacaattttgcaaaagcacgggagaaagtgcccaaacttcacagcattagggacaggaatggaacacacttggatgcag

SEQ ID NO: 114753 - DNA, 1275 bp, Homo sapiens
  Payload ID: 2418
  Gene Symbol: CASP8
  Gene Name: caspase 8, apoptosis-related cysteine peptidase
  ENST ID: ENST00000444430
  CDS Start-End: 1-777
aacctgctggatattttcatagagatggagaagagggtcatcctgggagaaggaaagttggacatcctgaaaagagtctgtgcccaaatcaacaagagcctgctgaagataatcaacgactatgaagaattcagcaaaggggctttgaccacgacctttgaagagcttcattttgagatcaagccccacgatgactgcacagtagagcaaatctatgagattttgaaaatctaccaactcatggaccacagtaacatggactgcttcatctgctgtatcctctcccatggagacaagggcatcatctatggcactgatggacaggaggcccccatctatgagctgacatctcagttcactggtttgaagtgcccttcccttgctggaaaacccaaagtgttttttattcaggcttgtcagggggataactaccagaaaggtatacctgttgagactgattcagaggagcaaccctatttagaaatggatttatcatcacctcaaacgagatatatcccggatgaggctgactttctgctggggatggccactgtgaataactgtgtttcctaccgaaaccctgcagagggaacctggtacatccagtcactttgccagagcctgagagagcgatgtcctcgaggcgatgatattctcaccatcctgactgaagtgaactatgaagtaagcaacaaggatgacaagaaaaacatggggaaacagatgcctcagcctactttcacactaagaaaaaaacttgtcttcccttctgattgatggtgctattttgtttgttttgttttgttttgtttttttgagacagaatctcgctctgtcgcccaggctggagtgcagtggcgtgatctcggctcaccgcaagctccgcctcccgggttcaggccattctcctgcctcagcctcccgagtagctgggactacaggggcccgccaccacacctggctaattttttaaaaatatttttagtagagacagggtttcactgtgttagccagggtggtcttgatctcctgacctcgtgatccacccacctcggcctcccaaagtgctgggattacaggcgtgagccaccgcgcctggccgatggtactatttagatataacactatgtttatttactaattttctagattttctactttattaattgttttgcacttttttataagagctaaagttaaataggatattaacaacaataacactgtctcctttctcttatgcttaaggctttgggaatgtttttagctggtggc

SEQ ID NO: 114754 - DNA, 592 bp, Homo sapiens
  Payload ID: 2418
  Gene Symbol: CASP8
  Gene Name: caspase 8, apoptosis-related cysteine peptidase
  ENST ID: ENST00000440732
  CDS Start-End: 219-592
gttcagactgagcttcctgcctgcctgtaccccgccaacagcttcagaagaaggtgactggtggctgcctgaggaataccagtgggcaagagaattagcatttctggagcatctgctgtctgagcagcccctgggtgcgtccactttctgggcacgtgaggttgggccttggccgcctgagcccttgagttggtcacttgaaccttgggaatattgagatggacttcagcagaaatctttatgatattggggaacaactggacagtgaagatctggcctccctcaagttcctgagcctggactacattccgcaaaggaagcaagaacccatcaaggatgccttgatgttattccagagactccaggaaaagagaatgttggaggaaagcaatctgtccttcctgaaggagctgctcttccgaattaatagactggatttgctgattacctacctaaacactagaaaggaggagatggaaagggaacttcagacaccaggcagggctcaaatttctgcctacagggtcatgctctatcagatttcagaagaagtgagcagatcagaattgaggtcttttaagtttcttttgca

SEQ ID NO: 114755 - DNA, 658 bp, Homo sapiens
  Payload ID: 2418
  Gene Symbol: CASP8
  Gene Name: caspase 8, apoptosis-related cysteine peptidase
  ENST ID: ENST00000413726
  CDS Start-End: 64-658
gattctgcctttctgctggagggaagtgttttcacagattatattctcctgccttttaaaaagatggacttcagcagaaatctttatgatattggggaacaactggacagtgaagatctggcctccctcaagttcctgagcctggactacattccgcaaaggaagcaagaacccatcaaggatgccttgatgttattccagagactccaggaaaagagaatgttggaggaaagcaatctgtccttcctgaaggagctgctcttccgaattaatagactggatttgctgattacctacctaaacactagaaaggaggagatggaaagggaacttcagacaccaggcagggctcaaatttctgcctacagggtcatgctctatcagatttcagaagaagtgagcagatcagaattgaggtcttttaagtttcttttgcaagaggaaatctccaaatgcaaactggatgatgacatgaacctgctggatattttcatagagatggagaagagggtcatcctgggagaaggaaagttggacatcctgaaaagagtctgtgcccaaatcaacaagagcctgctgaagataatcaacgactatgaagaattcagcaaagagagaagcagcagccttgaaggaagtcctgatgaattttcaaatg

SEQ ID NO: 114756 - DNA, 777 bp, Homo sapiens
  Payload ID: 2418
  Gene Symbol: CASP8
  Gene Name: caspase 8, apoptosis-related cysteine peptidase
  ENST ID: ENST00000437283
  CDS Start-End: 115-291
gattctgcctttctgctggagggaagtgttttcacaggttctcctccttttatcttttgtgttttttttcaagccctgctgaatttgctagtcaactcaacaggaagtgaggccatggagggaggcagaagagccagggtggttattgaaagtaaaagaaacttcttcctgggagcctttcccacccccttccctgctgagcacgtggagttaggcaggttaggggactcggagactgcgatggtgccaggaaagggtggagcggatggacttcagcagaaatctttatgatattggggaacaactggacagtgaagatctggcctccctcaagttcctgagcctggactacattccgcaaaggaagcaagaacccatcaaggatgccttgatgttattccagagactccaggaaaagagaatgttggaggaaagcaatctgtccttcctgaaggagctgctcttccgaattaatagactggatttgctgattacctacctaaacactagaaaggaggagatggaaagggaacttcagacaccaggcagggctcaaatttctgcctacagggtcatgctctatcagatttcagaagaagtgagcagatcagaattgaggtcttttaagtttcttttgcaagaggaaatctccaaatgcaaactggatgatgacatgaacctgctggatattttcatagagatggagaagagggtcatcctgggagaaggaaagttggacatcctgaaaagagtctgtgcccaaatcaacaagagcct

SEQ ID NO: 114757 - DNA, 1629 bp, Homo sapiens
  Payload ID: 2418
  Gene Symbol: CASP8
  Gene Name: caspase 8, apoptosis-related cysteine peptidase
  Uniprot ID: Q14790
  ENST ID: ENST00000432109
  CDS Start-End: 190-1629
ctgtttcaccttgtgtctgagctggtctgaaggctggttgttcagactgagcttcctgcctgcctgtaccccgccaacagcttcagaagaaggagcagcccctgggtgcgtccactttctgggcacgtgaggttgggccttggccgcctgagcccttgagttggtcacttgaaccttgggaatattgagatggacttcagcagaaatctttatgatattggggaacaactggacagtgaagatctggcctccctcaagttcctgagcctggactacattccgcaaaggaagcaagaacccatcaaggatgccttgatgttattccagagactccaggaaaagagaatgttggaggaaagcaatctgtccttcctgaaggagctgctcttccgaattaatagactggatttgctgattacctacctaaacactagaaaggaggagatggaaagggaacttcagacaccaggcagggctcaaatttctgcctacagggtcatgctctatcagatttcagaagaagtgagcagatcagaattgaggtcttttaagtttcttttgcaagaggaaatctccaaatgcaaactggatgatgacatgaacctgctggatattttcatagagatggagaagagggtcatcctgggagaaggaaagttggacatcctgaaaagagtctgtgcccaaatcaacaagagcctgctgaagataatcaacgactatgaagaattcagcaaagagagaagcagcagccttgaaggaagtcctgatgaattttcaaatggggaggagttgtgtggggtaatgacaatctcggactctccaagagaacaggatagtgaatcacagactttggacaaagtttaccaaatgaaaagcaaacctcggggatactgtctgatcatcaacaatcacaattttgcaaaagcacgggagaaagtgcccaaacttcacagcattagggacaggaatggaacacacttggatgcaggggctttgaccacgacctttgaagagcttcattttgagatcaagccccacgatgactgcacagtagagcaaatctatgagattttgaaaatctaccaactcatggaccacagtaacatggactgcttcatctgctgtatcctctcccatggagacaagggcatcatctatggcactgatggacaggaggcccccatctatgagctgacatctcagttcactggtttgaagtgcccttcccttgctggaaaacccaaagtgttttttattcaggcttgtcagggggataactaccagaaaggtatacctgttgagactgattcagaggagcaaccctatttagaaatggatttatcatcacctcaaacgagatatatcccggatgaggctgactttctgctggggatggccactgtgaataactgtgtttcctaccgaaaccctgcagagggaacctggtacatccagtcactttgccagagcctgagagagcgatgtcctcgaggcgatgatattctcaccatcctgactgaagtgaactatgaagtaagcaacaaggatgacaagaaaaacatggggaaacagatgcctcagcctactttcacactaagaaaaaaacttgtcttcccttctgattga

SEQ ID NO: 114758 - DNA, 1621 bp, Homo sapiens
  Payload ID: 2419
  Gene Symbol: CASP9
  Gene Name: caspase 9, apoptosis-related cysteine peptidase
  Uniprot ID: P55211
  ENST ID: ENST00000348549
  CDS Start-End: 148-948
gtccggaggcggtggggagcgaagactgacccggggccgtgacgcgggggcaggccctggggcgggggcgggtcctggggactggggcgggcggccgaggcccggaagcggactgaggcggcctggagtcttagttggctactcgccatggacgaagcggatcggcggctcctgcggcggtgccggctgcggctggtggaagagctgcaggtggaccagctctgggacgccctgctgagccgcgagctgttcaggccccatatgatcgaggacatccagcgggcaggctctggatctcggcgggatcaggccaggcagctgatcatagatctggagactcgagggagtcaggctcttcctttgttcatctcctgcttagaggacacaggccaggacatgctggcttcgtttctgcgaactaacaggcaagcagcaaagttgtcgaagccaaccctagaaaaccttaccccagtggtgctcagaccagagattcgcaaaccagaggttctcagaccggaaacacccagaccagtggacattggttctggaggatttggtgatgtcgagcagaaagaccatgggtttgaggtggcctccacttcccctgaagacgagtcccctggcagtaaccccgagccagatgccaccccgttccaggaaggtttgaggaccttcgaccagctggacgccatatctagtttgcccacacccagtgacatctttgtgtcctactctactttcccaggttttgtttcctggagggaccccaagagtggctcctggtacgttgagaccctggacgacatctttgagcagtgggctcactctgaagacctgcagtccctcctgcttagggtcgctaatgctgtttcggtgaaagggatttataaacagatgcctggttgctttaatttcctccggaaaaaacttttctttaaaacatcataaggccagggcccctcaccctgccttatcttgcaccccaaagctttcctgccccaggcctgaaagaggctgaggcctggactttcctgcaactcaaggactttgcagccggcacagggtctgctctttctctgccagtgacagacaggctcttagcagcttccagattgacgacaagtgctgaacagtggaggaagagggacagatgaatgccgtggattgcacgtggcctcttgagcagtggctggtccagggctagtgacttgtgtcccatgatccctgtgttgtctctagagcagggattaacctctgcactactgacatgtggggccaggtcaccctttgctgtgaggctgtcctgtacattgtgggatgttcagcactgtcccttgcctcaatgccagtaacgcgtcttcctgagtggtgccaaacaaaaaggttctcaggtgttgccaaatatgtcctggggtataaaactttcctcgcctgacaaccactggtctgtagggatttttggctacacacaaaccagtatcgctcatagatcagcaaaccggggcctactagagtctgaacagctgtaatctatgaattctaagtgaaattttaaaaattgttaatttttcctatattgcattaattttaaaaaataaatctgaggcaaatatggactctc

SEQ ID NO: 114759 - DNA, 2019 bp, Homo sapiens
  Payload ID: 2419
  Gene Symbol: CASP9
  Gene Name: caspase 9, apoptosis-related cysteine peptidase
  Uniprot ID: P55211
  ENST ID: ENST00000333868
  CDS Start-End: 96-1346
ggccctggggcgggggcgggtcctggggactggggcgggcggccgaggcccggaagcggactgaggcggcctggagtcttagttggctactcgccatggacgaagcggatcggcggctcctgcggcggtgccggctgcggctggtggaagagctgcaggtggaccagctctgggacgccctgctgagccgcgagctgttcaggccccatatgatcgaggacatccagcgggcaggctctggatctcggcgggatcaggccaggcagctgatcatagatctggagactcgagggagtcaggctcttcctttgttcatctcctgcttagaggacacaggccaggacatgctggcttcgtttctgcgaactaacaggcaagcagcaaagttgtcgaagccaaccctagaaaaccttaccccagtggtgctcagaccagagattcgcaaaccagaggttctcagaccggaaacacccagaccagtggacattggttctggaggatttggtgatgtcggtgctcttgagagtttgaggggaaatgcagatttggcttacatcctgagcatggagccctgtggccactgcctcattatcaacaatgtgaacttctgccgtgagtccgggctccgcacccgcactggctccaacatcgactgtgagaagttgcggcgtcgcttctcctcgctgcatttcatggtggaggtgaagggcgacctgactgccaagaaaatggtgctggctttgctggagctggcgcagcaggaccacggtgctctggactgctgcgtggtggtcattctctctcacggctgtcaggccagccacctgcagttcccaggggctgtctacggcacagatggatgccctgtgtcggtcgagaagattgtgaacatcttcaatgggaccagctgccccagcctgggagggaagcccaagctctttttcatccaggcctgtggtggggagcagaaagaccatgggtttgaggtggcctccacttcccctgaagacgagtcccctggcagtaaccccgagccagatgccaccccgttccaggaaggtttgaggaccttcgaccagctggacgccatatctagtttgcccacacccagtgacatctttgtgtcctactctactttcccaggttttgtttcctggagggaccccaagagtggctcctggtacgttgagaccctggacgacatctttgagcagtgggctcactctgaagacctgcagtccctcctgcttagggtcgctaatgctgtttcggtgaaagggatttataaacagatgcctggttgctttaatttcctccggaaaaaacttttctttaaaacatcataaggccagggcccctcaccctgccttatcttgcaccccaaagctttcctgccccaggcctgaaagaggctgaggcctggactttcctgcaactcaaggactttgcagccggcacagggtctgctctttctctgccagtgacagacaggctcttagcagcttccagattgacgacaagtgctgaacagtggaggaagagggacagatgaatgccgtggattgcacgtggcctcttgagcagtggctggtccagggctagtgacttgtgtcccatgatccctgtgttgtctctagagcagggattaacctctgcactactgacatgtggggccaggtcaccctttgctgtgaggctgtcctgtacattgtgggatgttcagcactgtcccttgcctcaatgccagtaacgcgtcttcctgagtggtgccaaacaaaaaggttctcaggtgttgccaaatatgtcctggggtataaaactttcctcgcctgacaaccactggtctgtagggatttttggctacacacaaaccagtatcgctcatagatcagcaaaccggggcctactagagtctgaacagctgtaatctatgaattctaagtgaaattttaaaaattgttaatttttcctatattgcattaattttaaaaaataaatctgaggcaaatatggactctc

SEQ ID NO: 114760 - DNA, 1351 bp, Homo sapiens
  Payload ID: 2419
  Gene Symbol: CASP9
  Gene Name: caspase 9, apoptosis-related cysteine peptidase
  Uniprot ID: P55211
  ENST ID: ENST00000375890
  CDS Start-End: 262-1263
aattgaccctggggacagggcgaggcgcggaggcgtcctgaaggcgaggcggtgacgcaagagcgaatccttggggcggggcgaggcgttggagatgcgtcctgcgggcgggacggtaacgcgggggcggggcggtgacgtgagcgggcaggctctggatctcggcgggatcaggccaggcagctgatcatagatctggagactcgagggagtcaggctcttcctttgttcatctcctgcttagaggacacaggccaggacatgctggcttcgtttctgcgaactaacaggcaagcagcaaagttgtcgaagccaaccctagaaaaccttaccccagtggtgctcagaccagagattcgcaaaccagaggttctcagaccggaaacacccagaccagtggacattggttctggaggatttggtgatgtcggtgctcttgagagtttgaggggaaatgcagatttggcttacatcctgagcatggagccctgtggccactgcctcattatcaacaatgtgaacttctgccgtgagtccgggctccgcacccgcactggctccaacatcgactgtgagaagttgcggcgtcgcttctcctcgctgcatttcatggtggaggtgaagggcgacctgactgccaagaaaatggtgctggctttgctggagctggcgcagcaggaccacggtgctctggactgctgcgtggtggtcattctctctcacggctgtcaggccagccacctgcagttcccaggggctgtctacggcacagatggatgccctgtgtcggtcgagaagattgtgaacatcttcaatgggaccagctgccccagcctgggagggaagcccaagctctttttcatccaggcctgtggtggggagcagaaagaccatgggtttgaggtggcctccacttcccctgaagacgagtcccctggcagtaaccccgagccagatgccaccccgttccaggaaggtttgaggaccttcgaccagctggacgccatatctagtttgcccacacccagtgacatctttgtgtcctactctactttcccaggttttgtttcctggagggaccccaagagtggctcctggtacgttgagaccctggacgacatctttgagcagtgggctcactctgaagacctgcagtccctcctgcttagggtcgctaatgctgtttcggtgaaagggatttataaacagatgcctggttgctttaatttcctccggaaaaaacttttctttaaaacatcataaggccagggcccctcaccctgccttatcttgcaccccaaagctttcctgccccaggcctgaaagaggctgaggcctggactttcctgca

SEQ ID NO: 114761 - DNA, 1878 bp, Homo sapiens
  Payload ID: 2419
  Gene Symbol: CASP9
  Gene Name: caspase 9, apoptosis-related cysteine peptidase
  ENST ID: ENST00000400777
  CDS Start-End: 1-457
agcggatcggcggctcctgcggcggtgccggctgcggctggtggaagagctgcaggtggaccagctctgggacgccctgctgagccgcgagctgttcaggccccatatgatcgaggacatccagcgggcaggctctggatctcggcgggatcaggccaggcagctgatcatagatctggagactcgagggagtcaggctcttcctttgttcatctcctgcttagaggacacaggccaggacatgctggcttcgtttctgcgaactaacaggcaagcagcaaagttgtcgaagccaaccctagaaaaccttaccccagtggtgctcagaccagagattcgcaaaccagaggttctcagaccggaaacacccagaccagtggacattggttctggaggatttggtgatgtcggtgctcttgagagtttgaggggaaatgcagatttgactgtcctctagggagcgtggggagagcccgggtttacgtgggtccctgtgctggcaggcttacatcctgagcatggagccctgtggccactgcctcattatcaacaatgtgaacttctgccgtgagtccgggctccgcacccgcactggctccaacatcgactgtgagaagttgcggcgtcgcttctcctcgctgcatttcatggtggaggtgaagggcgacctgactgccaagaaaatggtgctggctttgctggagctggcgcagcaggaccacggtgctctggactgctgcgtggtggtcattctctctcacggctgtcaggccagccacctgcagttcccaggggctgtctacggcacagatggatgccctgtgtcggtcgagaagattgtgaacatcttcaatgggaccagctgccccagcctgggagggaagcccaagctctttttcatccaggcctgtggtggggagcagaaagaccatgggtttgaggtggcctccacttcccctgaagacgagtcccctggcagtaaccccgagccagatgccaccccgttccaggaaggtttgaggaccttcgaccagctggacgccatatctagtttgcccacacccagtgacatctttgtgtcctactctactttcccaggttttgtttcctggagggaccccaagagtggctcctggtacgttgagaccctggacgacatctttgagcagtgggctcactctgaagacctgcagtccctcctgcttagggtcgctaatgctgtttcggtgaaagggatttataaacagatgcctggttgctttaatttcctccggaaaaaacttttctttaaaacatcataaggccagggcccctcaccctgccttatcttgcaccccaaagctttcctgccccaggcctgaaagaggctgaggcctggactttcctgcaactcaaggactttgcagccggcacagggtctgctctttctctgccagtgacagacaggctcttagcagcttccagattgacgacaagtgctgaacagtggaggaagagggacagatgaatgccgtggattgcacgtggcctcttgagcagtggctggtccagggctagtgacttgtgtcccatgatccctgtgttgtctctagagcagggattaacctctgcactactgacatgtggggccaggtcaccctttgctgtgaggctgtcctgtacattgtgggatgttcagcactgtcccttgcctcaatgccagtaacgcgtcttcctgagtggtgccaaacaaaaaggttctcaggtgttgccaaatatgtcctggggtataaaactttcctcgcctgacaaccactggtctgtagggatttttggctacacacaaaccagtatcgctcatagatcagcaaaccggggcctactagagtctgaacagct

SEQ ID NO: 114762 - DNA, 954 bp, Homo sapiens
  Payload ID: 2419
  Gene Symbol: CASP9
  Gene Name: caspase 9, apoptosis-related cysteine peptidase
  ENST ID: ENST00000447522
  CDS Start-End: 156-954
gcgcggaatggattctggggtcggcgcgaggcgctgagcgggcaggctctggatctcggcgggatcaggccaggcagctgatcatagatctggagactcgagggagtcaggctcttcctttgttcatctcctgcttagaggacacaggccaggacatgctggcttcgtttctgcgaactaacaggcaagcagcaaagttgtcgaagccaaccctagaaaaccttaccccagtggtgctcagaccagagattcgcaaaccagaggttctcagaccggaaacacccagaccagtggacattggttctggaggatttggtgatgtcggtgctcttgagagtttgaggggaaatgcagatttggcttacatcctgagcatggagccctgtggccactgcctcattatcaacaatgtgaacttctgccgtgagtccgggctccgcacccgcactggctccaacatcgactgtgagaagttgcggcgtcgcttctcctcgctgcatttcatggtggaggtgaagggcgacctgactgccaagaaaatggtgctggctttgctggagctggcgcagcaggaccacggtgctctggactgctgcgtggtggtcattctctctcacggctgtcaggccagccacctgcagttcccaggggctgtctacggcacagatggatgccctgtgtcggtcgagaagattgtgaacatcttcaatgggaccagctgccccagcctgggagggaagcccaagctctttttcatccaggcctgtggtggggagcagaaagaccatgggtttgaggtggcctccacttcccctgaagacgagtcccctggcagtaaccccgagccagatgccaccccgttccaggaaggtttgaggaccttcgaccagctggacgccatatctagtttgcccacacccagtgacatctttgtgtcctactctactttcccag

SEQ ID NO: 114763 - DNA, 740 bp, Homo sapiens
  Payload ID: 2419
  Gene Symbol: CASP9
  Gene Name: caspase 9, apoptosis-related cysteine peptidase
  ENST ID: ENST00000424908
  CDS Start-End: 1-595
ctgtggccactgcctcattatcaacaatgtgaacttctgccgtgagtccgggctccgcacccgcactggctccaacatcgactgtgagaagttgcggcgtcgcttctcctcgctgcatttcatggtggaggtgaagggcgacctgactgccaagaaaatggtgctggctttgctggagctggcgcagcaggaccacggtgctctggactgctgcgtggtggtcattctctctcacggctgtcaggccagccacctgcagttcccaggggctgtctacggcacagatggatgccctgtgtcggtcgagaagattgtgaacatcttcaatgggaccagctgccccagcctgggagggaagcccaagctctttttcatccaggcctgtggtgggggttttgtttcctggagggaccccaagagtggctcctggtacgttgagaccctggacgacatctttgagcagtgggctcactctgaagacctgcagtccctcctgcttagggtcgctaatgctgtttcggtgaaagggatttataaacagatgcctggttgctttaatttcctccggaaaaaacttttctttaaaacatcataaggccagggcccctcaccctgccttatcttgcaccccaaagctttcctgccccaggcctgaaagaggctgaggcctggactttcctgcaactcaaggactttgcagccggcacagggtctgctctttctctgccagtgacagacag

SEQ ID NO: 114764 - DNA, 781 bp, Homo sapiens
  Payload ID: 2419
  Gene Symbol: CASP9
  Gene Name: caspase 9, apoptosis-related cysteine peptidase
  ENST ID: ENST00000440484
  CDS Start-End: 18-781
ttagttggctactcgccatggacgaagcggatcggcggctcctgcggcggtgccggctgcggctggtggaagagctgcaggtggaccagctctgggacgccctgctgagccgcgagctgttcaggccccatatgatcgaggacatccagcgggcaggctctggatctcggcgggatcaggccaggcagctgatcatagatctggagactcgagggagtcaggctcttcctttgttcatctcctgcttagaggacacaggccaggacatgctggcttcgtttctgcgaactaacaggcaagcagcaaagttgtcgaagccaaccctagaaaaccttaccccagtggtgctcagaccagagattcgcaaaccagaggttctcagaccggaaacacccagaccagtggacattggttctggaggatttggtgatgtcggtgctcttgagagtttgaggggaaatgcagatttggcttacatcctgagcatggagccctgtggccactgcctcattatcaacaatgtgaacttctgccgtgagtccgggctccgcacccgcactggctccaacatcgactgtgagaagttgcggcgtcgcttctcctcgctgcatttcatggtggaggtgaagggcgacctgactgccaaggccagccacctgcagttcccaggggctgtctacggcacagatggatgccctgtgtcggtcgagaagattgtgaacatcttcaatgggaccagctgccccagcctgggagggaagcccaagctctttttcatcca

SEQ ID NO: 114765 - DNA, 1111 bp, Homo sapiens
  Payload ID: 2419
  Gene Symbol: CASP9
  Gene Name: caspase 9, apoptosis-related cysteine peptidase
  ENST ID: ENST00000474305
  CDS Start-End: 1-288
atggacgaagcggatcggcggctcctgcggcggtgccggctgcggctggtggaagagctgcaggtggaccagctctgggacgccctgctgagccgcgagctgttcaggccccatatgatcgaggacatccagcgggcaggctctggatctcggcgggatcaggccaggcagctgatcatagatctggagactcgagggagtcaggctcttcctttgttcatctcctgcttagaggacacaggccaggacatgctggcttcgtttctgcgaactaacaggtgctcttgagagtttgaggggaaatgcagatttggcttacatcctgagcatggagccctgtggccactgcctcattatcaacaatgtgaacttctgccgtgagtccgggctccgcacccgcactggctccaacatcgactgtgagaagttgcggcgtcgcttctcctcgctgcatttcatggtggaggtgaagggcgacctgactgccaagaaaatggtgctggctttgctggagctggcgcagcaggaccacggtgctctggactgctgcgtggtggtcattctctctcacggctgtcaggccagccacctgcagttcccaggggctgtctacggcacagatggatgccctgtgtcggtcgagaagattgtgaacatcttcaatgggaccagctgccccagcctgggagggaagcccaagctctttttcatccaggcctgtggtggggagcagaaagaccatgggtttgaggtggcctccacttcccctgaagacgagtcccctggcagtaaccccgagccagatgccaccccgttccaggaaggtttgaggaccttcgaccagctggacgccatatctagtttgcccacacccagtgacatctttgtgtcctactctactttcccaggttttgtttcctggagggaccccaagagtggctcctggtacgttgagaccctggacgacatctttgagcagtgggctcactctgaagacctgcagtccctcctgcttagggtcgctaatgctgtttcggtgaaagggatttataaacagatgcctggttgctttaatttcctccggaaaaaacttttctttaaaacatcataa

SEQ ID NO: 114766 - DNA, 4463 bp, Homo sapiens
  Payload ID: 2419
  Gene Symbol: CASP9
  Gene Name: caspase 9, apoptosis-related cysteine peptidase
  ENST ID: ENST00000546424
  CDS Start-End: 246-1511
ttggccctgggggcggggcgaggcgcagaggtgcgtcctgagggcggggcggtgacgcaagagcgactcctgggggcggggcgaggccttggagatgcgtccggaggcggtggggagcgaagactgacccggggccgtgacgcgggggcaggccctggggcgggggcgggtcctggggactggggcgggcggccgaggcccggaagcggactgaggcggcctggagtcttagttggctactcgccatggacgaagcggatcggcggctcctgcggcggtgccggctgcggctggtggaagagctgcaggtggaccagctctgggacgccctgctgagccgcgagctgttcaggccccatatgatcgaggacatccagcgggcaggctctggatctcggcgggatcaggccaggcagctgatcatagatctggagactcgagggagtcaggctcttcctttgttcatctcctgcttagaggacacaggccaggacatgctggcttcgtttctgcgaactaacaggcaagcagcaaagttgtcgaagccaaccctagaaaaccttaccccagtggtgctcagaccagagattcgcaaaccagaggttctcagaccggaaacacccagaccagtggacattggttctggaggatttggtgatgtcggtgctcttgagagtttgaggggaaatgcagatttggcttacatcctgagcatggagccctgtggccactgcctcattatcaacaatgtgaacttctgccgtgagtccgggctccgcacccgcactggctccaacatcgactgtgagaagttgcggcgtcgcttctcctcgctgcatttcatggtggaggtgaagggcgacctgactgccaagaaaatggtgctggctttgctggagctggcgcagcaggaccacggtgctctggactgctgcgtggtggtcattctctctcacggctgtcaggccagccacctgcagttcccaggggctgtctacggcacagatggatgccctgtgtcggtcgagaagattgtgaacatcttcaatgggaccagctgccccagcctgggagggaagcccaagctctttttcatccaggcctgtggtggggagcagaaagaccatgggtttgaggtggcctccacttcccctgaagacgagtcccctggcagtaaccccgagccagatgccaccccgttccaggaaggtttgaggaccttcgaccagctggacgccatatctagtttgcccacacccagtgacatctttgtgtcctactctactttcccaggttttgtttcctggagggaccccaagagtggctcctggtacgttgagaccctggacgacatctttgagcagtgggctcactctgaagacctgcagtccctcctgcttagggtgagtgctgccttcctctgcaaaggagaggggaggctgctgaggggcagcgtgtcctcctggggctggggatttggggtgagcagggcaggcccaaaccaagggtaaaaggtagtagactcctgcctctgagccttggagtcggcacttttgtgtctctttatgagaggcatcctgcctgtggtgacgtttgccctttattcaaagagttgccttccctgtctcctccaaggtccccaggttgacacctcccgctcctccactgatggagctggtcctcagtgccagcgcaggatggctctgtccagaccctgaaggcgggtcatgggcccctccctatatcctgtgggcatcatgtagtcttctactcttgaccctcaagaattgtgaacccctccttgtacatcgccttctcaggaggccccagtgaggaaacagatagggaagggtggcctgataggcccagtcctactccatagaaacccgactcagagcagttgcttcctctgagggtcctgtggccttgtggctgccttgggaggcagcatgtatgggccccagctgctctgctcaggtattcatgccacgagaaggggctgcgaggctggggccactcctggctccttgcaaatatttcagtctgatttgaactttatgaatttggaaattttgaattttgagttttttaaaggtaaagttgaggtgcgtattctttaagccctcctgctcaaagaggctgcagtttgagctgtttttaaggtgcgggttgagtggacattccccccagcccctcttgaattcttccttcagtccagagaactgaactcacagagctctccatggtcatgtcttacaggtcgctaatgctgtttcggtgaaagggatttataaacagatgcctggttgctttaatttcctccggaaaaaacttttctttaaaacatcataaggccagggcccctcaccctgccttatcttgcaccccaaagctttcctgccccaggcctgaaagaggctgaggcctggactttcctgcaactcaaggactttgcagccggcacagggtctgctctttctctgccagtgacagacaggctcttagcagcttccagattgacgacaagtgctgaacagtggaggaagagggacagatgaatgccgtggattgcacgtggcctcttgagcagtggctggtccagggctagtgacttgtgtcccatgatccctgtgttgtctctagagcagggattaacctctgcactactgacatgtggggccaggtcaccctttgctgtgaggctgtcctgtacattgtgggatgttcagcactgtcccttgcctcaatgccagtaacgcgtcttcctgagtggtgccaaacaaaaaggttctcaggtgttgccaaatatgtcctggggtataaaactttcctcgcctgacaaccactggtctgtagggatttttggctacacacaaaccagtatcgctcatagatcagcaaaccggggcctactagagtctgaacagctgtaatctatgaattctaagtgaaattttaaaaattgttaatttttcctatattgcattaattttaaaaaataaatctgaggcaaatatggactctcttttgcctatttcttccctcattttgctccaactctttcttcttccttacaaaagagacttttgcttttttcgaaacatttccccatgtttttctggggtctcgctatgttgcccaggctggtctcaaactcctgggctcaagtgaccctcccaagtagctcttactacaggcgtgcaccattgcacccagccccatttattcatgtcttatttcacttgatccttatcccatcccaggaaggcaacaagggtgagaaccctgtgctcagggaggttaggtctcttgtccaagggaaaacgattatccagagaagagacctggccagaacctgggtcccctgagtcctagccatgcttcccatgtgccttacttgctgaagcacccccggactgcagtgtgaacgtgctgtgcaatagtgacacgctgggcttccccacaaggctccaccctgaggtcttttaagctgtccttatgccagcctatttcttgttttttgggcctttttttttggagatagggtctcactctgtcgcccaggctggagtgcaatgacgcaatcttggcttattgcagtctcgacctcctgggctcaagagatccttccacctcagccacctgagtagcttggactacaggtgtgcaccacctctcccagttaatttttgtatttttagtagagacagagttatgccatgttactcaggctggtcttgaactcctggactcaagcgatcagcctgccttagcctcccaaagtgcaggggttacaggcttgagccattgcgcctgacctatttctggttcttagggccctggatgttaggatggatttctgaattaataataataataaaaccctcatcaagatgtgatttgcatagttgtcactttatataatattattttccttctgtgacctttccaagtctgaaacagtcccagggacttcttttggttagttatttgcaatcacctgcaggacacacacacaagaaaattgtcaggttcacgtaaccacagagctgtgcgtggcagtttcctgtctctgtcctcctgggctaagctactcaagtgagtcacaggcagcccacactacagtagctcctgcctgaggagttcagatgatgtttcggagaaaaagatgcaatcacagcttttcattgacctgttagggtcttcctgtaaagggggtcttagccaggagtcctgtgtgggcttcaggtcagggggccttcgaaccccctaaaaattatatgccaaatgtgcggatggcatatttttagatttcatttgtttctcatcaaaactgctgtttgcaaggcagttatgcactgtggttggggctataactgtttccagaggctgttgatcagtatctgttaaactttttttttttttttttgagacagtcttgctctgttgcccagacgagtaca

SEQ ID NO: 114767 - DNA, 725 bp, Homo sapiens
  Payload ID: 2419
  Gene Symbol: CASP9
  Gene Name: caspase 9, apoptosis-related cysteine peptidase
  ENST ID: ENST00000469637
  CDS Start-End: 583-725
agcaacagttgctaggatggggacgcactctctggtccctattctctttaaccctattcgtagaaccttagagcgtcagattggaagtgaccttagggattctttaactctccaactcctgcaatattgatagggagaccgaggtccagagaggggcagagatttgcccaaggcctagaatccagcattccttttatttttgtttacttatcttttttttttttgagagaatccaggacttttaatcccgtttaccgaaaaccgagctccacccaagaatgtaccagtctgtgccttaagcacggggaaagggcggtgggggtggagagagggataaggcacagggtcttgctctgtcacccaggctgaagtgcagtggtgctatcacagctcactgcagccttatctcctgggctcgagccatcctcttgggagcctcagcctcctgagtagctgggactacagcgggcaggctctggatctcggcgggatcaggccaggcagctgatcatagatctggagactcgagggagtcaggctcttcctttgttcatctcctgcttagaggacacaggccaggacatgctggcttcgtttctgcgaactaacaggcaagcagcaaagttgtcgaagccaaccctagaaaaccttaccccagtggtgctcagaccagagattcgcaaaccagaggttctcagaccggaaacacccagaccagtggacat

SEQ ID NO: 114768 - DNA, 2791 bp, Homo sapiens
  Payload ID: 2420
  Gene Symbol: CAAP1
  Gene Name: caspase activity and apoptosis inhibitor 1
  Uniprot ID: Q9H8G2
  ENST ID: ENST00000333916
  CDS Start-End: 90-1175
ccagtgcctgccgcccacggccgcaggagtcgggcttcggtcgcaccagagacagcggactttcctccgatggttgcagcagagggatcatgacggggaaaaagtcctcccgggagaaacggcgcaaacgtagcagtcaggaggcggccgcagcgctcgcggccccggacatcgtacccgcgttggccagcggcagcagtggaagcactagcggctgcgggagcgccgggggctgcgggagcgtcagctgctgtgggaacgccaattttagtggaagtgtcaccggcggtgggagcggcggcagctgttggggcgggagcagcgtggagcgcagcgagcgccggaagcggaggagtaccgactcttccagcgtctcgggctccttgcagcaggaaactaaatatattttgccaactttggaaaaagaattattcttggcagagcacagtgaccttgaagaaggtggactggacctgactgtgtcattgaaaccagttagtttctatatatcagacaaaaaagaaatgcttcagcagtgcttctgtattataggagagaaaaagttacagaagatgcttcctgatgtgttaaagaactgttcaatagaagaaattaaaaaactatgccaggaacagttagagctcctgtctgaaaaaaaaattttgaagattcttgagggtgacaatggaatggactctgatatggaagaggaagcagatgatggttctaagatgggatctgatttagtcagtcagcaagacatctgtatagattctgcttcatccgtgagagagaataagcaacctgaaggtttggaattaaaacaaggaaaaggggaagatagtgatgtactcagtataaatgcagatgcttatgacagcgacatagaaggcccatgcaacgaagaagcagctgctcccgaggcaccagaaaatacagtccaaagtgaagctggtcagatagatgacctggagaaagacattgagaaaagtgtgaatgagattctaggactggcagagtctagcccaaacgaacccaaagcagccaccctggctgttcctccaccagaagatgttcaaccttctgcacagcaactggagctgctagaacttgagatgagggcaagagcgattaaagccctaatgaaagctggtgatataaaaaagccagcctaggtatttaacttgattttgaattttaggtatgtttgaacaaagccacatcatttaattttgtatctaaaatttatttggggtcttatatgttatttctcatgtaacccttattaggactcattttagccctaaattacctgtggctgtttctttttatttttttgactacttttatattataaatgtgtgttactgtcttatgaattcatggcaatatagttggatagcctggatactttgttagatgagtatttagctgtgtctgcaaatcttaaaagccattagcaaagagtcgtggtatttttttctttatttttaaatgtttgggcaccaaacctaaaagcaaaagattgacgaagcatgtttctcttaaggctacttgtattttacaatacaatattaaattatttaatttgagaaatttagttttgcttatatgcactttttaaatatatactattttgaagattccttatgtaaatgcaaatttcctagttaaaaccgaataacagagatctgaaatgactgagaaaaacttttttattaaaggaaggaattaatttaaggcaatttttaactatgtagaactaattgcccatgtttaattatagcagacacgccattctaacaggtatttgataccattggatgcattattctaggttttttctttaataaaaatggaacaagttttcatttacattccaagctgtcaggaaatgaagaatattttattatctaggattttatctgatgtagttgcttaaagatctgatgtgctataattccatgaatcagaaataataaaatgctatcattctggatctgaagacttttgatactttttcaaaagcaaaattaatttcaggaacctttgataagttgttgttataattaatctaattttgtatagtttttgtaaataaattaccatccttccacaattagggatgcttttatccccccatcactaattgcagttgtttgataccaaaataaatttacgtagagatccttaacttaaaataaattaattttttcaaaaaacataaatctggaactgttgtttctatatttgataacaaatacagtatattttatttataagccatggtctactgatactgtatgaggactttccttatatataaaagttgcagggattgtgttttattagctgctttaattatgttaattttagagagtttttaaatggaaatagaggacatttatgaaacgctggaattgcagttacaaattctttttgttgttgttgttcctgaacatgccttggaataattctaccattttttccccctccataaatctttctaataaagcatagaaaaagcctatatgattttaaatgcttctcttaagctggtaaacagatttgagttatgagttcattgttattgcttcaagatgaaaagacagtgatataatttttctatttcaacttaaaagtaatagttaatatgctaaagtagtacagaataaactttattgctgcttactaactacaaaatactgtagatggcatctgtatgattaaacatataaagtaaaacaggtctgagggctttgtagatgattaaagtctccaccttcatgaa

SEQ ID NO: 114769 - DNA, 1236 bp, Homo sapiens
  Payload ID: 2420
  Gene Symbol: CAAP1
  Gene Name: caspase activity and apoptosis inhibitor 1
  ENST ID: ENST00000483493
  CDS Start-End: 73-474
cggccgcaggagtcgggcttcggtcgcaccagagacagcggactttcctccgatggttgcagcagagggatcatgacggggaaaaagtcctcccgggagaaacggcgcaaacgtagcagtcaggaggcggccgcagcgctcgcggccccggacatcgtacccgcgttggccagcggcagcagtggaagcactagcggctgcgggagcgccgggggctgcgggagcgtcagctgctgtgggaacgccaattttagtggaagtgtcaccggcggtgggagcggcggcagctgttggggcgggagcagcgtggagcgcagcgagcgccggaagcggaggagtaccgactcttccagcgtctcgggctccttgcagcaggtgcgtgcgcgcccctctggccgcttcctggagctgctgctttttcggaagaagtcgggcttccagagggatggggcgcaggctggagctcactgctagcgcggcaatctcaaggtcgtccgtccttgaggttcatgttcctacctaagtcctggaaactaaatatattttgccaactttggaaaaagaattattcttggcagagcacagtgaccttgaagaaggtggactggacctgactgtgtcattgaaaccagttagtttctatatatcagacaaaaaagaaatgcttcagcagtgcttctgtattataggagagaaaaagttacagaagatgcttcctgatgtgttaaagaactgttcaatagaagaaattaaaaaactatgccaggaacagttagagctcctgtctgaaaaaaaaattttgaagattcttgaggtttctttcatttataaggtgacaatggaatggactctgatatggaagaggaagcagatgatggttctaagatgggatctgatttagtcagtcagcaagacatctgtatagattctgcttcatccgtgagagagaataagcaacctgaaggtttggaattaaaacaaggaaaaggggaagatagtgatgtactcagtataaatgcagatgcttatgacagcgacatagaaggcccatgcaacgaagaagcagctgctcccgaggcaccagaaaatacagtccaaagtgaagctggtcagatagatgacctggagaaagacattgagaaaagtgtgaatgagattctaggactggcagagtctagcccaaacgaacccaaagcagccaccctggctgttcctccaccagaagatgttcaacct

SEQ ID NO: 114770 - DNA, 773 bp, Homo sapiens
  Payload ID: 2420
  Gene Symbol: CAAP1
  Gene Name: caspase activity and apoptosis inhibitor 1
  ENST ID: ENST00000520187
  CDS Start-End: 89-424
cagtgcctgccgcccacggccgcaggagtcgggcttcggtcgcaccagagacagcggactttcctccgatggttgcagcagagggatcatgacggggaaaaagtcctcccgggagaaacggcgcaaacgtagcagtcaggaggcggccgcagcgctcgcggccccggacatcgtacccgcgttggccagcggcagcagtggaagcactagcggctgcgggagcgccgggggctgcgggagcgtcagctgctgtgggaacgccaattttagtggaagtgtcaccggcggtgggagcggcggcagctgttggggcgggagcagcgtggagcgcagcgagcgccggaagcggaggagtaccgactcttccagcgtctcgggctccttgcagcaggaaaaggggaagatagtgatgtactcagtataaatgcagatgcttatgacagcgacatagaaggcccatgcaacgaagaagcagctgctcccgaggcaccagaaaatacagtccaaagtgaagctggtcagatagatgacctggagaaagacattgagaaaagtgtgaatgagattctaggactggcagagtctagcccaaacgaacccaaagcagccaccctggctgttcctccaccagaagatgttcaaccttctgcacagcaactggagctgctagaacttgagatgagggcaagagcgattaaagccctaatgaaagctggtgatataaaaaagccagcctaggtatttaacttgattttgaattttaggtatgtttg

SEQ ID NO: 114771 - DNA, 1532 bp, Homo sapiens
  Payload ID: 2420
  Gene Symbol: CAAP1
  Gene Name: caspase activity and apoptosis inhibitor 1
  Uniprot ID: Q9H8G2
  ENST ID: ENST00000625311
  CDS Start-End: 317-967
tcttccagcgtctcgggctccttgcagcaggtgcgtgcgcgcccctctggccgcttcctggagctgctgctttttcggaagaagtcgggcttccagagggatggggcgcaggctggagctcactgctagcgcggcaatctcaaggtcgtccgtccttgaggttcatgttcctacctaagtcctggaaactaaatatattttgccaactttggaaaaagaattattcttggcagagcacagtgaccttgaagaaggtggactggacctgactgtgtcattgaaaccagttagtttctatatatcagacaaaaaagaaatgcttcagcagtgcttctgtattataggagagaaaaagttacagaagatgcttcctgatgtgttaaagaactgttcaatagaagaaattaaaaaactatgccaggaacagttagagctcctgtctgaaaaaaaaattttgaagattcttgagggtgacaatggaatggactctgatatggaagaggaagcagatgatggttctaagatgggatctgatttagtcagtcagcaagacatctgtatagattctgcttcatccgtgagagagaataagcaacctgaaggtttggaattaaaacaaggaaaaggggaagatagtgatgtactcagtataaatgcagatgcttatgacagcgacatagaaggcccatgcaacgaagaagcagctgctcccgaggcaccagaaaatacagtccaaagtgaagctggtcagatagatgacctggagaaagacattgagaaaagtgtgaatgagattctaggactggcagagtctagcccaaacgaacccaaagcagccaccctggctgttcctccaccagaagatgttcaaccttctgcacagcaactggagctgctagaacttgagatgagggcaagagcgattaaagccctaatgaaagctggtgatataaaaaagccagcctaggtatttaacttgattttgaattttaggtatgtttgaacaaagccacatcatttaattttgtatctaaaatttatttggggtcttatatgttatttctcatgtaacccttattaggactcattttagccctaaattacctgtggctgtttctttttatttttttgactacttttatattataaatgtgtgttactgtcttatgaattcatggcaatatagttggatagcctggatactttgttagatgagtatttagctgtgtctgcaaatcttaaaagccattagcaaagagtcgtggtatttttttctttatttttaaatgtttgggcaccaaacctaaaagcaaaagattgacgaagcatgtttctcttaaggctacttgtattttacaatacaatattaaattatttaatttgagaaatttagttttgcttatatgcactttttaaatatatactattttgaagattccttatgtaaatgcaaatttcctagttaaaaccgaataacagagatctgaaatgactgagaaaaacttttttattaaaggaaggaattaatttaa

SEQ ID NO: 114772 - DNA, 3934 bp, Homo sapiens
  Payload ID: 2421
  Gene Symbol: CARD10
  Gene Name: caspase recruitment domain family, member 10
  Uniprot ID: Q9BWT7
  ENST ID: ENST00000251973
  CDS Start-End: 41-3139
ccccgtgcgcctcttgcccgcagaccctgaggacacggccatgccgggccgggcggaggcgggggaggccgaggaggaggccggggccggctcggggtctgaggcggaggaggacgcgctgtgggagcgaatcgagggcgtccggcatcggctggctcgcgccctgaacccggccaagctcacgccgtatctgcgccagtgccgggtcatcgacgagcaggacgaggaggaggtgctgagcacctaccgcttcccgtgccgcgtcaaccgcaccgggcgcctgatggacatcttgcgctgccgtggcaagaggggctatgaggccttcctggaagccctggagttctactaccccgaacacttcacgctgctcacgggccaggaacccgcccagcgctgctccatgatcctcgatgaggaggggcctgagggcctgacccaattcttgatgacagaggtgcgacggctgcgggaagctcgcaagagccagctgcagcgggagcagcaactgcaggcccggggccgggtgctcgaggaggagcgggcagggctggagcagcggctgcgggaccagcagcaggctcaggagcgctgtcaacggctgcgggaggactgggaggcgggcagcctggagctgctgcggctcaaggatgagaactacatgatcgccatgcgcctggcacagctcagtgaggagaagaactcggctgtacttcgcagccgtgacctgcagctggcggtggatcagctcaagctcaaagtgagtcggctggaggaagagtgtgcactgcttcgaagggccaggggcccgccccctggggcagaggagaaggagaaggagaaggagaaggagaaggagccagacaatgtggaccttgtctctgagctgcgtgctgagaaccagcggctgacggcgtcactgcgggagttgcaggagggcctgcagcaggaggcgagccggccgggggccccgggctccgagcgcatcctgctggacatcctagagcatgactggcgggaggcgcaggacagcaggcaggagctgtgccagaagctgcatgccgtgcagggggagctgcagtgggccgaggagctgcgcgaccagtacctgcaggagatggaagacctgcggctcaagcaccgcacgctgcagaaggactgtgacctgtacaagcaccgcatggccactgtcctggcccaactggaggagattgagaaggagcgagaccaggccatccagagccgtgaccggatccagttgcagtactcacagagcctcatcgagaaggaccagtaccgcaagcaggtgcggggcctggaggcggagcgggatgagctgctgacaacgctcaccagcctggagggcaccaaggctctgctggaggttcagctgcagcgggcccagggtggcacctgcctcaaggcctgtgcctcctcccattccctgtgctccaacctcagcagcacttggagcctgagcgagttcccctcccctctgggaggcccagaagcaactggggaggcagctgtcatggggggacctgagcctcacaactcggaggaagccacagacagtgaaaaggagatcaatcggctctccatcctgcccttcccccccagtgccggctccatcctccgccggcagcgtgaggaagaccccgcaccccctaagagatccttcagcagcatgtcagacatcacagggagtgtgacacttaagccctggtcccctggcctctcttcgtcctcatcctctgacagcgtgtggcctttgggaaagccggaaggcctcctggctcggggctgtggcctggacttcctcaacaggtctctggctattcgggtgtctggccggagccccccagggggcccagagccgcaggacaagggaccagatggactgtcgttttatggggacagatggtctggggctgtggtgcgcagggtgctgtctgggcctgggtccgccaggatggaaccaagagagcaaagggtggaagctgctggtctggagggggcgtgcctggaagccgaggcccagcagagaaccttgctctggaatcaggggtccacactcccctccctgatggactcgaaggcctgccagtccttccacgaggccctagaagcctgggcaaagggaccaggtgccgagcccttctacattcgtgccaacctcaccttgcctgagagggcagatccccatgccctttgcgtgaaagcccaagagatccttcgactggtggactcggcatacaagcggaggcaggaatggttctgcacccgggttgaccccctcactctgcgggacctggaccggggcaccgtgcccaattatcagagagcccagcagctcctagaagttcaggagaaatgcctgccctccagccggcaccgaggcccccgcagtaatctgaagaagagagccctggaccagctgcggctggtgaggcccaagcccgtgggggcgcctgcaggggactccccggatcagctgctgctggagccctgtgcagagccggagcggagcctcagaccctacagtttggtgcggccgctactggtgtctgccctgcggcccgtggtgctgttgcctgagtgcctggcgccccggctcatccgtaacctgctagacctgcccagctcccggctggacttccaagtgtgcccagcggaaagcctctctggggaggaactgtgcccatcctcagcgcctggagcccccaaggctcagcctgccacccctgggctaggcagcaggatccgggccatccaggagtctgttgggaagaagcactgcctgctggagctgggtgctcggggtgtgcgggagctggtgcagaacgagatctaccccatcgtcatccacgtggaggtgactgagaagaatgtccgggaagtcaggggtctgctgggccggccgggctggcgggactcagagctgctgcggcagtgccgtggctcagagcaggtgctctgggggctgccctgctcctgggtgcaggtgcccgcccatgagtggggacacgcagaggagctggccaaggtggtgcgcggccgcatcctgcaggagcaggcccgcctcgtgtgggtggagtgcggcagcagcagaggctgccccagcagcagtgaggcctgaggctcatctgatacctgcaccttctccccaagccagcgtggaccctggtgtctatggtgaagctgggccctcccaccctgagccttcctagacccttggactctcagatgcagggcccttggctctggcctctcacccccaaggctgtctctggccctgccgagcctatgggagtcccgggacagagtgcccactcccctctacttgctgctctgggcctccccacctttcctggggtctccacattcccactagtgggtcttatgtgtgtctgtgtcttctccttaaacactcgccctggagtctgttctcacacctgtgcgcaggtttgcacactcaagttctcatgggcaggctcaggtctgtcccgctgccctgggcacgaggtctcctgaggacctgggcctgttctgctcctaggagacctgagcccgttaccgcgtgactcccaccatccagctcgcgctcctcgtggattcagccatgcatggactggggtgttccctggcccatggtcacctgtgcccctcgtgtctcctcacatgggtgtctgtggttctctcctgtgtaaatgtcacgccccacccctgtttcatgtgggcactaacacgtgtgcgttcctggcgggcacactcaggaccgtgcctcacagggcccactccctgcctatgcctccctcttggggggccgaggagggcggctgctctgtcatgagaatgtacggcccgtggatgattaacgggcctttttcacttagaagctgcacattatggagcattaaacacttttgtcata

SEQ ID NO: 114773 - DNA, 4113 bp, Homo sapiens
  Payload ID: 2421
  Gene Symbol: CARD10
  Gene Name: caspase recruitment domain family, member 10
  Uniprot ID: Q9BWT7
  ENST ID: ENST00000403299
  CDS Start-End: 218-3316
ggcgtgcagacggacgcgcggggtggccgggggccggacgcacgacccggggcgggcggcaatgtggggaggcccgggcagcccaggaggctgcggggacgggggcggagccgggggcgccacgggcaccgcccccctgcgccggcggagccgccgcccgagtgcggacccgggagcccgaggcgactgtagcgtgcgggaccctgaggacacggccatgccgggccgggcggaggcgggggaggccgaggaggaggccggggccggctcggggtctgaggcggaggaggacgcgctgtgggagcgaatcgagggcgtccggcatcggctggctcgcgccctgaacccggccaagctcacgccgtatctgcgccagtgccgggtcatcgacgagcaggacgaggaggaggtgctgagcacctaccgcttcccgtgccgcgtcaaccgcaccgggcgcctgatggacatcttgcgctgccgtggcaagaggggctatgaggccttcctggaagccctggagttctactaccccgaacacttcacgctgctcacgggccaggaacccgcccagcgctgctccatgatcctcgatgaggaggggcctgagggcctgacccaattcttgatgacagaggtgcgacggctgcgggaagctcgcaagagccagctgcagcgggagcagcaactgcaggcccggggccgggtgctcgaggaggagcgggcagggctggagcagcggctgcgggaccagcagcaggctcaggagcgctgtcaacggctgcgggaggactgggaggcgggcagcctggagctgctgcggctcaaggatgagaactacatgatcgccatgcgcctggcacagctcagtgaggagaagaactcggctgtacttcgcagccgtgacctgcagctggcggtggatcagctcaagctcaaagtgagtcggctggaggaagagtgtgcactgcttcgaagggccaggggcccgccccctggggcagaggagaaggagaaggagaaggagaaggagaaggagccagacaatgtggaccttgtctctgagctgcgtgctgagaaccagcggctgacggcgtcactgcgggagttgcaggagggcctgcagcaggaggcgagccggccgggggccccgggctccgagcgcatcctgctggacatcctagagcatgactggcgggaggcgcaggacagcaggcaggagctgtgccagaagctgcatgccgtgcagggggagctgcagtgggccgaggagctgcgcgaccagtacctgcaggagatggaagacctgcggctcaagcaccgcacgctgcagaaggactgtgacctgtacaagcaccgcatggccactgtcctggcccaactggaggagattgagaaggagcgagaccaggccatccagagccgtgaccggatccagttgcagtactcacagagcctcatcgagaaggaccagtaccgcaagcaggtgcggggcctggaggcggagcgggatgagctgctgacaacgctcaccagcctggagggcaccaaggctctgctggaggttcagctgcagcgggcccagggtggcacctgcctcaaggcctgtgcctcctcccattccctgtgctccaacctcagcagcacttggagcctgagcgagttcccctcccctctgggaggcccagaagcaactggggaggcagctgtcatggggggacctgagcctcacaactcggaggaagccacagacagtgaaaaggagatcaatcggctctccatcctgcccttcccccccagtgccggctccatcctccgccggcagcgtgaggaagaccccgcaccccctaagagatccttcagcagcatgtcagacatcacagggagtgtgacacttaagccctggtcccctggcctctcttcgtcctcatcctctgacagcgtgtggcctttgggaaagccggaaggcctcctggctcggggctgtggcctggacttcctcaacaggtctctggctattcgggtgtctggccggagccccccagggggcccagagccgcaggacaagggaccagatggactgtcgttttatggggacagatggtctggggctgtggtgcgcagggtgctgtctgggcctgggtccgccaggatggaaccaagagagcaaagggtggaagctgctggtctggagggggcgtgcctggaagccgaggcccagcagagaaccttgctctggaatcaggggtccacactcccctccctgatggactcgaaggcctgccagtccttccacgaggccctagaagcctgggcaaagggaccaggtgccgagcccttctacattcgtgccaacctcaccttgcctgagagggcagatccccatgccctttgcgtgaaagcccaagagatccttcgactggtggactcggcatacaagcggaggcaggaatggttctgcacccgggttgaccccctcactctgcgggacctggaccggggcaccgtgcccaattatcagagagcccagcagctcctagaagttcaggagaaatgcctgccctccagccggcaccgaggcccccgcagtaatctgaagaagagagccctggaccagctgcggctggtgaggcccaagcccgtgggggcgcctgcaggggactccccggatcagctgctgctggagccctgtgcagagccggagcggagcctcagaccctacagtttggtgcggccgctactggtgtctgccctgcggcccgtggtgctgttgcctgagtgcctggcgccccggctcatccgtaacctgctagacctgcccagctcccggctggacttccaagtgtgcccagcggaaagcctctctggggaggaactgtgcccatcctcagcgcctggagcccccaaggctcagcctgccacccctgggctaggcagcaggatccgggccatccaggagtctgttgggaagaagcactgcctgctggagctgggtgctcggggtgtgcgggagctggtgcagaacgagatctaccccatcgtcatccacgtggaggtgactgagaagaatgtccgggaagtcaggggtctgctgggccggccgggctggcgggactcagagctgctgcggcagtgccgtggctcagagcaggtgctctgggggctgccctgctcctgggtgcaggtgcccgcccatgagtggggacacgcagaggagctggccaaggtggtgcgcggccgcatcctgcaggagcaggcccgcctcgtgtgggtggagtgcggcagcagcagaggctgccccagcagcagtgaggcctgaggctcatctgatacctgcaccttctccccaagccagcgtggaccctggtgtctatggtgaagctgggccctcccaccctgagccttcctagacccttggactctcagatgcagggcccttggctctggcctctcacccccaaggctgtctctggccctgccgagcctatgggagtcccgggacagagtgcccactcccctctacttgctgctctgggcctccccacctttcctggggtctccacattcccactagtgggtcttatgtgtgtctgtgtcttctccttaaacactcgccctggagtctgttctcacacctgtgcgcaggtttgcacactcaagttctcatgggcaggctcaggtctgtcccgctgccctgggcacgaggtctcctgaggacctgggcctgttctgctcctaggagacctgagcccgttaccgcgtgactcccaccatccagctcgcgctcctcgtggattcagccatgcatggactggggtgttccctggcccatggtcacctgtgcccctcgtgtctcctcacatgggtgtctgtggttctctcctgtgtaaatgtcacgccccacccctgtttcatgtgggcactaacacgtgtgcgttcctggcgggcacactcaggaccgtgcctcacagggcccactccctgcctatgcctccctcttggggggccgaggagggcggctgctctgtcatgagaatgtacggcccgtggatgattaacgggcctttttcacttagaagctgcacattatggagcattaaacacttttgtcataga

SEQ ID NO: 114774 - DNA, 3127 bp, Homo sapiens
  Payload ID: 2421
  Gene Symbol: CARD10
  Gene Name: caspase recruitment domain family, member 10
  Uniprot ID: Q9BWT7
  ENST ID: ENST00000406271
  CDS Start-End: 92-2332
gcacttggctggggtgtgggtctgggggcaagatcttgggcccagggtctacctgtatgggccaggctcagccccttgaagacccctagtcatgggggtgggagtaggtcttgggaatggcctccgtctgctgccctggatggaggcgagccggccgggggccccgggctccgagcgcatcctgctggacatcctagagcatgactggcgggaggcgcaggacagcaggcaggagctgtgccagaagctgcatgccgtgcagggggagctgcagtgggccgaggagctgcgcgaccagtacctgcaggagatggaagacctgcggctcaagcaccgcacgctgcagaaggactgtgacctgtacaagcaccgcatggccactgtcctggcccaactggaggagattgagaaggagcgagaccaggccatccagagccgtgaccggatccagttgcagtactcacagagcctcatcgagaaggaccagtaccgcaagcaggtgcggggcctggaggcggagcgggatgagctgctgacaacgctcaccagcctggagggcaccaaggctctgctggaggttcagctgcagcgggcccagggtggcacctgcctcaaggcctgtgcctcctcccattccctgtgctccaacctcagcagcacttggagcctgagcgagttcccctcccctctgggaggcccagaagcaactggggaggcagctgtcatggggggacctgagcctcacaactcggaggaagccacagacagtgaaaaggagatcaatcggctctccatcctgcccttcccccccagtgccggctccatcctccgccggcagcgtgaggaagaccccgcaccccctaagagatccttcagcagcatgtcagacatcacagggagtgtgacacttaagccctggtcccctggcctctcttcgtcctcatcctctgacagcgtgtggcctttgggaaagccggaaggcctcctggctcggggctgtggcctggacttcctcaacaggtctctggctattcgggtgtctggccggagccccccagggggcccagagccgcaggacaagggaccagatggactgtcgttttatggggacagatggtctggggctgtggtgcgcagggtgctgtctgggcctgggtccgccaggatggaaccaagagagcaaagggtggaagctgctggtctggagggggcgtgcctggaagccgaggcccagcagagaaccttgctctggaatcaggggtccacactcccctccctgatggactcgaaggcctgccagtccttccacgaggccctagaagcctgggcaaagggaccaggtgccgagcccttctacattcgtgccaacctcaccttgcctgagagggcagatccccatgccctttgcgtgaaagcccaagagatccttcgactggtggactcggcatacaagcggaggcaggaatggttctgcacccgggttgaccccctcactctgcgggacctggaccggggcaccgtgcccaattatcagagagcccagcagctcctagaagttcaggagaaatgcctgccctccagccggcaccgaggcccccgcagtaatctgaagaagagagccctggaccagctgcggctggtgaggcccaagcccgtgggggcgcctgcaggggactccccggatcagctgctgctggagccctgtgcagagccggagcggagcctcagaccctacagtttggtgcggccgctactggtgtctgccctgcggcccgtggtgctgttgcctgagtgcctggcgccccggctcatccgtaacctgctagacctgcccagctcccggctggacttccaagtgtgcccagcggaaagcctctctggggaggaactgtgcccatcctcagcgcctggagcccccaaggctcagcctgccacccctgggctaggcagcaggatccgggccatccaggagtctgttgggaagaagcactgcctgctggagctgggtgctcggggtgtgcgggagctggtgcagaacgagatctaccccatcgtcatccacgtggaggtgactgagaagaatgtccgggaagtcaggggtctgctgggccggccgggctggcgggactcagagctgctgcggcagtgccgtggctcagagcaggtgctctgggggctgccctgctcctgggtgcaggtgcccgcccatgagtggggacacgcagaggagctggccaaggtggtgcgcggccgcatcctgcaggagcaggcccgcctcgtgtgggtggagtgcggcagcagcagaggctgccccagcagcagtgaggcctgaggctcatctgatacctgcaccttctccccaagccagcgtggaccctggtgtctatggtgaagctgggccctcccaccctgagccttcctagacccttggactctcagatgcagggcccttggctctggcctctcacccccaaggctgtctctggccctgccgagcctatgggagtcccgggacagagtgcccactcccctctacttgctgctctgggcctccccacctttcctggggtctccacattcccactagtgggtcttatgtgtgtctgtgtcttctccttaaacactcgccctggagtctgttctcacacctgtgcgcaggtttgcacactcaagttctcatgggcaggctcaggtctgtcccgctgccctgggcacgaggtctcctgaggacctgggcctgttctgctcctaggagacctgagcccgttaccgcgtgactcccaccatccagctcgcgctcctcgtggattcagccatgcatggactggggtgttccctggcccatggtcacctgtgcccctcgtgtctcctcacatgggtgtctgtggttctctcctgtgtaaatgtcacgccccacccctgtttcatgtgggcactaacacgtgtgcgttcctggcgggcacactcaggaccgtgcctcacagggcccactccctgcctatgcctccctcttggggggccgaggagggcggctgctctgtcatgagaatgtacggcccgtggatgattaacgggcctttttcacttagaagctgcacattatggagcattaaacacttttgtcata

SEQ ID NO: 114775 - DNA, 578 bp, Homo sapiens
  Payload ID: 2421
  Gene Symbol: CARD10
  Gene Name: caspase recruitment domain family, member 10
  ENST ID: ENST00000433485
  CDS Start-End: 1-578
acttccctttattgccctcagatggctggagctctggaaacccaggtcctatccttcagcagcatgtcagacatcacagggagtgtgacacttaagccctggtcccctggcctctcttcgtcctcatcctctgacagcgtgtggcctttgggaaagccggaaggcctcctggctcggggctgtggcctggacttcctcaacaggtctctggctattcgggtgtctggccggagccccccagggggcccagagccgcaggacaagggaccagatggactgtcgttttatggggacagatggtctggggctgtggtgcgcagggtgctgtctgggcctgggtccgccaggatggaaccaagagagcaaagggtggaagctgctggtctggagggggcgtgcctggaagccgaggcccagcagagaaccttgctctggaatcaggggtccacactcccctccctgatggactcgaaggcctgccagtccttccacgaggccctagaagcctgggcaaagggaccaggtgccgagcccttctacattcgtgccaacctcaccttgcctgagagggcagatcc

SEQ ID NO: 114776 - DNA, 2140 bp, Homo sapiens
  Payload ID: 2421
  Gene Symbol: CARD10
  Gene Name: caspase recruitment domain family, member 10
  ENST ID: ENST00000437756
  CDS Start-End: 700-2140
agtgcactcatagtccagcaaactggccatgcacgtctgctcccagcttggtggtcacaccacagctgcccaccccccataccaggccaacttctggctgcacactccgaactggtgattggttaggggcatgggattttgtttgaagctgtgaagacagccacggtcacactgtggcagctctgtagcccttcatagtttagaggcctctgcccacttgctgtcttgtttgattcttgcaacacctttgggaggcaaatgatggggccaggggattgactgggcccattttactgatgaggaaactgaggcccagaggaggtggatcagctcaagctcaaagtgagtcggctggaggaagagtgtgcactgcttcgaagggccaggggcccgccccctggggcagaggagaaggagaaggagaaggagaaggagaaggagccagacaatgtggaccttgtctctgagctgcgtgctgagaaccagcggctgacggcgtcactgcgggagttgcaggagggcctgcagcaggaggcgagccggccgggggccccgggctccgagcgcatcctgctggacatcctagagcatgactggcgggaggcgcaggacagcaggcaggagctgtgccagaagctgcatgccgtgcagggggagctgcagtgggccgaggagctgcgcgaccagtacctgcaggagatggaagacctgcggctcaagcaccgcacgctgcagaaggactgtgacctgtacaagcaccgcatggccactgtcctggcccaactggaggagattgagaaggagcgagaccaggccatccagagccgtgaccggatccagttgcagtactcacagagcctcatcgagaaggaccagtaccgcaagcaggtgcggggcctggaggcggagcgggatgagctgctgacaacgctcaccagcctggagggcaccaaggctctgctggaggttcagctgcagcgggcccagggtggcacctgcctcaaggcctgtgcctcctcccattccctgtgctccaacctcagcagcacttggagcctgagcgagttcccctcccctctgggaggcccagaagcaactggggaggcagctgtcatggggggacctgagcctcacaactcggaggaagccacagacagtgaaaaggagatcaatcggctctccatcctgcccttcccccccagtgccggctccatcctccgccggcagcgtgaggaagaccccgcaccccctaagagatccttcagcagcatgtcagacatcacagggagtgtgacacttaagccctggtcccctggcctctcttcgtcctcatcctctgacagcgtgtggcctttgggaaagccggaaggcctcctggctcggggctgtggcctggacttcctcaacaggtctctggctattcgggtgtctggccggagccccccagggggcccagagccgcaggacaagggaccagatggactgtcgttttatggggacagatggtctggggctgtggtgcgcagggtgctgtctgggcctgggtccgccaggatggaaccaagagagcaaagggtggaagctgctggtctggagggggcgtgcctggaagccgaggcccagcagagaaccttgctctggaatcaggggtccacactcccctccctgatggactcgaaggcctgccagtccttccacgaggccctagaagcctgggcaaagggaccaggtgccgagcccttctacattcgtgccaacctcaccttgcctgagagggcagatccccatgccctttgcgtgaaagcccaagagatccttcgactggtggactcggcatacaagcggaggcaggaatggttctgcacccgggttgaccccctcactctgcgggacctggaccggggcaccgtgcccaattatcagagagcccagcagctcctagaagttcaggagaaatgcctgccctccagccggcaccgaggcccccgcagtaatctgaagaagagagccctggaccagctgcggctggtgaggcccaagcccgtgggggcgcctgcaggggactccccggatcagctgctgctggagccctgtgcagagccggagcggagcctcagaccctacagtttggtgcggccgc

SEQ ID NO: 114777 - DNA, 815 bp, Homo sapiens
  Payload ID: 2422
  Gene Symbol: CARD11
  Gene Name: caspase recruitment domain family, member 11
  ENST ID: ENST00000355508
  CDS Start-End: 1-815
gaagaaggcacggacgccagccctagctcctgcggatctctgcccatcaccaactccttcaccaagatgcccccccggagccgcagcagcatcatgtcaatcaccgccgagcccccgggaaacgactccatcgtcagacgctacaaggaggacgcgccccatcgcagcacagtcgaagaagacaatgacagcggcgggtttgacgccttagatctggatgatgacagtcacgaacgctactccttcggaccctcctccatccactcctcctcctcctcccaccaatccgagggcctggatgcctacgacctggagcaggtcaacctcatgttcaggaagttctctctggaaagacccttccggccttcggtcacctctgtggggcacgtgcggggcccagggccctcggtgcagcacacgacgctgaatggcgacagcctcacctcccagctcaccctgctggggggcaacgcgcgagggagcttcgtgcactcggtcaagcctggctctctggccgagaaagccggcctccgtgagggccaccagctgctgctgctagaaggctgcatccgaggcgagaggcagagtgtcccgttggacacatgcaccaaagaggaagcccactggaccatccagaggtgcagcggccccgtcacgctgcactacaaggtcaaccacgaagggtaccggaagctggtgaaggacatggaggacggcctgatcacatcgggggactcgttctacatccggctgaacctgaacatctccagccagctggacgcctgcaccatgtccctgaagtgtgacgatgttgt

SEQ ID NO: 114778 - DNA, 584 bp, Homo sapiens
  Payload ID: 2422
  Gene Symbol: CARD11
  Gene Name: caspase recruitment domain family, member 11
  ENST ID: ENST00000356408
  CDS Start-End: 366-584
gactcctgcccgcgccgcccgcagccccctcccggccctgcagcccctgggcgggcggcgcccctcggaggacggctccgggcccggggggacggagggcctggtcgcctggaggaagccggaggcctgcgtggaggaggcgccccgcgcagctggctggcggagcatgagcgccccaggaggagagagaatttgagaggaacacgaggaacccccaggacccagctggctcacaaccgcatcccaagcactgcaagtccagatgcaacgggagcctggctcaagggacgacaagatccagccggaaagtgtagaagtcacaccccaatggcgggatagcagcccctgtgtgtgagcacccctccatgccaggaggagggccagagatggatgactacatggagacgctgaaggatgaagaggacgccttgtgggagaatgtggagtgtaaccggcacatgctcagccgctatatcaaccctgccaagctcacgccctacctgcgtcagtgtaaggtcattgatgagcaggatgaagatgaagtgcttaatgcccctatgctgccatccaagatcaaccgagca

SEQ ID NO: 114779 - DNA, 4366 bp, Homo sapiens
  Payload ID: 2422
  Gene Symbol: CARD11
  Gene Name: caspase recruitment domain family, member 11
  Uniprot ID: Q9BXL7
  ENST ID: ENST00000396946
  CDS Start-End: 405-3869
agtctcatttcctgtcgggttttgcatttccctcccccgcccctcccagcctatgacatactttctctccttttttctctcctgcctcctctggccttcggactcctgcccgcgccgcccgcagccccctcccggccctgcagcccctgggcgggcggcgcccctcggaggacggctccgggcccggggggacggagggcctggtcgcctggaggaagccggaggcctgcgtggaggaggcgccccgcgcagctggctggcggagcatgagcgccccagatcccaagcactgcaagtccagatgcaacgggagcctggctcaagggacgacaagatccagccggaaagtgtagaagtcacaccccaatggcgggatagcagcccctgtgtgtgagcacccctccatgccaggaggagggccagagatggatgactacatggagacgctgaaggatgaagaggacgccttgtgggagaatgtggagtgtaaccggcacatgctcagccgctatatcaaccctgccaagctcacgccctacctgcgtcagtgtaaggtcattgatgagcaggatgaagatgaagtgcttaatgcccctatgctgccatccaagatcaaccgagcaggccggctgttggacattctacataccaaggggcaaaggggctatgtggtcttcttggagagcctagaattttattacccagaactgtacaaactggtgactgggaaagagcccactcggagattctccaccattgtggtggaggaaggccacgagggcctcacgcacttcctgatgaacgaggtcatcaagctgcagcagcagatgaaggccaaggacctgcaacgctgcgagctgctggccaggttgcggcagctggaggatgagaagaagcagatgacgctgacgcgcgtggagctgctaaccttccaggagcggtactacaagatgaaggaagagcgggacagctacaatgacgagctggtcaaggtgaaggacgacaactacaacttagccatgcgctacgcacagctcagtgaggagaagaacatggcggtcatgaggagccgagacctccaactcgagatcgatcagctaaagcaccggttgaataagatggaggaggaatgtaagctggagagaaatcagtctctaaaactgaagaatgacattgaaaatcggcccaagaaggagcaggttctggaactggagcgggagaatgaaatgctgaagaccaaaaaccaggagctgcagtccatcatccaggccgggaagcgcagcctgccagactcagacaaggccatcctggacatcttggaacacgaccgcaaggaggccctggaggacaggcaggagctggtcaacaggatctacaacctgcaggaggaggcccgccaggcagaggagctgcgagacaagtacctggaggagaaggaggacctggagctcaagtgctcgaccctgggaaaggactgtgaaatgtacaagcaccgcatgaacacggtcatgctgcagctggaggaggtggagcgggagcgggaccaggccttccactcccgagatgaagctcagacacagtactcgcagtgcttaatcgaaaaggacaagtacaggaagcagatccgcgagctggaggagaagaacgacgagatgaggatcgagatggtgcggcgggaggcctgcatcgtcaacctggagagcaagctgcggcgcctctccaaggacagcaacaacctggaccagagtctgcccaggaacctgccagtaaccatcatctctcaggactttggggatgccagccccaggaccaatggtcaagaagctgacgattcttccacctcggaggagtcacctgaagacagcaagtacttcctgccctaccatccgccccagcgcaggatgaacctgaagggcatccagctgcagagagccaaatcccccatcagcctgaagcgaacatcagattttcaagccaaggggcacgaggaagaaggcacggacgccagccctagctcctgcggatctctgcccatcaccaactccttcaccaagatgcagcccccccggagccgcagcagcatcatgtcaatcaccgccgagcccccgggaaacgactccatcgtcagacgctacaaggaggacgcgccccatcgcagcacagtcgaagaagacaatgacagcggcgggtttgacgccttagatctggatgatgacagtcacgaacgctactccttcggaccctcctccatccactcctcctcctcctcccaccaatccgagggcctggatgcctacgacctggagcaggtcaacctcatgttcaggaagttctctctggaaagacccttccggccttcggtcacctctgtggggcacgtgcggggcccagggccctcggtgcagcacacgacgctgaatggcgacagcctcacctcccagctcaccctgctggggggcaacgcgcgagggagcttcgtgcactcggtcaagcctggctctctggccgagaaagccggcctccgtgagggccaccagctgctgctgctagaaggctgcatccgaggcgagaggcagagtgtcccgttggacacatgcaccaaagaggaagcccactggaccatccagaggtgcagcggccccgtcacgctgcactacaaggtcaaccacgaagggtaccggaagctggtgaaggacatggaggacggcctgatcacatcgggggactcgttctacatccggctgaacctgaacatctccagccagctggacgcctgcaccatgtccctgaagtgtgacgatgttgtgcacgtccgtgacaccatgtaccaggacaggcacgagtggctgtgcgcgcgggtcgaccctttcacagaccatgacctggatatgggcaccatacccagctacagccgagcccagcagctcctcctggtgaaactgcagcgcctgatgcaccgaggcagccgggaggaggtagacggcacccaccacaccctgcgggcactccggaacaccctgcagccagaagaagcgctttcaacaagcgacccccgggtcagcccccgtctctcgcgagcaagcttcctttttggccagctccttcagttcgtcagcaggtccgagaacaagtataagcggatgaacagcaacgagcgggtccgcatcatctcggggagtccgctagggagcctggcccggtcctcgctggacgccaccaagctcttgactgagaagcaggaagagctggaccctgagagcgagctgggcaagaacctcagcctcatcccctacagcctggtacgcgccttctactgcgagcgccgccggcccgtgctcttcacacccaccgtgctggccaagacgctggtgcagaggctgctcaactcgggaggtgccatggagttcaccatctgcaagtcagatatcgtcacaagagatgagttcctcagaaggcagaagacggagaccatcatctactcccgagagaagaaccccaacgcgttcgaatgcatcgcccctgccaacattgaagctgtggccgccaagaacaagcactgcctgctggaggctgggatcggctgcacaagagacttgatcaagtccaacatctaccccatcgtgctcttcatccgggtgtgtgagaagaacatcaagaggttcagaaagctgctgccccgacctgagacggaggaggagttcctgcgcgtgtgccggctgaaggagaaggagctggaggccctgccgtgcctgtacgccacggtggaacctgacatgtggggcagcgtagaggagctgctccgcgttgtcaaggacaagatcggcgaggagcagcgcaagaccatctgggtggacgaggaccagctgtgaggcgggcgccctgggcagagagactctgtggcgcggggcatcctatgaggcaggcaccctgggcagagagatgcagtgggtgcggggggatcctgtggcccacagagctgccccagcagacgctccgccccacccggtgatggagccccggggggacagtcgtgcctggggaggagcagggtacagcccattcccccagccctggctgacctggcctagcagtttggccctgctggccttagcagggagacaggggagcaaagaacgccaagccggaggcccgaggccagccggcctctcgagagccagagcagcagttgaatgtaatgctggggacaggcatgctgccgccagtagggcggggacccggacagccaggtgactaccagtcctggggacacactcaccataaacacatccccaggcaggacagatcggggaaggggtgtgtaccaggctatgatttctcttgcattaaaatgtattattatttcttt

SEQ ID NO: 114780 - DNA, 4147 bp, Homo sapiens
  Payload ID: 2423
  Gene Symbol: CARD14
  Gene Name: caspase recruitment domain family, member 14
  Uniprot ID: Q9BXL6
  ENST ID: ENST00000344227
  CDS Start-End: 169-3183
gctcttccttctgcccagctccgtcccacccagcagcccgcagagaaaggaggcagctggcaccacactgggctttggagacactgcggggactgtggaccccaccctgctgcacggagctcctgcaaaagcaaacctgagaaccttgggtcctcccagcgcccagccatgggggaactgtgccgcagggactccgcactcacggcactggacgaggagacactgtgggagatgatggagagccaccgccacaggatcgtacgctgcatctgccccagccgcctcaccccctacctgcgccaggccaaggtgctgtgccagctggacgaggaggaggtgctgcacagcccccggctcaccaacagcgccatgcgggccgggcacttgctggatttgctgaagactcgagggaagaacggggccatcgccttcctggagagcctgaagttccacaaccctgacgtctacaccctggtcaccgggctgcagcctgatgttgacttcagtaactttagcggtctcatggagacatccaagctgaccgagtgcctggctggggccatcggcagcctgcaggaggagctgaaccaggaaaaggggcagaaggaggtgctgctgcggcggtgccagcagctgcaggagcacctgggcctggccgagacccgtgccgagggcctgcaccagctggaggctgaccacagccgcatgaagcgtgaggttagcgcacacttccatgaggtgctgaggctgaaggacgagatgctcagcctctcgctgcactatagcaatgcgctgcaggagaaggagctggccgcctcacgctgccgcagcctgcaggaggagctgtatctactgaagcaggagctgcagcgagccaacatggtttcctcctgtgagctggaattgcaagagcagtccctgaggacagccagcgaccaggagtccggggatgaggagctgaaccgcctgaaggaggagaatgagaaactgcgctcgctgactttcagcctggcggagaaggacattctggagcagagcctggacgaggcgcgggggagccgacaggagctggtggagcgcatccactcgctgcgggagcgggccgtggctgccgagaggcagcgagagcagtactgggaagagaaggaacagaccctgctgcagttccagaagagtaagatggcctgccaactctacagggagaaggtgaatgcgctgcaggcccaggtgtgcgagctgcagaaggagcgagaccaggcgtactccgcgagggacagtgctcagagggagatttcccagagcctggtggagaaggactccctccgcaggcaggtgttcgagctgacggaccaggtctgcgagctgcgcacacagcttcgccagctgcaggcagagcctccgggtgtgctcaagcaggaagccaggaccagggagccctgtccacgggagaagcagcggctggtgcggatgcatgccatctgccccagagacgacagcgactgcagcctcgtcagctccacagagtctcagctcttgtcggacctgagtgccacgtccagccgcgagctggtggacagcttccgctccagcagccccgcgccccccagccagcagtccctgtacaagcgggtggccgaggacttcggggaagaaccctggtctttcagcagctgcctggagatcccggagggagacccgggagccctgccgggagctaaggcaggcgacccacacctggattatgagctcctagacacggcagaccttccgcagctggaaagcagcctgcagccagtctcccctggaaggcttgatgtctcggagagcggcgtcctcatgcggcggaggccagcccgcaggatcctgagccaggtcaccatgctggcgttccagggggatgcattgctggagcagatcagcgtcatcggcgggaacctcacgggcatcttcatccaccgggtcaccccgggctcggcggcggaccagatggccttgcgcccgggcacccagattgtgatggttgattacgaagcctcagagcccttgttcaaggcagtcctggaggacacgaccctggaggaggccgtggggcttctcaggagggtggacggcttctgctgcctgtctgtgaaggtcaacacggacggttataagaggctactccaggacctggaggccaaagtggcgacctcgggggactcattctacatccgggtcaacctggccatggagggcagggccaaaggggagctgcaggtgcattgcaacgaggtcctgcacgtcaccgacaccatgttccagggctgcggctgctggcatgcccaccgcgtgaactcttacaccatgaaggatactgccgcgcacggcaccatccccaactactccagggctcagcagcagctcatagccctcatccaggacatgactcagcagtgcaccgtgacccgcaagccatcttctgggggaccacagaagctggtccgcatcgtcagtatggacaaagccaaggccagccctctgcgtttgtcctttgacaggggccagttggaccccagcaggatggagggctccagcacgtgcttctgggccgagagctgcctcaccctggtgccctataccctggtgcggccccatcgacccgcccggccccggcctgtgctcctcgtgcccagggcggttgggaagatcctgagcgagaaactgtgcctcctccaagggtttaagaagtgcctggcagagtacttgagccaggaggagtatgaggcctggagccagagaggggacatcatccaggagggagaggtgtccgggggccgctgctgggtgacccgccatgctgtggagtccctcatggaaaagaacacccatgccctcctggacgtccagctggacagtgtctgcaccctgcacaggatggacatcttccccatcgtcatccacgtctctgtcaacgagaagatggcaaagaagctcaagaagggcctacagcggttgggcacctcagaggagcagctcctggaggctgcgaggcaggaggagggagacctggaccgggcgccctgtctatacagcagcctggctcctgacggctggagcgacctggacggcctgctcagctgtgtccgccaggccatcgccgacgagcagaagaaggtggtgtggacggagcagagcccccgatgatgcaccgtgccccttcccgggactgtgggggcttctgtgtgcctgttaatgcagtcctgttcctcagcccaggccctcttggcacagctgtgggctccttggcacatgaggccggctctccccactggctggggtctaaccttgaaccctcaccacgtgcaggtcacacacagtgaagccacttgtaactgcacacttttctgtggaaacatcttcaccctttaccaggcttggcatggtctgaactggaaaccctgagaatgtttctgcagtgggacaggagggacgtcttcccatgccttccctagaaccggaggccccggacttctctggaaaaccgcctgtctgcaggcccgattcaaatctatgggggctgcacttcccttttacattttgatgtgtcaaaggcttttggagtgaccaaaagcacagaggcagcgggtggggcgcctgggtggtccccaaggtcgctgccacccttgcccggggcagaggcagaagcccacatatgctgtgacgctggccaccttttctcagcttctgaggctgcgatgcctcaggaactccagtttacagagaccagtgtgtttacttgtaaataaagcctctgcgtggtggagacggtactttcagtgggtctgtgccccgtggcccctgtgcctgttcggtgggggtgtcccagagaagcctggcaccagtacccccgtacaaggcccagcggactctgccttcccctgacctggctttgcaccccagcccttcttgggccaaacatctttactccaccttcagggctcggggaggacccaggtccgccagcacctggccttgcccctgcctcctggggctgttgcagactgaatgtcattttgacagcagtgtccaagaatcaggaagctgttctagaattcaggttggtatcatcataaatgagttcagaaaaagaacttctgtatattttact

SEQ ID NO: 114781 - DNA, 4537 bp, Homo sapiens
  Payload ID: 2423
  Gene Symbol: CARD14
  Gene Name: caspase recruitment domain family, member 14
  Uniprot ID: Q9BXL6
  ENST ID: ENST00000573882
  CDS Start-End: 537-3551
agagattgggccacattcagtcctcgcttccctgggagggggaagagtttcactctggctcctaggctggaatgcagtggcaccatctcagctctctgcaacctccacttcccaggttcaagcgattctcctgcctcaccctcctgagtagctgggactacaggcgagcaccaccacagccggctaatttttctatttctagtagaaatggggtttcaccatgttggcaggctggtctcgaactctgacctcaagtgatctgcctgcctcagcctctgaaagtgctggattgcaggcgtgagccaccgcaccaggcctaaacagatttctttacaatctaccaccatgaacagcaagcattagcattggctcttccttctgcccagctccgtcccacccagcagcccgcagagaaaggaggcagctggcaccacactgggctttggagacactgcggggactgtggaccccaccctgctgcacggagctcctgcaaaagcaaacctgagaaccttgggtcctcccagcgcccagccatgggggaactgtgccgcagggactccgcactcacggcactggacgaggagacactgtgggagatgatggagagccaccgccacaggatcgtacgctgcatctgccccagccgcctcaccccctacctgcgccaggccaaggtgctgtgccagctggacgaggaggaggtgctgcacagcccccggctcaccaacagcgccatgcgggccgggcacttgctggatttgctgaagactcgagggaagaacggggccatcgccttcctggagagcctgaagttccacaaccctgacgtctacaccctggtcaccgggctgcagcctgatgttgacttcagtaactttagcggtctcatggagacatccaagctgaccgagtgcctggctggggccatcggcagcctgcaggaggagctgaaccaggaaaaggggcagaaggaggtgctgctgcggcggtgccagcagctgcaggagcacctgggcctggccgagacccgtgccgagggcctgcaccagctggaggctgaccacagccgcatgaagcgtgaggttagcgcacacttccatgaggtgctgaggctgaaggacgagatgctcagcctctcgctgcactatagcaatgcgctgcaggagaaggagctggccgcctcacgctgccgcagcctgcaggaggagctgtatctactgaagcaggagctgcagcgagccaacatggtttcctcctgtgagctggaattgcaagagcagtccctgaggacagccagcgaccaggagtccggggatgaggagctgaaccgcctgaaggaggagaatgagaaactgcgctcgctgactttcagcctggcggagaaggacattctggagcagagcctggacgaggcgcgggggagccgacaggagctggtggagcgcatccactcgctgcgggagcgggccgtggctgccgagaggcagcgagagcagtactgggaagagaaggaacagaccctgctgcagttccagaagagtaagatggcctgccaactctacagggagaaggtgaatgcgctgcaggcccaggtgtgcgagctgcagaaggagcgagaccaggcgtactccgcgagggacagtgctcagagggagatttcccagagcctggtggagaaggactccctccgcaggcaggtgttcgagctgacggaccaggtctgcgagctgcgcacacagcttcgccagctgcaggcagagcctccgggtgtgctcaagcaggaagccaggaccagggagccctgtccacgggagaagcagcggctggtgcggatgcatgccatctgccccagagacgacagcgactgcagcctcgtcagctccacagagtctcagctcttgtcggacctgagtgccacgtccagccgcgagctggtggacagcttccgctccagcagccccgcgccccccagccagcagtccctgtacaagcgggtggccgaggacttcggggaagaaccctggtctttcagcagctgcctggagatcccggagggagacccgggagccctgccgggagctaaggcaggcgacccacacctggattatgagctcctagacacggcagaccttccgcagctggaaagcagcctgcagccagtctcccctggaaggcttgatgtctcggagagcggcgtcctcatgcggcggaggccagcccgcaggatcctgagccaggtcaccatgctggcgttccagggggatgcattgctggagcagatcagcgtcatcggcgggaacctcacgggcatcttcatccaccgggtcaccccgggctcggcggcggaccagatggccttgcgcccgggcacccagattgtgatggttgattacgaagcctcagagcccttgttcaaggcagtcctggaggacacgaccctggaggaggccgtggggcttctcaggagggtggacggcttctgctgcctgtctgtgaaggtcaacacggacggttataagaggctactccaggacctggaggccaaagtggcgacctcgggggactcattctacatccgggtcaacctggccatggagggcagggccaaaggggagctgcaggtgcattgcaacgaggtcctgcacgtcaccgacaccatgttccagggctgcggctgctggcatgcccaccgcgtgaactcttacaccatgaaggatactgccgcgcacggcaccatccccaactactccagggctcagcagcagctcatagccctcatccaggacatgactcagcagtgcaccgtgacccgcaagccatcttctgggggaccacagaagctggtccgcatcgtcagtatggacaaagccaaggccagccctctgcgtttgtcctttgacaggggccagttggaccccagcaggatggagggctccagcacgtgcttctgggccgagagctgcctcaccctggtgccctataccctggtgcggccccatcgacccgcccggccccggcctgtgctcctcgtgcccagggcggttgggaagatcctgagcgagaaactgtgcctcctccaagggtttaagaagtgcctggcagagtacttgagccaggaggagtatgaggcctggagccagagaggggacatcatccaggagggagaggtgtccgggggccgctgctgggtgacccgccatgctgtggagtccctcatggaaaagaacacccatgccctcctggacgtccagctggacagtgtctgcaccctgcacaggatggacatcttccccatcgtcatccacgtctctgtcaacgagaagatggcaaagaagctcaagaagggcctacagcggttgggcacctcagaggagcagctcctggaggctgcgaggcaggaggagggagacctggaccgggcgccctgtctatacagcagcctggctcctgacggctggagcgacctggacggcctgctcagctgtgtccgccaggccatcgccgacgagcagaagaaggtggtgtggacggagcagagcccccgatgatgcaccgtgccccttcccgggactgtgggggcttctgtgtgcctgttaatgcagtcctgttcctcagcccaggccctcttggcacagctgtgggctccttggcacatgaggccggctctccccactggctggggtctaaccttgaaccctcaccacgtgcaggtcacacacagtgaagccacttgtaactgcacacttttctgtggaaacatcttcaccctttaccaggcttggcatggtctgaactggaaaccctgagaatgtttctgcagtgggacaggagggacgtcttcccatgccttccctagaaccggaggccccggacttctctggaaaaccgcctgtctgcaggcccgattcaaatctatgggggctgcacttcccttttacattttgatgtgtcaaaggcttttggagtgaccaaaagcacagaggcagcgggtggggcgcctgggtggtccccaaggtcgctgccacccttgcccggggcagaggcagaagcccacatatgctgtgacgctggccaccttttctcagcttctgaggctgcgatgcctcaggaactccagtttacagagaccagtgtgtttacttgtaaataaagcctctgcgtggtggagacggtactttcagtgggtctgtgccccgtggcccctgtgcctgttcggtgggggtgtcccagagaagcctggcaccagtacccccgtacaaggcccagcggactctgccttcccctgacctggctttgcaccccagcccttcttgggccaaacatctttactccaccttcagggctcggggaggacccaggtccgccagcacctggccttgcccctgcctcctggggctgttgcagactgaatgtcattttgacagcagtgtccaagaatcaggaagctgttctagaattcaggttggtatcatcataaatgagttcagaaaaagaacttctgtatattttactaaaataaaaagcttttacaata

SEQ ID NO: 114782 - DNA, 582 bp, Homo sapiens
  Payload ID: 2423
  Gene Symbol: CARD14
  Gene Name: caspase recruitment domain family, member 14
  ENST ID: ENST00000575465
  CDS Start-End: 372-582
ctcgcttccctgggagggggaagctccgtcccacccagcagcccgcagagaaaggaggcagctggcaccacactgggctttggagacactgcggggactgtggaccccaccctgctgcacggagctcctgcaaaagcaaacctgagaaccttgcatacagatccctgcaagaggcatctgtctccagtggtccagcctctccttccaaatgaaaagaatcaagtcacaggaattcatgggtctgtaaggaatcgctcccatctgtgcccaggagattaacaaaggcggtggctgcagctctgtgagcagtggagaaaaattaggcacaacctgatatcctcccacaggagcggtcctcccagcgcccagccatgggggaactgtgccgcagggactccgcactcacggcactggacgaggagacactgtgggagatgatggagagccaccgccacaggatcgtacgctgcatctgccccagccgcctcaccccctacctgcgccaggccaaggtgctgtgccagctggacgaggaggaggtgctgcacagcccccggctcaccaacagcgccatgcgggccg

SEQ ID NO: 114783 - DNA, 1554 bp, Homo sapiens
  Payload ID: 2423
  Gene Symbol: CARD14
  Gene Name: caspase recruitment domain family, member 14
  ENST ID: ENST00000571450
  CDS Start-End: 1-1426
ctatagcaatgcgctgcaggagaaggagctggccgcctcacgctgccgcagcctgcaggaggagctgtatctactgaagcaggagctgcagcgagccaacatggtttcctcctgtgagctggaattgcaagagcagtccctgaggacagccagcgaccaggagtccggggatgaggagctgaaccgcctgaaggaggagaatgagaaactgcgctcgctgactttcagcctggcggagaaggacattctggagcagagcctggacgaggcgcgggggagccgacaggagctggtggagcgcatccactcgctgcgggagcgggccgtggctgccgagaggcagcgagagcagtactgggaagagaaggaacagaccctgctgcagttccagaagagtaagatggcctgccaactctacagggagaaggtgaatgcgctgcaggcccaggtgtgcgagctgcagaaggagcgagaccaggcgtactccgcgagggacagtgctcagagggagatttcccagagcctggtggagaaggactccctccgcaggcaggtgttcgagctgacggaccaggtctgcgagctgcgcacacagcttcgccagctgcaggcagagcctccgggtgtgctcaagcaggaagccaggaccagggagccctgtccacgggagaagcagcggctggtgcggatgcatgccatctgccccagagacgacagcgactgcagcctcgtcagctccacagagtctcagctcttgtcggacctgagtgccacgtccagccgcgagctggtggacagcttccgctccagcagccccgcgccccccagccagcagtccctgtacaagcgggtggccgaggacttcggggaagaaccctggtctttcagcagctgcctggagatcccggagggagacccgggagccctgccgggagctaaggcaggcgacccacacctggattatgagctcctagacacggcagaccttccgcagctggaaagcagcctgcagccagtctcccctggaaggcttgatgtctcggagagcggcgtcctcatgcggcggaggccagcccgcaggatcctgagccaggtcaccatgctggcgttccagggggatgcattgctggagcagatcagcgtcatcggcgggaacctcacgggcatcttcatccaccgggtcaccccgggctcggcggcggaccagatggccttgcgcccgggcacccagattgtgatggttataagaggctactccaggacctggaggccaaagtggcgacctcgggggactcattctacatccgggtcaacctggccatggagggcagggccaaaggggagctgcaggtgcattgcaacgaggtcctgcacgtcaccgacaccatgttccagggctgcggctgctggcatgcccaccgcgtgaactcttacaccatgaaggatactgccgcgcacggcaccatccccaactactccagggctcagcagcagctcatagccctcatccaggacatgactcagcagtgcaccgtgacccgcaagccatcttct

SEQ ID NO: 114784 - DNA, 3766 bp, Homo sapiens
  Payload ID: 2423
  Gene Symbol: CARD14
  Gene Name: caspase recruitment domain family, member 14
  ENST ID: ENST00000575500
  CDS Start-End: 192-1673
ctcgcttccctgggagggggaaggctcttccttctgcccagctccgtcccacccagcagcccgcagagaaaggaggcagctggcaccacactgggctttggagacactgcggggactgtggaccccaccctgctgcacggagctcctgcaaaagcaaacctgagaaccttgggtcctcccagcgcccagccatgggggaactgtgccgcagggactccgcactcacggcactggacgaggagacactgtgggagatgatggagagccaccgccacaggatcgtacgctgcatctgccccagccgcctcaccccctacctgcgccaggccaaggtgctgtgccagctggacgaggaggaggtgctgcacagcccccggctcaccaacagcgccatgcgggccgggcacttgctggatttgctgaagactcgagggaagaacggggccatcgccttcctggagagcctgaagttccacaaccctgacgtctacaccctggtcaccgggctgcagcctgatgttgacttcagtaactttagcggtctcatggagacatccaagctgaccgagtgcctggctggggccatcggcagcctgcaggaggagctgaaccaggaaaaggggcagaaggaggtgctgctgcggcggtgccagcagctgcaggagcacctgggcctggccgagacccgtgccgagggcctgcaccagctggaggctgaccacagccgcatgaagcgtgaggttagcgcacacttccatgaggtgctgaggctgaaggacgagatgctcagcctctcgctgcactatagcaatgcgctgcaggagaaggagctggccgcctcacgctgccgcagcctgcaggaggagctgtatctactgaagcaggagctgcagcgagccaacatggtttcctcctgtgagctggaattgcaagagcagtccctgaggacagccagcgaccaggagtccggggatgaggagctgaaccgcctgaaggaggagaatgagaaactgcgctcgctgactttcagcctggcggagaaggacattctggagcagagcctggacgaggcgcgggggagccgacaggagctggtggagcgcatccactcgctgcgggagcgggccgtggctgccgagaggcagcgagagcagggagaaggtgaatgcgctgcaggcccaggtgtgcgagctgcagaaggagcgagaccaggcgtactccgcgagggacagtgctcagagggagatttcccagagcctggtggagaaggactccctccgcaggcaggtgttcgagctgacggaccaggtctgcgagctgcgcacacagcttcgccagctgcaggcagagcctccgggtgtgctcaagcaggaagccaggaccagggagccctgtccacgggagaagcagcggctggtgcggatgcatgccatctgccccagagacgacagcgactgcagcctcgtcagctccacagagtctcagctcttgtcggacctgagtgccacgtccagccgcgagctggtggacagcttccgctccagcagccccgcgccccccagccagcagtccctgtacaagcgggtggccgaggacttcggggaagaaccctggtctttcagcagctgcctggagatcccggagggagacccgggagccctgccgggagctaaggcaggcgacccacacctggattatgagctcctagacacggcagaccttccgcagctggaaagcagcctgcagccagtctcccctggaaggcttgatgtctcggagagcggcgtcctcatgcggcggaggccagcccgcaggatcctgagccaggtcaccatgctggcgttccagggggatgcattgctggagcagatcagcgtcatcggcgggaacctcacgggcatcttcatccaccgggtcaccccgggctcggcggcggaccagatggccttgcgcccgggcacccagattgtgatggttgattacgaagcctcagagcccttgttcaaggcagtcctggaggacacgaccctggaggaggccgtggggcttctcaggagggtggacggcttctgctgcctgtctgtgaaggtcaacacggacggttataagaggctactccaggacctggaggccaaagtggcgacctcgggggactcattctacatccgggtcaacctggccatggagggcagggccaaaggggagctgcaggtgcattgcaacgaggtcctgcacgtcaccgacaccatgttccagggctgcggctgctggcatgcccaccgcgtgaactcttacaccatgaaggatactgccgcgcacggcaccatccccaactactccagggctcagcagcagctcatagccctcatccaggacatgactcagcagtgcaccgtgacccgcaagccatcttctgggggaccacagaagctggtccgcatcgtcagtatggacaaagccaaggccagccctctgcgtttgtcctttgacaggggccagttggaccccagcaggatggagggtgaggcctggctccagcacgtgcttctgggccgagagctgcctcaccctggtgccctataccctggtgcggccccatcgacccgcccggccccggcctgtgctcctcgtgcccagggcggttgggaagatcctgagcgagaaactgtgcctcctccaagggtttaagaagtgcctggcagagtacttgagccaggaggagtatgaggcctggagccagagaggggacatcatccaggagggagaggtgtccgggggccgctgctgggtgacccgccatgctgtggagtccctcatggaaaagaacacccatgccctcctggacgtccagctggacagtgtctgcaccctgcacaggatggacatcttccccatcgtcatccacgtctctgtcaacgagaagatggcaaagaagctcaagaagggcctacagcggttgggcacctcagaggagcagctcctggaggctgcgaggcaggaggagggagacctggaccgggcgccctgtctatacagcagcctggctcctgacggctggagcgacctggacggcctgctcagctgtgtccgccaggccatcgccgacgagcagaagaaggtggtgtggacggagcagagcccccgatgatgcaccgtgccccttcccgggactgtgggggcttctgtgtgcctgttaatgcagtcctgttcctcagcccaggccctcttggcacagctgtgggctccttggcacatgaggccggctctccccactggctggggtctaaccttgaaccctcaccacgtgcaggtcacacacagtgaagccacttgtaactgcacacttttctgtggaaacatcttcaccctttaccaggcttggcatggtctgaactggaaaccctgagaatgtttctgcagtgggacaggagggacgtcttcccatgccttccctagaaccggaggccccggacttctctggaaaaccgcctgtctgcaggcccgattcaaatctatgggggctgcacttcccttttacattttgatgtgtcaaaggcttttggagtgaccaaaagcacagaggcagcgggtggggcgcctgggtggtccccaaggtcgctgccacccttgcccggggcagaggcagaagcccacatatgctgtgacgctggccaccttttctcagcttctgaggctgcgatgcctcaggaactccagtttacagagaccagtgtgtttacttgtaaataaagcctctgcgtggtgg

SEQ ID NO: 114785 - DNA, 562 bp, Homo sapiens
  Payload ID: 2423
  Gene Symbol: CARD14
  Gene Name: caspase recruitment domain family, member 14
  ENST ID: ENST00000576785
  CDS Start-End: 432-562
cactgccgttcagttcagccagagattgggccacattcagtcctcgcttccctgggagggggaaggctcttccttctgcccagctccgtcccacccagcagcccgcagagaaaggaggcagctggcaccacactgggctttggagacactgcggggactgtggaccccaccctgctgcacggagctcctgcaaaagcaaacctgagaaccttgcatacagatccctgcaagaggcatctgtctccagtggtccagcctctccttccaaatgaaaagaatcaagtcacaggaattcatgggtctgtaaggaatcgctcccatctgtgcccaggagattaacaaaggcggtggctgcagctctgtgagcagtggagaaaaattaggcacaacctgatatcctcccacaggagcggtcctcccagcgcccagccatgggggaactgtgccgcagggactccgcactcacggcactggacgaggagacactgtgggagatgatggagagccaccgccacaggatcgtacgctgcatctgccccagccgcctcaccccctacctgcg

SEQ ID NO: 114786 - DNA, 2607 bp, Homo sapiens
  Payload ID: 2423
  Gene Symbol: CARD14
  Gene Name: caspase recruitment domain family, member 14
  Uniprot ID: Q9BXL6
  ENST ID: ENST00000570421
  CDS Start-End: 178-2400
tgacttcaggctcttccttctgcccagctccgtcccacccagcagcccgcagagaaaggaggcagctggcaccacactgggctttggagacactgcggggactgtggaccccaccctgctgcacggagctcctgcaaaagcaaacctgagaaccttgggtcctcccagcgcccagccatgggggaactgtgccgcagggactccgcactcacggcactggacgaggagacactgtgggagatgatggagagccaccgccacaggatcgtacgctgcatctgccccagccgcctcaccccctacctgcgccaggccaaggtgctgtgccagctggacgaggaggaggtgctgcacagcccccggctcaccaacagcgccatgcgggccgggcacttgctggatttgctgaagactcgagggaagaacggggccatcgccttcctggagagcctgaagttccacaaccctgacgtctacaccctggtcaccgggctgcagcctgatgttgacttcagtaactttagcggtctcatggagacatccaagctgaccgagtgcctggctggggccatcggcagcctgcaggaggagctgaaccaggaaaaggggcagaaggaggtgctgctgcggcggtgccagcagctgcaggagcacctgggcctggccgagacccgtgccgagggcctgcaccagctggaggctgaccacagccgcatgaagcgtgaggttagcgcacacttccatgaggtgctgaggctgaaggacgagatgctcagcctctcgctgcactatagcaatgcgctgcaggagaaggagctggccgcctcacgctgccgcagcctgcaggaggagctgtatctactgaagcaggagctgcagcgagccaacatggtttcctcctgtgagctggaattgcaagagcagtccctgaggacagccagcgaccaggagtccggggatgaggagctgaaccgcctgaaggaggagaatgagaaactgcgctcgctgactttcagcctggcggagaaggacattctggagcagagcctggacgaggcgcgggggagccgacaggagctggtggagcgcatccactcgctgcgggagcgggccgtggctgccgagaggcagcgagagcagtactgggaagagaaggaacagaccctgctgcagttccagaagagtaagatggcctgccaactctacagggagaaggtgaatgcgctgcaggcccaggtgtgcgagctgcagaaggagcgagaccaggcgtactccgcgagggacagtgctcagagggagatttcccagagcctggtggagaaggactccctccgcaggcaggtgttcgagctgacggaccaggtctgcgagctgcgcacacagcttcgccagctgcaggcagagcctccgggtgtgctcaagcaggaagccaggaccagggagccctgtccacgggagaagcagcggctggtgcggatgcatgccatctgccccagagacgacagcgactgcagcctcgtcagctccacagagtctcagctcttgtcggacctgagtgccacgtccagccgcgagctggtggacagcttccgctccagcagccccgcgccccccagccagcagtccctgtacaagcgggtggccgaggacttcggggaagaaccctggtctttcagcagctgcctggagatcccggagggagacccgggagccctgccgggagctaaggcaggcgacccacacctggattatgagctcctagacacggcagaccttccgcagctggaaagcagcctgcagccagtctcccctggaaggcttgatgtctcggagagcggcgtcctcatgcggcggaggccagcccgcaggatcctgagccaggtcaccatgctggcgttccagggggatgcattgctggagcagatcagcgtcatcggcgggaacctcacgggcatcttcatccaccgggtcaccccgggctcggcggcggaccagatggccttgcgcccgggcacccagattgtgatggttgattacgaagcctcagagcccttgttcaaggcagtcctggaggacacgaccctggaggaggccgtggggcttctcaggagggtggacggcttctgctgcctgtctgtgaaggtcaacacggacggttataagaggctactccaggacctggaggccaaagtggcgacctcgggggactcattctacatccgggtcaacctggccatggagggcagggccaaaggggagctgcaggtgcattgcaacgaggtcctgcacgtcaccgacaccatgttccagggctgcggctgctggcatgcccaccgcgtgaactcttacaccatgaaggatactgccgcgcacggcaccatccccaactactccaggtgagcagctgcctcgagctcggtgcgtccccagagaggcccacagggaaatggcacccagcctgcctcggcttcctcctcctgcccagcaatagagggtgggcgtggtgagacccccctaaggagggaagcctgccaagatcactgctgaagatgttgtttctttgtgatggatgctttatatattgcaaatgaaatgttcattctagaa

SEQ ID NO: 114787 - DNA, 613 bp, Homo sapiens
  Payload ID: 2424
  Gene Symbol: CARD16
  Gene Name: caspase recruitment domain family, member 16
  Uniprot ID: Q5EG05
  ENST ID: ENST00000375704
  CDS Start-End: 80-373
gtgtacacgccctgccaaaaaggaaggcgaaacatactttcagtttcagcccacacaagaagggtaggagagaaaagccatggccgacaaggtcctgaaggagaagagaaagctgtttatccattccatgggtgaaggtacaataaatggcttactggatgaattattacagacaagggtgctgaaccaggaagagatggagaaagtaaaacgtgaaaatgctacagttatggataagacccgagctttgattgactccgttattccgaaaggggcacaggcatgccaaatttgcatcacatacatttgtgaagaagacagttacctggcagagacgctgggactctcagcaggtccgatacctggaaattagcttagtacacaagactcccaattactattttcttccttcccagctcttcaggcagtgcaggacaacccagctatgcccacatgctcaagcccagaaggcagaatcaagctttgctttctagaagacgctcaaaggatatggaaacaaaagttgcagaggtgccatgttcagaatacaataataaagtggagtgaaagatatacttcaggcagttttgaaatgcagtggctttttcttaga

SEQ ID NO: 114788 - DNA, 686 bp, Homo sapiens
  Payload ID: 2424
  Gene Symbol: CARD16
  Gene Name: caspase recruitment domain family, member 16
  Uniprot ID: Q5EG05
  ENST ID: ENST00000375706
  CDS Start-End: 19-612
gggtaggagagaaaagccatggccgacaaggtcctgaaggagaagagaaagctgtttatccattccatgggtgaaggtacaataaatggcttactggatgaattattacagacaagggtgctgaaccaggaagagatggagaaagtaaaacgtgaaaatgctacagttatggataagacccgagctttgattgactccgttattccgaaaggggcacaggcatgccaaatttgcatcacatacatttgtgaagaagacagttacctggcagagacgctgggactctcagcagctcttcaggcagtgcaggacaacccagctatgcccacatgctcaagcccagaaggcagaatcaagctttgctttctagaagacgctcaaaggatatggaaacaaaagttgcagaggtgccatgttcagaatacaataataaagtggagtgaaagatatacttcaggcagttttgaaatgcagtggctttttcttagaaccaattttattgagcggttctggaggaacatacttctgctccccttgcataaaggatctctatatcctagaatcccaggtttaggtaaagagttgcaaactggaactcataaattatcatagtcttcacccagtctgtctcttagaatttatttcccactgacacaaacaagccattttgtctgcttgtataaccc

SEQ ID NO: 114789 - DNA, 445 bp, Homo sapiens
  Payload ID: 2424
  Gene Symbol: CARD16
  Gene Name: caspase recruitment domain family, member 16
  ENST ID: ENST00000528513
  CDS Start-End: 159-445
gagaaaagccatggccggtgagtcttttactgttccaagaacaggtccctgggaagaaagagttgtggaaagggctggctcttctggaagccataattagtatctgtggaagtttagacaaggtcctgaaggagaagagaaagctgtttatccattccatgggtgaaggtacaataaatggcttactggatgaattattacagacaagggtgctgaaccaggaagagatggagaaagtaaaacgtgaaaatgctacagttatggataagacccgagctttgattgactccgttattccgaaaggggcacaggcatgccaaatttgcatcacatacatttgtgaagaagacagttacctggcagagacgctgggactctcagcagctcttcaggcagtgcaggacaacccagctatgcccacatgctcaagcccagaaggcagaat

SEQ ID NO: 114790 - DNA, 503 bp, Homo sapiens
  Payload ID: 2424
  Gene Symbol: CARD16
  Gene Name: caspase recruitment domain family, member 16
  Uniprot ID: Q5EG05
  ENST ID: ENST00000525374
  CDS Start-End: 18-311
gggaggagagaaaagccatggccgacaaggtcctgaaggagaagagaaagctgtttatccattccatgggtgaaggtacaataaatggcttactggatgaattattacagacaagggtgctgaaccaggaagagatggagaaagtaaaacgtgaaaatgctacagttatggataagacccgagctttgattgactccgttattccgaaaggggcacaggcatgccaaatttgcatcacatacatttgtgaagaagacagttacctggcagagacgctgggactctcagcaggtccgatacctggaaattagcttagtacacaagactcccaattactattttcttccttcccagctcttcaggcagtgcaggacaacccagctatgcccacatgctcaagcccagaaggcagaatcaagctttgctttctagaagacgctcaaaggatatggaaacaaaagttgcagaggtgccatgttcagaatacaataataaagtggagt

SEQ ID NO: 114791 - DNA, 466 bp, Homo sapiens
  Payload ID: 2425
  Gene Symbol: CARD17
  Gene Name: caspase recruitment domain family, member 17
  Uniprot ID: Q5XLA6
  ENST ID: ENST00000375707
  CDS Start-End: 18-350
gggaggagagaaaagccatggccgacaaggtcctgaaggagaagagaaagcagtttatccgttcagtgggcgaaggtacaataaatggcttactgggtgaattattggagacaagggtgctgagccaggaagagatagagatagtaaaatgtgaaaatgctacagttatggataaggcccgagctttgcttgactctgttattcggaaaggggctccagcatgccaaatttgcatcacatacatttgtgaagaagacagtcacctggcagggacgctgggactctcagcaggtccaacatctggaaatcaccttactacacaagattctcaaatagtacttccttcctaggttcaactttcatttgagcagccagatgataaagcacagatgcccagcactgaaagagttacttcgacaagacgtttctatctcttcccagtacattaaaataaggaagctgtatg

SEQ ID NO: 114792 - DNA, 652 bp, Homo sapiens
  Payload ID: 2426
  Gene Symbol: CARD18
  Gene Name: caspase recruitment domain family, member 18
  Uniprot ID: P57730
  ENST ID: ENST00000530950
  CDS Start-End: 1-273
atggctgaccaactcttgcgtaaaaagagaagaatttttatccattcagtgggtgcaggcacaataaatgccttgctggattgcctattagaggatgaagttattagccaggaagacatgaacaaagtgagagatgaaaatgacactgtcatggataaggctcgagtcttgattgaccttgttactggaaaaggacccaagtcttgctgcaaatttatcaagcatctctgtgaagaagaccctcaacttgcctcaaagatgggtttgcactaagagagaagatggaactctggagcacttcagagacttcccagagcttcttccaagggagaagatattctcgtgaaagaaaaaaacaaaacaaaacaacagtgcttttttcaaacctgattaatttcatcaatttccaataaatctttcattctctcatattactttcttcttattctttctctcctcataccaacagaggataattcatcaataataatgaaggtcatgatgattgtaatgtaattaagaaagtccctccctttcccttcctttctgtttagttcctttgcaatcctgtagagacatgtacagcttactttggtgcttttagcactgagagtctgctgtgatgggaataaaatgaagtcccagctcagaa

SEQ ID NO: 114793 - DNA, 627 bp, Homo sapiens
  Payload ID: 2426
  Gene Symbol: CARD18
  Gene Name: caspase recruitment domain family, member 18
  ENST ID: ENST00000526823
  CDS Start-End: 315-470
agtttcccaggtcactcagtgagcatatgtaggtaatgctagaatcagaaggaagtacgtggagtaaatgcaaaggtataagaccgttccttgggattactgtacttgtggagagaaatgtttaaatgattgttaccctgttggtaaattgagagggaaattgtgtcatgttcattatttgaggaatctttgtgcttccaacagaccaactcttgcgtaaaaagagaagaatttttatccattcagtgggtgcaggcacaataaatgccttgctggattgcctattagaggatgaagttattagccaggaagacatgaacaaagtgagagatgaaaatgacactgtcatggataaggctcgagtcttgattgaccttgttactggaaaaggacccaagtcttgctgcaaatttatcaagcatctctgtgaagaagaccctcaacttgcctcaaagatgggtttgcactaagagagaagatggaactctggagcacttcagagacttcccagagcttcttccaagggagaagatattctcgtgaaagaaaaaaacaaaacaaaacaacagtgcttttttcaaacctgattaatttcatcaatttccaataaatctttcattctctcat

SEQ ID NO: 114794 - DNA, 422 bp, Homo sapiens
  Payload ID: 2426
  Gene Symbol: CARD18
  Gene Name: caspase recruitment domain family, member 18
  ENST ID: ENST00000532895
  CDS Start-End: 195-350
agaggcagggtgggaagatgcccagacttgcacagcgtttttgaaggaacagataaaggccaggaagaatctgggatcctactgaccaactcttgcgtaaaaagagaagaatttttatccattcagtgggtgcaggcacaataaatgccttgctggattgcctattagaggatgaagttattagccaggaagacatgaacaaagtgagagatgaaaatgacactgtcatggataaggctcgagtcttgattgaccttgttactggaaaaggacccaagtcttgctgcaaatttatcaagcatctctgtgaagaagaccctcaacttgcctcaaagatgggtttgcactaagagagaagatggaactctggagcacttcagagacttcccagagcttcttccaagggagaagatattctcgtg

SEQ ID NO: 114795 - DNA, 855 bp, Homo sapiens
  Payload ID: 2427
  Gene Symbol: CARD19
  Gene Name: caspase recruitment domain family, member 19
  Uniprot ID: Q96LW7
  ENST ID: ENST00000375464
  CDS Start-End: 129-680
aaaaggggcgggcgagcacggcccgcgggcggcgttcgctggagctggtggaccgggcggctgaccgaggggcggacgcgcggcggggcagaccgctggggactgcgggcggcgctgtgtccgtcgccatgacagatcagacctattgtgaccgcctggtgcaggacacgcctttcctgacaggccatgggcgcttgagtgagcagcaggtggacaggatcatcctccagctgaaccgttactacccacagatccttaccaacaaggaggcggaaaagttccggaaccccaaggcatccttgcgtgtgcggctctgtgacctcctgagccacctgcagcggagcggtgagcgggactgccaggagttctaccgagccctgtatatccatgcccagcccctgcacagccgcctgcccagccgccacgctctgcagaactcagattgcacagagctagactcgggcagccagagcggcgagctgagtaacaggggacccatgagcttcctggctggcctgggccttgctgtgggactggccctgctcctgtactgctatccgccagaccccaagggcctgccagggacccggcgcgtcctcggtttctcgcctgtcatcatcgacagacatgtcagccgctacctgctggccttcctggcagatgacctaggggggctctgacagaccctggacccagggcctcacctgccactcaaccaaagagtcctcgagccggcccgccaaggggactgctgcttctttttctaaatgcatatttttcattatttataatttgtgtaaaaaacacaccttcaccttacaaggtgctgaccatattaaatgttcaggttctctc

SEQ ID NO: 114796 - DNA, 2291 bp, Homo sapiens
  Payload ID: 2427
  Gene Symbol: CARD19
  Gene Name: caspase recruitment domain family, member 19
  Uniprot ID: Q96LW7
  ENST ID: ENST00000466409
  CDS Start-End: 129-815
aaaaggggcgggcgagcacggcccgcgggcggcgttcgctggagctggtggaccgggcggctgaccgaggggcggacgcgcggcggggcagaccgctggggactgcgggcggcgctgtgtccgtcgccatgacagatcagacctattgtgaccgcctggtgcaggacacgcctttcctgacaggccatgggcgcttgagtgagcagcaggtggacaggatcatcctccagctgaaccgttactacccacagatccttaccaacaaggaggcggaaaagttccggaaccccaaggcatccttgcgtgtgcggctctgtgacctcctgagccacctgcagcggagcggtgagcgggactgccaggagttctaccgagccctgtatatccatgcccagcccctgcacagccgcctgcccagccgccacgctctgcgtaagttccacatcaccaaccatgcatgcttggtgctggcccggggagggcaccccagcctgccgttgatggcatggatgtcctccatgaccacccaagtctgctgcagcccaggcctggcatcccctctcgcctcagcccctccccagaggccaccctctggccccgaggggagagtgtggcaggcacaggcagtgcagatgttggtctctgtctcccactttctcccccttcctccgtctctctctcatggcagttttcacacagcatggggcatcttatacgtccactcttgcccttccttttctaacctcattccacggggatcccttcatgtctgtgtggacagcaaccttgttcccacagctgcatggcgctcctaggcggtcccagctggaattacccaaccccatgacggaccctttcattgcagcgatctgcacacgtgtgggtgtttccataggacattgtcaggcacggatggctggtccgaagcacgtgcatttcagttttgaggctcctgtcctcaggcagtgtggactcaggccctgggagtcatgtggatgccagtagcctgggcccacagagctgctgggatgtggggggcatatcaagttgaagatggcaactctgatctgacgcctctgtgctcagggcccctggaggaggggctactgccccttggcccttagacaacaggacagagaccagagggactgggcggcttgtcccaggctactgggctgtggtctctgaccccctggaggcctccccacgcctcacagaacacagtgcagacggtgggcggggagagctcgaggggaggcccagccctgcaggtgggactggctctccctccccagccacgagtatgccacagggggctttcaaaaccaggcagggccaagccttggccccactggaggtagagcaccttctgtggctcccgggtgcctttaggcccgtccaggagttggagcagaggagaagacccagactgtgcatagttccctgaggagggctagcctcaggtgccacagcctggttcggcctggcggccccaggaggcagcagcaaccttgggcttcctgcggggtgactaccttgccctccggccctgcccgttgactaactatgctctgtggttttgtttccagagaactcagattgcacagagctagactcgggcagccagagcggcgagctgagtaacaggggtaacacctccctgctgcccctccctctctctccctctctctccctctctctttaccctccccagggctccatctccgcctcaggggcttctccaccccaagtctggctccattcctggccttctgttggtgacagaccccccccctaaggtgctcgtttgggggctcttcaggcagcacctcagcctggcacccccactcccctgcgcagcccccaggcctcaggaccccacccctctgaggcccaggggagccctgttcacgctggtttctccccaggacccatgagcttcctggctggcctgggccttgctgtgggactggccctgctcctgtactgctatccgccagaccccaagggcctgccagggacccggcgcgtcctcggtttctcgcctgtcatcatcgacagacatgtcagccgctacctgctggccttcctggcagatgacctaggggggctctgacagaccctggacccagggcctcacctgccactcaaccaaagagtcctcgagccggcccgccaaggggactgctgcttctttttctaaatgcatatttttcattatttataatttgtgtaaaaaacacaccttcaccttacaaggtgctgaccatattaaatgttcaggttctctc

SEQ ID NO: 114797 - DNA, 4221 bp, Homo sapiens
  Payload ID: 2428
  Gene Symbol: CARD6
  Gene Name: caspase recruitment domain family, member 6
  Uniprot ID: Q9BX69
  ENST ID: ENST00000254691
  CDS Start-End: 200-3313
ccacaaggaccccggatcagagagtgctccgagctgggttgccccactgtgcttgtatctgcactctccaacactaggcatcattgacatgttaaagcttagccaaatagaattgttctttgtcattctttttttaacttttacttattcattaggatgatttcataatatatttcctggtttagaggaaacaggaacaatggctaccgagagtactccctcagagatcatagaaagagaaagaaaaaagttgcttgaaatccttcaacatgatcctgattctatcttagacacgttaacttctcggaggctgatttctgaggaagagtatgagactctggagaatgttacagatctcctgaagaaaagtcggaagctgttaattttggtacagaaaaagggagaggcgacctgtcagcattttctcaagtgtttatttagtacttttccacagtcagctgccatttgcggcttaaggcatgaagttttaaaacatgagaatacagtacctcctcaatctatgggggcaagcagtaattcagaagatgctttttctcctggaataaaacagcctgaagcccctgagatcacagtgttcttcagtgagaaggaacacttggatttggaaacctctgagtttttcagggacaagaaaactagttatagggaaacagctttgtctgccaggaagaatgagaaggaatatgacacaccagaagtcacattatcatattcagttgagaaagttggatgtgaagttccagcaactattacatatataaaagatggacagagatatgaggagctagatgattctttatacttaggaaaagaggaatatctaggatctgttgacacccctgaagatgcagaagccactgtggaagaggaggtttatgatgacccagagcacgttggatatgatggtgaagaggacttcgagaattcagaaaccacagagttctctggtgaagaaccaagttatgagggatcagaaaccagcctttcattggaggaggaacaggagaaaagtatagaagaaagaaaaaaggtgtttaaagatgtcctgttatgtttgaacatggatagaagcagaaaggttctgccagattttgttaaacaattctccttagatcgaggatgtaagtggacccctgagagtccaggagacttagcctggaatttcctgatgaaagttcaagcacgagatgtgacggctagggattcaatcctcagtcacaaggttctggatgaagatagcaaggaggatttgctggctggagtggagaatttggaaattcgagacatacaaaccattaatccccttgacgtgctttgtgccaccatgctgtgttcagatagctctttgcaacgccaagtcatgtcaaacatgtatcagtgccagtttgctcttcccctgctactgccagatgcagaaaacaacaaaagcatcttaatgctgggggccatgaaagacattgtgaagaagcagtcaacacagttttcaggggggcctacagaggatacagaaaagtttctgactctcatgaagatgcctgtcatctcttttgtgcgtctaggatactgtagcttctctaagtccagaatcctcaacacacttctcagccctgcccagttgaaattacacaaaatctttcttcatcaagatttgcctcttttggtgcttccccggcaaatctctgatggcctggttgagataacatggtgttttcctgatagcgatgatagaaaggaaaacccctttttccaaaagcctgttgctctggctaatctccgtggaaatctagaaagcttttggactcagtttggttttttgatggaagtttcttcagctgtgttttttttcactgactgtttaggtgagaaggaatgggacttgctaatgtttttaggagaggctgccattgaaagatgctactttgttctcagttcccaagccagggagagtgaagaggctcaaatttttcagaggatactgaacttgaagccagcacagctactgttttgggagaggggagatgctggggatagaaggaagaacatggagggccttcaagctgccctccaggaagtgatgttctcttcttgcctcagatgtgtgtctgtggaggatatggccgccctggccagggagctggggattcaggtagatgaagactttgaaaacactcagagaattcaagtttcctctggagaaaacatggctgggacagctgaaggtgagggtcagcaaagacacagtcagctaaaaagctcatctaaaagccaggctctaatgccaattcaagagcctgggactcaatgtgagctcagccagaatcttcagaatctctatggtaccccagtattcaggcctgttctagagaactcctggctctttccaaccagaattggaggtaactttaaccatgtttccttgaaagcctcctgggttatgggccgcccctttgggtcagagcagaggcctaagtggttccatcctttgccttttcagaatgcaggggcccagggccgaggtaaaagttttggtattcaatccttccatccccagatattttattcaggtgaaagattcatgaaattttccagagttgctcggggatgtcactcgaatggaacatttgggagactgccaagacccatttgtcagcatgtacaggcctgccctgagagaccacaaatgatgggaactcttgaaaggtctagggcagtagcctccaagataggtcactcctattccctggattcacagccagcaagagcagtagggaagccatggcctcagcaagcttgcaccagggtaacagagttaactgaagcaactggaaaactgataagaacatcccatattggaaagcctcaccctcagtcctttcaaccagcagcagccacacaaaaactaagacctgcttctcagcaaggagtccagatgaagacacaaggtggggcttcaaatccagctctccaaatagggtcccatcccatgtgcaagagctctcagttcaaatccgatcagtccaacccatccacagtcaaacactcccagcctaaacccttccattctgtgccctctcaacctaaatcctctcagacaaaatcctgtcagtcccagccctcccaaactaaaccttctccatgcaaatctactcagcctaagccaagccagccctggcctccccagtctaagccttctcagcccagaccccctcaacctaagtcatcctcaaccaatccttcacaagctaaggcacaccactcaaaagcagggcagaagaggggagggaagcattaaagagctaactccagagatctataaagcatatcctttacccaggccattcctatcatatagtaagcagaagagttgccatgaaagtaaaagactactgtcattagcatgtaaaacaaagaaagatatacatgactgaattggatatctttgtttgtttgtttgagacagagtttcactcttgttgcccaggctggagtgcaatggcacgatctcggctcaccgcaacctctgcttcctggcttaaagtgattctcctgcctcagcctctcgagtagctgggattacaggcatgcaccaccacacccagctaattttgtatttttagtagaggcagggtttctccatgttggtcaggctggtcttgaactcccgacctcaggtgatccgcccacctaggcctctcaaagtgttgggattacgtgtgtaagccacagtgcccagcccgaattggatatctttaagatatctgtaagtgttatatccctaaccaagaagaaaaatatgaaaataattaagactagaatcaagcagtagataattgaatccaatcttgggtattattagataatgtataacttgcacccagggaatgggggtctatgagacaaccccacttggagaagaatggggttagggtctctaattgcaaagtgactgtacaataggacgaaagttgcctctgtgtctgagaaagtatcttagttgttggctgctccagaggtatctttgtcaaaagcttctggttcaatatcagccactgagcagataaccctgcttatttggtgtggttaaatcaactagcttctgctaatagccccaatttgcttgaatgggaaaactctctcatttgacccttataggtagaaataatgaattaacaaccaataaaattaatcatttggcattaa

SEQ ID NO: 114798 - DNA, 1094 bp, Homo sapiens
  Payload ID: 2428
  Gene Symbol: CARD6
  Gene Name: caspase recruitment domain family, member 6
  ENST ID: ENST00000381677
  CDS Start-End: 76-1008
attctttttttaacttttacttattcattaggatgatttcataatatatttcctggtttagaggaaacaggaacaatggctaccgagagtactccctcagagatcatagaaagagaaagaaaaaagttgcttgaaatccttcaacatgatcctgattctatcttagacacgttaacttctcggaggctgatttctgaggaagagtatgagactctggagaatgttacagatctcctgaagaaaagtcggaagctgttaattttggtacagaaaaagggagaggcgacctgtcagcattttctcaagtgtttatttagtacttttccacagtcagctgccatttgcggcttaaggcatgaagttttaaaacatgagaatacagtacctcctcaatctatgggggcaagcagtaattcagaagatgctttttctcctggaataaaacagcctgaagcccctgagatcacagtgttcttcagtgagaaggaacacttggatttggaaacctctgagtttttcagggacaagaaaactagttatagggaaacagctttgtctgccaggaagaatgagaaggaatatgacacaccagaagtcacattatcatattcagttgagaaagttggatgtgaagttccagcaactattacatatataaaagatggacagagatatgaggagctagatgattctttatacttaggaaaagaggaatatctaggatctgttgacacccctgaagatgcagaagccactgtggaagaggaggtttatgatgacccagagcacgttggatatgatggtgaagaggacttcgagaattcagaaaccacagagttctctggtgaagaaccaagttatgagggatcagaaaccagcctttcattggaggaggaacaggagaaaagtatagaaggctggtctcgaactcatgggcttaagcgatcctcccacgttggcctcccaaagtgctgggattacaggcgtgagccaccctgcctggcctgaaaattctgcctcaaacatctcaaacatccatttatattttgtacaagaaagtaaataaaatttttctttttaacattaaaaaaatt

SEQ ID NO: 114799 - DNA, 963 bp, Homo sapiens
  Payload ID: 2429
  Gene Symbol: CARD8
  Gene Name: caspase recruitment domain family, member 8
  ENST ID: ENST00000357778
  CDS Start-End: 115-963
ccagtagaaatgtaggtgcattggttccagtcctcagcaaatggtgcctcccaccaaagctgtccagcctggcttcccagaaagtcttatggaatttggtgtatacgtttagtcatgacaaggaacattcttgtgcctttctttgtctggattcaaagaagcgaaactgcatattctggtcactctcagctctcattcgatatctgtatcccaacagcacctgtgcaattcagcctccaggagtccttcaggccatgcctcttccaaccctttacctcttacatgtctagtattttcttttcaggagacatttgctcagaagagaatcaaatagtttcctcttatgcttctaaagtctgttttgagatcgaagaagattataaaaatcgtcagtttctggggcctgaaggaaatgtggatgttgagttgattgataagagcacaaacagatacagcgtttggttccccactgctggctggtatctgtggtcagccacaggcctcggcttcctggtaagggatgaggtcacagtgacgattgcgtttggttcctggagtcagcacctggccctggacctgcagcaccatgaacagtggctggtgggcggccccttgtttgatgtcactgcagagccagaggaggctgtcgccgaaatccacctcccccacttcatctccctccaagcaggtgaggtggacgtctcctggtttctcgttgcccattttaagaatgaagggatggtcctggagcatccagcccgggtggagcctttctatgctgtcctggaaagccccagcttctctctgatgggcatcctgctgcggatcgccagtgggactcgcctctccatccccatcacttccaacacattgatctattatcacccccaccccgaagatattaagttccacttgtaccttgtccccagcgacgccttgctaacaaaggtaagacagagtctt

SEQ ID NO: 114800 - DNA, 5263 bp, Homo sapiens
  Payload ID: 2429
  Gene Symbol: CARD8
  Gene Name: caspase recruitment domain family, member 8
  Uniprot ID: Q9Y2G2
  ENST ID: ENST00000391898
  CDS Start-End: 44-1657
ggtaaaaaagatacagtaaagacataaataccacatttgacaaatggaaaaaaaggagtgtccagaaaagagtagcagcagtgaggaagagctgccgagacgggacagtggatccagtaggaacatagatgcatccaaactcattagactacaaggatcacggaaactgttggttgacaatagcatacgggaactgcaatacacaaaaactggaattttttttcaggctgaggcctgtgtgacaaatgatacggtatacagggagctaccctgtgtttctgagaccctttgtgacatctcacattttttccaagaagatgatgagacagaggcagagccattattgttccgtgctgttcctgagtgtcaactatctgggggggacattcccagtgtatcagaagagcaggaatcttcagagggacaagattcaggagacatttgctcagaagagaatcaaatagtttcctcttatgcttctaaagtctgttttgagatcgaagaagattataaaaatcgtcagtttctggggcctgaaggaaatgtggatgttgagttgattgataagagcacaaacagatacagcgtttggttccccactgctggctggtatctgtggtcagccacaggcctcggcttcctggtaagggatgaggtcacagtgacgattgcgtttggttcctggagtcagcacctggccctggacctgcagcaccatgaacagtggctggtgggcggccccttgtttgatgtcactgcagagccagaggaggctgtcgccgaaatccacctcccccacttcatctccctccaagcaggtgaggtggacgtctcctggtttctcgttgcccattttaagaatgaagggatggtcctggagcatccagcccgggtggagcctttctatgctgtcctggaaagccccagcttctctctgatgggcatcctgctgcggatcgccagtgggactcgcctctccatccccatcacttccaacacattgatctattatcacccccaccccgaagatattaagttccacttgtaccttgtccccagcgacgccttgctaacaaaggcgatagatgatgaggaagatcgcttccatggtgtgcgcctgcagacttcgcccccaatggaacccctgaactttggttccagttatattgtgtctaattctgctaacctgaaagtaatgcccaaggagttgaaattgtcctacaggagccctggagaaattcagcacttctcaaaattctatgctgggcagatgaaggaacccattcaacttgagattactgaaaaaagacatgggactttggtgtgggatactgaggtgaagccagtggatctccagcttgtagctgcatcagcccctcctcctttctcaggtgcagcctttgtgaaggagaaccaccggcaactccaagccaggatgggggacctgaaaggggtgctcgatgatctccaagacaatgaggttcttactgagaatgagaaggagctggtggagcaggaaaagacacggcagagcaagaatgaggccttgctgagcatggtggagaagaaaggggacctggccctggacgtgctcttcagaagcattagtgaaagggacccttacctcgtgtcctatcttagacagcagaatttgtaaaatgagtcagttaggtagtctggaagagagaatccagcgttctcattggaaatggataaacagaaatgtgatcattgatttcagtgttcaagacagaagaagactgggtaacatctatcacacaggctttcaggacagacttgtaacctggcatgtacctattgactgtatcctcatgcattttcctcaagaatgtctgaagaaggtagtaatattccttttaaattttttccaaccattgcttgatatatcactattttatccattgacatgattcttgaagacccaggataaaggacatccggataggtgtgtttatgaaggatggggcctggaaaggcaacttttcctgattaatgtgaaaaataattcctatggacactccgtttgaagtatcaccttctcataactaaaagcagaaaagctaacaaaagcttctcagctgaggacactcaaggcatacatgatgacagtcttttttttttttgtatgttaggactttaacactttatctatggctactgttattagaacaatgtaaatgtatttgctgaaagagagcacaaaaatgggagaaaatgcaaacatgagcagaaaatattttcccactggtgtgtagcctgctacaaggagttgttgggttaaatgttcatggtcaactccaaggaatactgagatgaaatgtggtaaatcaactccacagaaccaccaaaaagaaaatgagggtaattcagcttattctgagacagacattcctggcaatgtaccatacaaaaaataagccaactctgacatttggattctaccatagactctgtcattttgtagccatttcagctgtcttttgattaatgttttcgtggcacacatatttccatccttttatgtttaatctgtttaaaacaagttcctagtagacaccatctggttgagtcagttttttttatggtgtattttgaacccattctgatagtctcttttaactggaagatttcaattacttacgttaatgtaattattaatatgttaggatttatcctcagtcagccagtttgttatgtcttttctattctactgttatcacatttgtaccacttaaagtggaatctaggcactttatcaccatttagatcctattaccttttctcatctaggatatagttatcttctacataatctttctgtatcttaaaacccatcaataaattattatatattttctacttttaatcactcagaagatttaaaaaactcatgagaagagtaatctgttatgtttttccagatatttaccatttctgttgctcttccttcattattttccaaatttcgttctgcaaatttccacttcctctgatagacgttttttagttcttttagagtggttctgataggtacagattctcttattttttgcttcctctgaggacatctttttctcaccttcattctcagtgatgttttttgcttgtagtatttttagttgacattgttttctgttcagcagtttccttttagcttccgtatttcctgatgagaaatctgcagtcattcaaattgttgtttccctgtatgtagtgtgtcatttttctgtcagatttcaaggtatttatctttagtttttagccatttcattatgttggggatgagtttccttgttttattccctttggaatttgctccaattcataaatttgcagttttatgtcttttaccaaacttagaggttttcagcctaatttctaaaaatactttttattagcctgattttcatctttataggaaatagtttaagtgatgacaagttccaatagcttatatgcccagaaggccttcaaaataagaattttgaaagaatacagaaaacaaacttttatatccttctcatgtcttctactgtaaaattcatatgctttgctactctaaacctagtttgaaatcaacagtcttgagaatagatgaaaattttgatgaatagtggaattcttttaaatggaaacctcttacatgtgattttccttgccatctagaaataaaccatagtatttatgttgaatcaatcaatattatattttgtttttttcctcctcttctgagactcttattgtggaaatgttagacttttatgttttcctaaatgtccctgatattctacttatttagaacatcttttcattttttccattattctgattgggtaattttaatttgtctattttcaaatttgctggagtgttcacctgttgttatctgtgtcgtcccactgagtgcattcaccaccttttaaattttggtcactgtatgtatcagttctaaaatttccattttgttctctatattttaaatttcttgccttatattctattttcctgcaaatgtgtcagcatttgcttgtttgagctttttttttttcaagacagggtctcaactctgttacccaggctggagtgcagtggtgcgatctcagctcactgcaacctctgcctcctggttcaagcgattattgtgcctcagcctccagagtagctgggattacaggcatgcaccaccacagcccagctaattttttgtatttttagtagagacagagttttgctatgttggccaggctggttttgaactcctggcctcaagtgatccacccacctcagcctcccaaagtgctgggattacaggccactacacctggcacatttgagtatttttttttttttttttttttttttgagatggagtctcgctctgtcatctaggctggagtgcagtggtgtgatctcagctcactgcagcctctgtctcccgggctcaagcgattctcttgcctcagcctcctgagtagctaggactacaggtgcatgccaacacgcccggctaatttttttttaaaaatatttttagtagagacagggtttcaccattttggccaggatggtcttgatctcctgacctcatgatccacccgcctcggccttccaaagtgctgggattacaggcatgagccaccgtgcctggcctcatttgagtatttttataatgtctcttttaaagtctttgtcagataatttcactgtacatgttattcagtgtttggtgtccactgagttgtcatttgccagacaagtggagatttttgcagctcatccttgtattctcagtagttccgatatgtaccctcgaaatgtgaatgttatcttatgagactctgttttatttgtatccaacagaagatgtttattatttatttggctttctgtgaactgaggtcttaatatcagctcattttaaaagtctttgcagtggtattcggatctatcctgtgtgtgcctatgagattgggtgcagtgtatcctgttagctccattctcagggcgtttgaatgtgaattaggaccagcgcaatgaatgctcaagttggggttgggcgttagaattcataaaagtctttatatgctcagattctgcagctccatcctcttcatgattgtgatcgtaaggacagtggaattttgcagttgtctataccttatcttgaagtagaactaaattgttacatttgaagaatgtacttcataaatttacaaaaataaaaaaataggttaatgttatt

SEQ ID NO: 114801 - DNA, 5210 bp, Homo sapiens
  Payload ID: 2429
  Gene Symbol: CARD8
  Gene Name: caspase recruitment domain family, member 8
  Uniprot ID: Q9Y2G2
  ENST ID: ENST00000447740
  CDS Start-End: 141-1604
tgaccaagaggaacagaacacagagcagcctggcagtgtccaagcaacaagcctccgctcctccttcctgcaccctggggctcctgaaactcacatgggtaaaaaagatacagtaaagacataaataccacatttgacaaatggaaaaaaaggagtgtccagaaaagagtagcagcagtgaggaagagctgccgagacgggtatacagggagctaccctgtgtttctgagaccctttgtgacatctcacattttttccaagaagatgatgagacagaggcagagccattattgttccgtgctgttcctgagtgtcaactatctgggggggacattcccagtgtatcagaagagcaggaatcttcagagggacaagattcaggagacatttgctcagaagagaatcaaatagtttcctcttatgcttctaaagtctgttttgagatcgaagaagattataaaaatcgtcagtttctggggcctgaaggaaatgtggatgttgagttgattgataagagcacaaacagatacagcgtttggttccccactgctggctggtatctgtggtcagccacaggcctcggcttcctggtaagggatgaggtcacagtgacgattgcgtttggttcctggagtcagcacctggccctggacctgcagcaccatgaacagtggctggtgggcggccccttgtttgatgtcactgcagagccagaggaggctgtcgccgaaatccacctcccccacttcatctccctccaagcaggtgaggtggacgtctcctggtttctcgttgcccattttaagaatgaagggatggtcctggagcatccagcccgggtggagcctttctatgctgtcctggaaagccccagcttctctctgatgggcatcctgctgcggatcgccagtgggactcgcctctccatccccatcacttccaacacattgatctattatcacccccaccccgaagatattaagttccacttgtaccttgtccccagcgacgccttgctaacaaaggcgatagatgatgaggaagatcgcttccatggtgtgcgcctgcagacttcgcccccaatggaacccctgaactttggttccagttatattgtgtctaattctgctaacctgaaagtaatgcccaaggagttgaaattgtcctacaggagccctggagaaattcagcacttctcaaaattctatgctgggcagatgaaggaacccattcaacttgagattactgaaaaaagacatgggactttggtgtgggatactgaggtgaagccagtggatctccagcttgtagctgcatcagcccctcctcctttctcaggtgcagcctttgtgaaggagaaccaccggcaactccaagccaggatgggggacctgaaaggggtgctcgatgatctccaagacaatgaggttcttactgagaatgagaaggagctggtggagcaggaaaagacacggcagagcaagaatgaggccttgctgagcatggtggagaagaaaggggacctggccctggacgtgctcttcagaagcattagtgaaagggacccttacctcgtgtcctatcttagacagcagaatttgtaaaatgagtcagttaggtagtctggaagagagaatccagcgttctcattggaaatggataaacagaaatgtgatcattgatttcagtgttcaagacagaagaagactgggtaacatctatcacacaggctttcaggacagacttgtaacctggcatgtacctattgactgtatcctcatgcattttcctcaagaatgtctgaagaaggtagtaatattccttttaaattttttccaaccattgcttgatatatcactattttatccattgacatgattcttgaagacccaggataaaggacatccggataggtgtgtttatgaaggatggggcctggaaaggcaacttttcctgattaatgtgaaaaataattcctatggacactccgtttgaagtatcaccttctcataactaaaagcagaaaagctaacaaaagcttctcagctgaggacactcaaggcatacatgatgacagtcttttttttttttgtatgttaggactttaacactttatctatggctactgttattagaacaatgtaaatgtatttgctgaaagagagcacaaaaatgggagaaaatgcaaacatgagcagaaaatattttcccactggtgtgtagcctgctacaaggagttgttgggttaaatgttcatggtcaactccaaggaatactgagatgaaatgtggtaaatcaactccacagaaccaccaaaaagaaaatgagggtaattcagcttattctgagacagacattcctggcaatgtaccatacaaaaaataagccaactctgacatttggattctaccatagactctgtcattttgtagccatttcagctgtcttttgattaatgttttcgtggcacacatatttccatccttttatgtttaatctgtttaaaacaagttcctagtagacaccatctggttgagtcagttttttttatggtgtattttgaacccattctgatagtctcttttaactggaagatttcaattacttacgttaatgtaattattaatatgttaggatttatcctcagtcagccagtttgttatgtcttttctattctactgttatcacatttgtaccacttaaagtggaatctaggcactttatcaccatttagatcctattaccttttctcatctaggatatagttatcttctacataatctttctgtatcttaaaacccatcaataaattattatatattttctacttttaatcactcagaagatttaaaaaactcatgagaagagtaatctgttatgtttttccagatatttaccatttctgttgctcttccttcattattttccaaatttcgttctgcaaatttccacttcctctgatagacgttttttagttcttttagagtggttctgataggtacagattctcttattttttgcttcctctgaggacatctttttctcaccttcattctcagtgatgttttttgcttgtagtatttttagttgacattgttttctgttcagcagtttccttttagcttccgtatttcctgatgagaaatctgcagtcattcaaattgttgtttccctgtatgtagtgtgtcatttttctgtcagatttcaaggtatttatctttagtttttagccatttcattatgttggggatgagtttccttgttttattccctttggaatttgctccaattcataaatttgcagttttatgtcttttaccaaacttagaggttttcagcctaatttctaaaaatactttttattagcctgattttcatctttataggaaatagtttaagtgatgacaagttccaatagcttatatgcccagaaggccttcaaaataagaattttgaaagaatacagaaaacaaacttttatatccttctcatgtcttctactgtaaaattcatatgctttgctactctaaacctagtttgaaatcaacagtcttgagaatagatgaaaattttgatgaatagtggaattcttttaaatggaaacctcttacatgtgattttccttgccatctagaaataaaccatagtatttatgttgaatcaatcaatattatattttgtttttttcctcctcttctgagactcttattgtggaaatgttagacttttatgttttcctaaatgtccctgatattctacttatttagaacatcttttcattttttccattattctgattgggtaattttaatttgtctattttcaaatttgctggagtgttcacctgttgttatctgtgtcgtcccactgagtgcattcaccaccttttaaattttggtcactgtatgtatcagttctaaaatttccattttgttctctatattttaaatttcttgccttatattctattttcctgcaaatgtgtcagcatttgcttgtttgagctttttttttttcaagacagggtctcaactctgttacccaggctggagtgcagtggtgcgatctcagctcactgcaacctctgcctcctggttcaagcgattattgtgcctcagcctccagagtagctgggattacaggcatgcaccaccacagcccagctaattttttgtatttttagtagagacagagttttgctatgttggccaggctggttttgaactcctggcctcaagtgatccacccacctcagcctcccaaagtgctgggattacaggccactacacctggcacatttgagtatttttttttttttttttttttttttgagatggagtctcgctctgtcatctaggctggagtgcagtggtgtgatctcagctcactgcagcctctgtctcccgggctcaagcgattctcttgcctcagcctcctgagtagctaggactacaggtgcatgccaacacgcccggctaatttttttttaaaaatatttttagtagagacagggtttcaccattttggccaggatggtcttgatctcctgacctcatgatccacccgcctcggccttccaaagtgctgggattacaggcatgagccaccgtgcctggcctcatttgagtatttttataatgtctcttttaaagtctttgtcagataatttcactgtacatgttattcagtgtttggtgtccactgagttgtcatttgccagacaagtggagatttttgcagctcatccttgtattctcagtagttccgatatgtaccctcgaaatgtgaatgttatcttatgagactctgttttatttgtatccaacagaagatgtttattatttatttggctttctgtgaactgaggtcttaatatcagctcattttaaaagtctttgcagtggtattcggatctatcctgtgtgtgcctatgagattgggtgcagtgtatcctgttagctccattctcagggcgtttgaatgtgaattaggaccagcgcaatgaatgctcaagttggggttgggcgttagaattcataaaagtctttatatgctcagattctgcagctccatcctcttcatgattgtgatcgtaaggacagtggaattttgcagttgtctataccttatcttgaagtagaactaaattgttacatttgaagaatgtacttcataaatttacaaaaataaaaaaataggttaatgttatt

SEQ ID NO: 114802 - DNA, 614 bp, Homo sapiens
  Payload ID: 2429
  Gene Symbol: CARD8
  Gene Name: caspase recruitment domain family, member 8
  ENST ID: ENST00000520007
  CDS Start-End: 359-571
atttcaaaagaagttgagaaccagagaaaccgacctaaggggattctcccatttggcccgtcctaccctaaagtcaccacctgctgcttttctggagcgcttaccagtgaccaagaggaacagaacacagagcagcctggcagtgtccaagcaacaagcctccgctcctccttcctgcaccctggggctcctgaaactcacatgagaaggagggctgtctgagattcgagggaaacaagctctcaggacttccggtcgccatgatggctgtgggcggtaaacgcggttagtgcaagcatctgggccatcttcaatggtaaaaaagatacagtaaagacataaataccacatttgacaaatggaaaaaaaggagtgtccagaaaagagtagcagcagtgaggaagagctgccgagacgggacagtggatccagtaggaacatagatgcatccaaactcattagactacaaggatcacggaaactgttggttgacaatagcatacgggaactgcaatacacaaaaactggaattttttttcaggctgaggcctgtgtgacaaatgatacgtaagggacatctatttgttgggaaaaaattaaagatttggaatttt

SEQ ID NO: 114803 - DNA, 1903 bp, Homo sapiens
  Payload ID: 2429
  Gene Symbol: CARD8
  Gene Name: caspase recruitment domain family, member 8
  Uniprot ID: Q9Y2G2
  ENST ID: ENST00000521613
  CDS Start-End: 296-1759
agcttacttccctcagttctcagaaagcccacctcctctgcgagcgttatttcaaaagaagttgagaaccagagaaaccgacctaaggggattctcccatttggcccgtcctaccctaaagtcaccacctgctgcttttctggagcgcttaccagtgaccaagaggaacagaacacagagcagcctggcagtgtccaagcaacaagcctccgctcctccttcctgcaccctggggctcctgaaactcacatgggtaaaaaagatacagtaaagacataaataccacatttgacaaatggaaaaaaaggagtgtccagaaaagagtagcagcagtgaggaagagctgccgagacgggtatacagggagctaccctgtgtttctgagaccctttgtgacatctcacattttttccaagaagatgatgagacagaggcagagccattattgttccgtgctgttcctgagtgtcaactatctgggggggacattcccagtgtatcagaagagcaggaatcttcagagggacaagattcaggagacatttgctcagaagagaatcaaatagtttcctcttatgcttctaaagtctgttttgagatcgaagaagattataaaaatcgtcagtttctggggcctgaaggaaatgtggatgttgagttgattgataagagcacaaacagatacagcgtttggttccccactgctggctggtatctgtggtcagccacaggcctcggcttcctggtaagggatgaggtcacagtgacgattgcgtttggttcctggagtcagcacctggccctggacctgcagcaccatgaacagtggctggtgggcggccccttgtttgatgtcactgcagagccagaggaggctgtcgccgaaatccacctcccccacttcatctccctccaagcaggtgaggtggacgtctcctggtttctcgttgcccattttaagaatgaagggatggtcctggagcatccagcccgggtggagcctttctatgctgtcctggaaagccccagcttctctctgatgggcatcctgctgcggatcgccagtgggactcgcctctccatccccatcacttccaacacattgatctattatcacccccaccccgaagatattaagttccacttgtaccttgtccccagcgacgccttgctaacaaaggcgatagatgatgaggaagatcgcttccatggtgtgcgcctgcagacttcgcccccaatggaacccctgaactttggttccagttatattgtgtctaattctgctaacctgaaagtaatgcccaaggagttgaaattgtcctacaggagccctggagaaattcagcacttctcaaaattctatgctgggcagatgaaggaacccattcaacttgagattactgaaaaaagacatgggactttggtgtgggatactgaggtgaagccagtggatctccagcttgtagctgcatcagcccctcctcctttctcaggtgcagcctttgtgaaggagaaccaccggcaactccaagccaggatgggggacctgaaaggggtgctcgatgatctccaagacaatgaggttcttactgagaatgagaaggagctggtggagcaggaaaagacacggcagagcaagaatgaggccttgctgagcatggtggagaagaaaggggacctggccctggacgtgctcttcagaagcattagtgaaagggacccttacctcgtgtcctatcttagacagcagaatttgtaaaatgagtcagttaggtagtctggaagagagaatccagcgttctcattggaaatggataaacagaaatgtgatcattgatttcagtgttcaagacagaagaagactgggtaacatctatcacacaggctttcaggacagacttgt

SEQ ID NO: 114804 - DNA, 622 bp, Homo sapiens
  Payload ID: 2429
  Gene Symbol: CARD8
  Gene Name: caspase recruitment domain family, member 8
  ENST ID: ENST00000522431
  CDS Start-End: 293-505
ggggctcctgaaactcacatggtaagcgctgcagaaacgcagcaggtggtgactttaggggaggacaggccaaatgggagaatccccttaagcttcggtttctctagttctcaacttcttttgaaataatgttcatagagaaggagggctgtctgagattcgagggaaacaagctctcaggacttccggtcgccatgatggctgtgggcggtaaacgcggttagtgcaagcatctgggccatcttcaatggtaaaaaagatacagtaaagacataaataccacatttgacaaatggaaaaaaaggagtgtccagaaaagagtagcagcagtgaggaagagctgccgagacgggacagtggatccagtaggaacatagatgcatccaaactcattagactacaaggatcacggaaactgttggttgacaatagcatacgggaactgcaatacacaaaaactggaattttttttcaggctgaggcctgtgtgacaaatgatacgtaagggacatctatttgttgggaaaaaattaaagatttggaattttgctccattggtttatgtacattcataagaagcaaagacatgcaggttatttgcataaaaattagtatatatgtt

SEQ ID NO: 114805 - DNA, 2016 bp, Homo sapiens
  Payload ID: 2429
  Gene Symbol: CARD8
  Gene Name: caspase recruitment domain family, member 8
  ENST ID: ENST00000517510
  CDS Start-End: 248-496
atttcaaaagaagttgagaaccagagaaaccgacctaaggggattctcccatttggcccgtcctaccctaaagtcaccacctgctgcttttctggagcgcttaccagtgaccaagaggaacagaacacagagcagcctggcagtgtccaagcaacaagcctccgctcctccttcctgcaccctggggctcctgaaactcacatgggtaaaaaagatacagtaaagacataaataccacatttgacaaatggaaaaaaaggagtgtccagaaaagagtagcagcagtgaggaagagctgccgagacgggtatacagggagctaccctgtgtttctgagaccctttgtgacatctcacattttttccaagaagatgatgagacagaggcagagccattattgttccgtgctgttcctgagtgtcaactatctgggggggacattcccaggagacatttgctcagaagagaatcaaatagtttcctcttatgcttctaaagtctgttttgagatcgaagaagattataaaaatcgtcagtttctggggcctgaaggaaatgtggatgttgagttgattgataagagcacaaacagatacagcgtttggttccccactgctggctggtatctgtggtcagccacaggcctcggcttcctggtaagggatgaggtcacagtgacgattgcgtttggttcctggagtcagcacctggccctggacctgcagcaccatgaacagtggctggtgggcggccccttgtttgatgtcactgcagagccagaggaggctgtcgccgaaatccacctcccccacttcatctccctccaagcaggtgaggtggacgtctcctggtttctcgttgcccattttaagaatgaagggatggtcctggagcatccagcccgggtggagcctttctatgctgtcctggaaagccccagcttctctctgatgggcatcctgctgcggatcgccagtgggactcgcctctccatccccatcacttccaacacattgatctattatcacccccaccccgaagatattaagttccacttgtaccttgtccccagcgacgccttgctaacaaaggcgatagatgatgaggaagatcgcttccatggtgtgcgcctgcagacttcgcccccaatggaacccctgaactttggttccagttatattgtgtctaattctgctaacctgaaagtaatgcccaaggagttgaaattgtcctacaggagccctggagaaattcagcacttctcaaaattctatgctgggcagatgaaggaacccattcaacttgagattactgaaaaaagacatgggactttggtgtgggatactgaggtgaagccagtggatctccagcttgtagctgcatcagcccctcctcctttctcagggttactgtggcaacgccaacctttgaatccccctcctgcgcgctgagcggctcgtaaccatggagaccgaagcaggtttcccgcgtccgcctcctcacccagagactgcagccccggcgcccagaccctttggacaaggagatccaagcgggccccacaatgctcagcgggtaaagagctcctccccactcctctcccgccagcagacgaaggaaacaccccgcagcctgcacatgctcagatggagctctgggcccgcgggttctactgcgcaggccctcacactcagcaaagggacttggacgcgaaagcgctggtggcgctcagccggctgggagttgtagctttctggctgctacagcaggagatacaggtggccaatgggtgagctggctggaggtaggaacaaggttaaggaagctgggatcttcgtgcagactggatcgtcactatagcaacaatgaaacatcgggaagggctagttctgctaggcagtctgccattttcattctttcatctttttttttaactcaaagcttactttgcaacaggcactgttctaggcactggggatacaatggaaaacaaaatagagcttctattttggcggg

SEQ ID NO: 114806 - DNA, 2617 bp, Homo sapiens
  Payload ID: 2429
  Gene Symbol: CARD8
  Gene Name: caspase recruitment domain family, member 8
  Uniprot ID: Q9Y2G2
  ENST ID: ENST00000520153
  CDS Start-End: 231-1694
agagcagcctggcagtgtccaagcaacaagcctccgctcctccttcctgcaccctggggctcctgaaactcacatgagaaggagggctgtctgagattcgagggaaacaagctctcaggacttccggtcgccatgatggctgtgggcggtaaacgcggttagtgcaagcatctgggccatcttcaatggtaaaaaagatacagtaaagacataaataccacatttgacaaatggaaaaaaaggagtgtccagaaaagagtagcagcagtgaggaagagctgccgagacgggtatacagggagctaccctgtgtttctgagaccctttgtgacatctcacattttttccaagaagatgatgagacagaggcagagccattattgttccgtgctgttcctgagtgtcaactatctgggggggacattcccagtgtatcagaagagcaggaatcttcagagggacaagattcaggagacatttgctcagaagagaatcaaatagtttcctcttatgcttctaaagtctgttttgagatcgaagaagattataaaaatcgtcagtttctggggcctgaaggaaatgtggatgttgagttgattgataagagcacaaacagatacagcgtttggttccccactgctggctggtatctgtggtcagccacaggcctcggcttcctggtaagggatgaggtcacagtgacgattgcgtttggttcctggagtcagcacctggccctggacctgcagcaccatgaacagtggctggtgggcggccccttgtttgatgtcactgcagagccagaggaggctgtcgccgaaatccacctcccccacttcatctccctccaagcaggtgaggtggacgtctcctggtttctcgttgcccattttaagaatgaagggatggtcctggagcatccagcccgggtggagcctttctatgctgtcctggaaagccccagcttctctctgatgggcatcctgctgcggatcgccagtgggactcgcctctccatccccatcacttccaacacattgatctattatcacccccaccccgaagatattaagttccacttgtaccttgtccccagcgacgccttgctaacaaaggcgatagatgatgaggaagatcgcttccatggtgtgcgcctgcagacttcgcccccaatggaacccctgaactttggttccagttatattgtgtctaattctgctaacctgaaagtaatgcccaaggagttgaaattgtcctacaggagccctggagaaattcagcacttctcaaaattctatgctgggcagatgaaggaacccattcaacttgagattactgaaaaaagacatgggactttggtgtgggatactgaggtgaagccagtggatctccagcttgtagctgcatcagcccctcctcctttctcaggtgcagcctttgtgaaggagaaccaccggcaactccaagccaggatgggggacctgaaaggggtgctcgatgatctccaagacaatgaggttcttactgagaatgagaaggagctggtggagcaggaaaagacacggcagagcaagaatgaggccttgctgagcatggtggagaagaaaggggacctggccctggacgtgctcttcagaagcattagtgaaagggacccttacctcgtgtcctatcttagacagcagaatttgtaaaatgagtcagttaggtagtctggaagagagaatccagcgttctcattggaaatggataaacagaaatgtgatcattgatttcagtgttcaagacagaagaagactgggtaacatctatcacacaggctttcaggacagacttgtaacctggcatgtacctattgactgtatcctcatgcattttcctcaagaatgtctgaagaaggtagtaatattccttttaaattttttccaaccattgcttgatatatcactattttatccattgacatgattcttgaagacccaggataaaggacatccggataggtgtgtttatgaaggatggggcctggaaaggcaacttttcctgattaatgtgaaaaataattcctatggacactccgtttgaagtatcaccttctcataactaaaagcagaaaagctaacaaaagcttctcagctgaggacactcaaggcatacatgatgacagtcttttttttttttgtatgttaggactttaacactttatctatggctactgttattagaacaatgtaaatgtatttgctgaaagagagcacaaaaatgggagaaaatgcaaacatgagcagaaaatattttcccactggtgtgtagcctgctacaaggagttgttgggttaaatgttcatggtcaactccaaggaatactgagatgaaatgtggtaaatcaactccacagaaccaccaaaaagaaaatgagggtaattcagcttattctgagacagacattcctggcaatgtaccatacaaaaaataagccaactctgacatttggattctaccatagactctgtcattttgtagccatttcagctgtcttttgattaatgttttcgtggcacacatatttccatccttttatgtttaatctgtttaaaacaagttcctagtagacacca

SEQ ID NO: 114807 - DNA, 1709 bp, Homo sapiens
  Payload ID: 2429
  Gene Symbol: CARD8
  Gene Name: caspase recruitment domain family, member 8
  ENST ID: ENST00000521415
  CDS Start-End: 44-442
ggtaaaaaagatacagtaaagacataaataccacatttgacaaatggaaaaaaaggagtgtccagaaaagagtagcagcagtgaggaagagctgccgagacgggacagtggatccagtaggaacatagatgcatccaaactcattagactacaaggatcacggaaactgttggttgacaatagcatacgggaactgcaatacacaaaaactggaattttttttcaggctgaggcctgtgtgacaaatgatacggtatacagggagctaccctgtgtttctgagaccctttgtgacatctcacattttttccaagaagatgatgagacagaggcagagccattattgttccgtgctgttcctgagtgtcaactatctgggggggacattcccaggagacatttgctcagaagagaatcaaatagtttcctcttatgcttctaaagtctgttttgagatcgaagaagattataaaaatcgtcagtttctggggcctgaaggaaatgtggatgttgagttgattgataagagcacaaacagatacagcgtttggttccccactgctggctggtatctgtggtcagccacaggcctcggcttcctggtaagggatgaggtcacagtgacgattgcgtttggttcctggagtcagcacctggccctggacctgcagcaccatgaacagtggctggtgggcggccccttgtttgatgtcactgcagagccagaggaggctgtcgccgaaatccacctcccccacttcatctccctccaagcaggtgaggtggacgtctcctggtttctcgttgcccattttaagaatgaagggatggtcctggagcatccagcccgggtggagcctttctatgctgtcctggaaagccccagcttctctctgatgggcatcctgctgcggatcgccagtgggactcgcctctccatccccatcacttccaacacattgatctattatcacccccaccccgaagatattaagttccacttgtaccttgtccccagcgacgccttgctaacaaaggcgatagatgatgaggaagatcgcttccatggtgtgcgcctgcagacttcgcccccaatggaacccctgaactttggttccagttatattgtgtctaattctgctaacctgaaagtaatgcccaaggagttgaaattgtcctacaggagccctggagaaattcagcacttctcaaaattctatgctgggcagatgaaggaacccattcaacttgagattactgaaaaaagacatgggactttggtgtgggatactgaggtgaagccagtggatctccagcttgtagctgcatcagcccctcctcctttctcaggtgcagcctttgtgaaggagaaccaccggcaactccaagccaggatgggggacctgaaaggggtgctcgatgatctccaagacaatgaggttcttactgagaatgagaaggagctggtggagcaggaaaagacacggcagagcaagaatgaggccttgctgagcatggtggagaagaaaggggacctggccctggacgtgctcttcagaagcattagtgaaagggacccttacctcgtgtcctatcttagacagcagaatttgtaaaatgagtcagttaggtagtctggaagagagaatccagcgttctcattggaaatggataaacagaaatgtgatcattgatttcagtgttcaaga

SEQ ID NO: 114808 - DNA, 2056 bp, Homo sapiens
  Payload ID: 2429
  Gene Symbol: CARD8
  Gene Name: caspase recruitment domain family, member 8
  Uniprot ID: Q9Y2G2
  ENST ID: ENST00000519940
  CDS Start-End: 350-1963
gaagttgagaaccagagaaaccgacctaaggggattctcccatttggcccgtcctaccctaaagtcaccacctgctgcttttctggagcgcttaccagtgaccaagaggaacagaacacagagcagcctggcagtgtccaagcaacaagcctccgctcctccttcctgcaccctggggctcctgaaactcacatgagaaggagggctgtctgagattcgagggaaacaagctctcaggacttccggtcgccatgatggctgtgggcggtaaacgcggttagtgcaagcatctgggccatcttcaatggtaaaaaagatacagtaaagacataaataccacatttgacaaatggaaaaaaaggagtgtccagaaaagagtagcagcagtgaggaagagctgccgagacgggacagtggatccagtaggaacatagatgcatccaaactcattagactacaaggatcacggaaactgttggttgacaatagcatacgggaactgcaatacacaaaaactggaattttttttcaggctgaggcctgtgtgacaaatgatacggtatacagggagctaccctgtgtttctgagaccctttgtgacatctcacattttttccaagaagatgatgagacagaggcagagccattattgttccgtgctgttcctgagtgtcaactatctgggggggacattcccagtgtatcagaagagcaggaatcttcagagggacaagattcaggagacatttgctcagaagagaatcaaatagtttcctcttatgcttctaaagtctgttttgagatcgaagaagattataaaaatcgtcagtttctggggcctgaaggaaatgtggatgttgagttgattgataagagcacaaacagatacagcgtttggttccccactgctggctggtatctgtggtcagccacaggcctcggcttcctggtaagggatgaggtcacagtgacgattgcgtttggttcctggagtcagcacctggccctggacctgcagcaccatgaacagtggctggtgggcggccccttgtttgatgtcactgcagagccagaggaggctgtcgccgaaatccacctcccccacttcatctccctccaagcaggtgaggtggacgtctcctggtttctcgttgcccattttaagaatgaagggatggtcctggagcatccagcccgggtggagcctttctatgctgtcctggaaagccccagcttctctctgatgggcatcctgctgcggatcgccagtgggactcgcctctccatccccatcacttccaacacattgatctattatcacccccaccccgaagatattaagttccacttgtaccttgtccccagcgacgccttgctaacaaaggcgatagatgatgaggaagatcgcttccatggtgtgcgcctgcagacttcgcccccaatggaacccctgaactttggttccagttatattgtgtctaattctgctaacctgaaagtaatgcccaaggagttgaaattgtcctacaggagccctggagaaattcagcacttctcaaaattctatgctgggcagatgaaggaacccattcaacttgagattactgaaaaaagacatgggactttggtgtgggatactgaggtgaagccagtggatctccagcttgtagctgcatcagcccctcctcctttctcaggtgcagcctttgtgaaggagaaccaccggcaactccaagccaggatgggggacctgaaaggggtgctcgatgatctccaagacaatgaggttcttactgagaatgagaaggagctggtggagcaggaaaagacacggcagagcaagaatgaggccttgctgagcatggtggagaagaaaggggacctggccctggacgtgctcttcagaagcattagtgaaagggacccttacctcgtgtcctatcttagacagcagaatttgtaaaatgagtcagttaggtagtctggaagagagaatccagcgttctcattggaaatggataaacagaaatgtgatcattgatttcagtgttcaaga

SEQ ID NO: 114809 - DNA, 1363 bp, Homo sapiens
  Payload ID: 2429
  Gene Symbol: CARD8
  Gene Name: caspase recruitment domain family, member 8
  ENST ID: ENST00000518450
  CDS Start-End: 1-211
tgggcagatgaaggaacccattcaacttgagattactgaaaaaagacatgggactttggtgtgggatactgaggtgaagccagtggatctccagcttgtagctgcatcagcccctcctcctttctcaggagtgaggatgtggcctggatgctgcccaatcttgcctagaactggctgcacctgcttgtgccttaacccttggttaccctaaatccctgttatccagactcattgggactgctctagatcttcactatccaatacgggttactgtggcaacgccaacctttgaatccccctcctgcgcgctgagcggctcgtaaccatggagaccgaagcaggtttcccgcgtccgcctcctcacccagagactgcagccccggcgcccagaccctttggacaaggagatccaagcgggccccacaatgctcagcgggtaaagagctcctccccactcctctcccgccagcagacgaaggaaacaccccgcagcctgcacatgctcagatggagctctgggcccgcgggttctactgcgcaggccctcacactcagcaaagggacttggacgcgaaagcgctggtggcgctcagccggctgggagttgtagctttctggctgctacagcaggagatacaggtggccaatgggtgagctggctggaggtaggaacaaggttaaggaagctgggatcttcgtgcagactggatcgtcactatagcaacaatgaaacatcgggaagggctagttctgctaggcagtctgccattttcattctttcatctttttttttaactcaaagcttactttgcaacaggcactgttctaggcactggggatacaatggaaaacaaaatagagcttctattttggcgggagatcgacttaataactgtgaacacgtgtcactggaaaaagcagtatgttaataagtaactgggctgctttgggaaaaatggaaatgcaggcgatgttagaacactggtacacacactaattcattcatcctcacaaagccctatagacaggtactattatgacccctcaactgtaacataggctggaaggtcacatgacaaggaagtagtggagctgggatttgaacccaggcagtctggcttcatacttgataagcttaatcacaatgccaaagtggtaaatagctgtgtggcataatttcaggtagtgataagtgctgtgaaggataaagcaaagaaaggggcagggatggctctttagagagactacttagggatggctttcaggaagaggtggcatttgagcaggggcccgagggattgatgtgacttgtgataaaagaaaaacttcagacgaattaaatttaaagaagtttaattggcta

SEQ ID NO: 114810 - DNA, 2884 bp, Homo sapiens
  Payload ID: 2429
  Gene Symbol: CARD8
  Gene Name: caspase recruitment domain family, member 8
  ENST ID: ENST00000522773
  CDS Start-End: 215-631
gtccaagcaacaagcctccgctcctccttcctgcaccctggggctcctgaaactcacatgagaaggagggctgtctgagattcgagggaaacaagctctcaggacttccggtcgccatgatggctgtgggcggtaaacgcggttagtgcaagcatctgggccatcttcaatggtaaaaaagatacagtaaagacataaataccacatttgacaaatggaaaaaaaggagtgtccagaaaagagtagcagcagtgaggaagagctgccgagacgggacagtggatccagtaggaacatagatgcatccaaactcattagactacaaggatcacggaaactgttggttgacaatagcatacgggaactgcaatacacaaaaactggaattttttttcaggctgaggcctgtgtgacaaatgatacggtatacagggagctaccctgtgtttctgagaccctttgtgacatctcacattttttccaagaagatgatgagacagaggcagagccattattgttccgtgctgttcctgagtgtcaactatctgggggggacattcccaggtacctgttctttttaaacctaatccacgtgtcagtttctctgctggtctctttcacgtcgaaataaacagatatctcaaggaatggatcaaaggcagagaatttgatggagttggttgccttgctccagaagtgtatcagaagagcaggaatcttcagagggacaagattcaggagacatttgctcagaagagaatcaaatagtttcctcttatgcttctaaagtctgttttgagatcgaagaagattataaaaatcgtcagtttctggggcctgaaggaaatgtggatgttgagttgattgataagagcacaaacagatacagcgtttggttccccactgctggctggtatctgtggtcagccacaggcctcggcttcctggtaagggatgaggtcacagtgacgattgcgtttggttcctggagtcagcacctggccctggacctgcagcaccatgaacagtggctggtgggcggccccttgtttgatgtcactgcagagccagaggaggctgtcgccgaaatccacctcccccacttcatctccctccaagcaggtgaggtggacgtctcctggtttctcgttgcccattttaagaatgaagggatggtcctggagcatccagcccgggtggagcctttctatgctgtcctggaaagccccagcttctctctgatgggcatcctgctgcggatcgccagtgggactcgcctctccatccccatcacttccaacacattgatctattatcacccccaccccgaagatattaagttccacttgtaccttgtccccagcgacgccttgctaacaaaggcgatagatgatgaggaagatcgcttccatggtgtgcgcctgcagacttcgcccccaatggaacccctgaactttggttccagttatattgtgtctaattctgctaacctgaaagtaatgcccaaggagttgaaattgtcctacaggagccctggagaaattcagcacttctcaaaattctatgctgggcagatgaaggaacccattcaacttgagattactgaaaaaagacatgggactttggtgtgggatactgaggtgaagccagtggatctccagcttgtagctgcatcagcccctcctcctttctcaggtgcagcctttgtgaaggagaaccaccggcaactccaagccaggatgggggacctgaaaggggtgctcgatgatctccaagacaatgaggttcttactgagaatgagaaggagctggtggagcaggaaaagacacggcagagcaagaatgaggccttgctgagcatggtggagaagaaaggggacctggccctggacgtgctcttcagaagcattagtgaaagggacccttacctcgtgtcctatcttagacagcagaatttgtaaaatgagtcagttaggtagtctggaagagagaatccagcgttctcattggaaatggataaacagaaatgtgatcattgatttcagtgttcaagacagaagaagactgggtaacatctatcacacaggctttcaggacagacttgtaacctggcatgtacctattgactgtatcctcatgcattttcctcaagaatgtctgaagaaggtagtaatattccttttaaattttttccaaccattgcttgatatatcactattttatccattgacatgattcttgaagacccaggataaaggacatccggataggtgtgtttatgaaggatggggcctggaaaggcaacttttcctgattaatgtgaaaaataattcctatggacactccgtttgaagtatcaccttctcataactaaaagcagaaaagctaacaaaagcttctcagctgaggacactcaaggcatacatgatgacagtcttttttttttttgtatgttaggactttaacactttatctatggctactgttattagaacaatgtaaatgtatttgctgaaagagagcacaaaaatgggagaaaatgcaaacatgagcagaaaatattttcccactggtgtgtagcctgctacaaggagttgttgggttaaatgttcatggtcaactccaaggaatactgagatgaaatgtggtaaatcaactccacagaaccaccaaaaagaaaatgagggtaattcagcttattctgagacagacattcctggcaatgtaccatacaaaaaataagccaactctgacatttggattctaccatagactctgtcattttgtagccatttcagctgtcttttgattaatgttttcgtggcacacatatttccatccttttatgtttaatctgtttaaaacaagttcctagtagacacca

SEQ ID NO: 114811 - DNA, 751 bp, Homo sapiens
  Payload ID: 2429
  Gene Symbol: CARD8
  Gene Name: caspase recruitment domain family, member 8
  ENST ID: ENST00000519302
  CDS Start-End: 110-508
ggcagtgtccaagcaacaagcctccgctcctccttcctgcaccctggggctcctgaaactcacatgggtaaaaaagatacagtaaagacataaataccacatttgacaaatggaaaaaaaggagtgtccagaaaagagtagcagcagtgaggaagagctgccgagacgggtatacagggagctaccctgtgtttctgagaccctttgtgacatctcacattttttccaagaagatgatgagacagaggcagagccattattgttccgtgctgttcctgagtgtcaactatctgggggggacattcccagtgtatcagaagagcaggaatcttcagagggacaagattcaggagacatttgctcagaagagaatcaaatagtttcctcttatgcttctaaagtctgttttgagatcgaagaagattataaaaatcgtcagtttctggggcctgaaggaaatgtggatgttgagttgattgataagagcacaaacagatacaggcgatagatgatgaggaagatcgcttccatggtgtgcgcctgcagacttcgcccccaatggaacccctgaactttggttccagttatattgtgtctaattctgctaacctgaaagtaatgcccaagtggatctccagcttgtagctgcatcagcccctcctcctttctcaggtgcagcctttgtgaaggagaaccaccggcaactccaagccaggatgggggacctgaaaggggtgctcgatgatctcca

SEQ ID NO: 114812 - DNA, 3041 bp, Homo sapiens
  Payload ID: 2429
  Gene Symbol: CARD8
  Gene Name: caspase recruitment domain family, member 8
  Uniprot ID: Q9Y2G2
  ENST ID: ENST00000520753
  CDS Start-End: 347-1525
gttgagaaccagagaaaccgacctaaggggattctcccatttggcccgtcctaccctaaagtcaccacctgctgcttttctggagcgcttaccagtgaccaagaggaacagaacacagagcagcctggcagtgtccaagcaacaagcctccgctcctccttcctgcaccctggggctcctgaaactcacatgagaaggagggctgtctgagattcgagggaaacaagctctcaggacttccggtcgccatgatggctgtgggcggtaaacgcggttagtgcaagcatctgggccatcttcaatggtaaaaaagatacagtaaagacataaataccacatttgacaaatggaaaaaaaggagtgtccagaaaagagtagcagcagtgaggaagagctgccgagacgggacagtggatccagtaggaacatagatgcatccaaactcattagactacaaggatcacggaaactgttggttgacaatagcatacgggaactgcaatacacaaaaactggaattttttttcaggctgaggcctgtgtgacaaatgatacggtatacagggagctaccctgtgtttctgagaccctttgtgacatctcacattttttccaagaagatgatgagacagaggcagagccattattgttccgtgctgttcctgagtgtcaactatctgggggggacattcccagtgtatcagaagagcaggaatcttcagagggacaagattcaggagacatttgctcagaagagaatcaaatagtttcctcttatgcttctaaagtctgttttgagatcgaagaagattataaaaatcgtcagtttctggggcctgaaggaaatgtggatgttgagttgattgataagagcacaaacagatacagcgtttggttccccactgctggctggtatctgtggtcagccacaggcctcggcttcctggtaagggatgaggtcacagtgacgattgcgtttggttcctggagtcagcacctggccctggacctgcagcaccatgaacagtggctggtgggcggccccttgtttgatgtcactgcagagccagaggaggctgtcgccgaaatccacctcccccacttcatctccctccaagcaggtgaggtggacgtctcctggtttctcgttgcccattttaagaatgaagggatggtcctggagcatccagcccgggtggagcctttctatgctgtcctggaaagccccagcttctctctgatgggcatcctgctgcggatcgccagtgggactcgcctctccatccccatcacttccaacacattgatctattatcacccccaccccgaagatattaagttccacttgtaccttgtccccagcgacgccttgctaacaaaggcgatagatgatgaggaagatcgcttccatggtgtgcgcctgcagacttcgcccccaatggaacccctgaactttggttccagttatattgtgtctaattctgctaacctgaaagtaatgcccaagtggatctccagcttgtagctgcatcagcccctcctcctttctcaggtgcagcctttgtgaaggagaaccaccggcaactccaagccaggatgggggacctgaaaggggtgctcgatgatctccaagacaatgaggttcttactgagaatgagaaggagctggtggagcaggaaaagacacggcagagcaagaatgaggccttgctgagcatggtggagaagaaaggggacctggccctggacgtgctcttcagaagcattagtgaaagggacccttacctcgtgtcctatcttagacagcagaatttgtaaaatgagtcagttaggtagtctggaagagagaatccagcgttctcattggaaatggataaacagaaatgtgatcattgatttcagtgttcaagacagaagaagactgggtaacatctatcacacaggctttcaggacagacttgtaacctggcatgtacctattgactgtatcctcatgcattttcctcaagaatgtctgaagaaggtagtaatattccttttaaattttttccaaccattgcttgatatatcactattttatccattgacatgattcttgaagacccaggataaaggacatccggataggtgtgtttatgaaggatggggcctggaaaggcaacttttcctgattaatgtgaaaaataattcctatggacactccgtttgaagtatcaccttctcataactaaaagcagaaaagctaacaaaagcttctcagctgaggacactcaaggcatacatgatgacagtcttttttttttttgtatgttaggactttaacactttatctatggctactgttattagaacaatgtaaatgtatttgctgaaagagagcacaaaaatgggagaaaatgcaaacatgagcagaaaatattttcccactggtgtgtagcctgctacaaggagttgttgggttaaatgttcatggtcaactccaaggaatactgagatgaaatgtggtaaatcaactccacagaaccaccaaaaagaaaatgagggtaattcagcttattctgagacagacattcctggcaatgtaccatacaaaaaataagccaactctgacatttggattctaccatagactctgtcattttgtagccatttcagctgtcttttgattaatgttttcgtggcacacatatttccatccttttatgtttaatctgtttaaaacaagttcctagtagacaccatctggttgagtcagttttttttatggtgtattttgaacccattctgatagtctcttttaactggaagatttcaattacttacgttaatgtaattattaatatgttaggatttatcctcagtcagccagtttgttatgtcttttctattctactgttatcacatttgtaccacttaaagtggaatctaggcactttatcaccatttagatcctattaccttttctcatctaggatatagttatcttctacataatctttctgtatcttaaaacccatcaataaattattatatattttcta

SEQ ID NO: 114813 - DNA, 5233 bp, Homo sapiens
  Payload ID: 2429
  Gene Symbol: CARD8
  Gene Name: caspase recruitment domain family, member 8
  ENST ID: ENST00000518622
  CDS Start-End: 190-438
ctagttctcaacttcttttgaaataatgttcatagagaaggagggctgtctgagattcgagggaaacaagctctcaggacttccggtcgccatgatggctgtgggcggtaaacgcggttagtgcaagcatctgggccatcttcaatggtaaaaaagatacagtaaagacataaataccacatttgacaaatggaaaaaaaggagtgtccagaaaagagtagcagcagtgaggaagagctgccgagacgggtatacagggagctaccctgtgtttctgagaccctttgtgacatctcacattttttccaagaagatgatgagacagaggcagagccattattgttccgtgctgttcctgagtgtcaactatctgggggggacattcccaggagacatttgctcagaagagaatcaaatagtttcctcttatgcttctaaagtctgttttgagatcgaagaagattataaaaatcgtcagtttctggggcctgaaggaaatgtggatgttgagttgattgataagagcacaaacagatacagcgtttggttccccactgctggctggtatctgtggtcagccacaggcctcggcttcctggtaagggatgaggtcacagtgacgattgcgtttggttcctggagtcagcacctggccctggacctgcagcaccatgaacagtggctggtgggcggccccttgtttgatgtcactgcagagccagaggaggctgtcgccgaaatccacctcccccacttcatctccctccaaggtgaggtggacgtctcctggtttctcgttgcccattttaagaatgaagggatggtcctggagcatccagcccgggtggagcctttctatgctgtcctggaaagccccagcttctctctgatgggcatcctgctgcggatcgccagtgggactcgcctctccatccccatcacttccaacacattgatctattatcacccccaccccgaagatattaagttccacttgtaccttgtccccagcgacgccttgctaacaaaggcgatagatgatgaggaagatcgcttccatggtgtgcgcctgcagacttcgcccccaatggaacccctgaactttggttccagttatattgtgtctaattctgctaacctgaaagtaatgcccaaggagttgaaattgtcctacaggagccctggagaaattcagcacttctcaaaattctatgctgggcagatgaaggaacccattcaacttgagattactgaaaaaagacatgggactttggtgtgggatactgaggtgaagccagtggatctccagcttgtagctgcatcagcccctcctcctttctcaggtgcagcctttgtgaaggagaaccaccggcaactccaagccaggatgggggacctgaaaggggtgctcgatgatctccaagacaatgaggttcttactgagaatgagaaggagctggtggagcaggaaaagacacggcagagcaagaatgaggccttgctgagcatggtggagaagaaaggggacctggccctggacgtgctcttcagaagcattagtgaaagggacccttacctcgtgtcctatcttagacagcagaatttgtaaaatgagtcagttaggtagtctggaagagagaatccagcgttctcattggaaatggataaacagaaatgtgatcattgatttcagtgttcaagacagaagaagactgggtaacatctatcacacaggctttcaggacagacttgtaacctggcatgtacctattgactgtatcctcatgcattttcctcaagaatgtctgaagaaggtagtaatattccttttaaattttttccaaccattgcttgatatatcactattttatccattgacatgattcttgaagacccaggataaaggacatccggataggtgtgtttatgaaggatggggcctggaaaggcaacttttcctgattaatgtgaaaaataattcctatggacactccgtttgaagtatcaccttctcataactaaaagcagaaaagctaacaaaagcttctcagctgaggacactcaaggcatacatgatgacagtcttttttttttttgtatgttaggactttaacactttatctatggctactgttattagaacaatgtaaatgtatttgctgaaagagagcacaaaaatgggagaaaatgcaaacatgagcagaaaatattttcccactggtgtgtagcctgctacaaggagttgttgggttaaatgttcatggtcaactccaaggaatactgagatgaaatgtggtaaatcaactccacagaaccaccaaaaagaaaatgagggtaattcagcttattctgagacagacattcctggcaatgtaccatacaaaaaataagccaactctgacatttggattctaccatagactctgtcattttgtagccatttcagctgtcttttgattaatgttttcgtggcacacatatttccatccttttatgtttaatctgtttaaaacaagttcctagtagacaccatctggttgagtcagttttttttatggtgtattttgaacccattctgatagtctcttttaactggaagatttcaattacttacgttaatgtaattattaatatgttaggatttatcctcagtcagccagtttgttatgtcttttctattctactgttatcacatttgtaccacttaaagtggaatctaggcactttatcaccatttagatcctattaccttttctcatctaggatatagttatcttctacataatctttctgtatcttaaaacccatcaataaattattatatattttctacttttaatcactcagaagatttaaaaaactcatgagaagagtaatctgttatgtttttccagatatttaccatttctgttgctcttccttcattattttccaaatttcgttctgcaaatttccacttcctctgatagacgttttttagttcttttagagtggttctgataggtacagattctcttattttttgcttcctctgaggacatctttttctcaccttcattctcagtgatgttttttgcttgtagtatttttagttgacattgttttctgttcagcagtttccttttagcttccgtatttcctgatgagaaatctgcagtcattcaaattgttgtttccctgtatgtagtgtgtcatttttctgtcagatttcaaggtatttatctttagtttttagccatttcattatgttggggatgagtttccttgttttattccctttggaatttgctccaattcataaatttgcagttttatgtcttttaccaaacttagaggttttcagcctaatttctaaaaatactttttattagcctgattttcatctttataggaaatagtttaagtgatgacaagttccaatagcttatatgcccagaaggccttcaaaataagaattttgaaagaatacagaaaacaaacttttatatccttctcatgtcttctactgtaaaattcatatgctttgctactctaaacctagtttgaaatcaacagtcttgagaatagatgaaaattttgatgaatagtggaattcttttaaatggaaacctcttacatgtgattttccttgccatctagaaataaaccatagtatttatgttgaatcaatcaatattatattttgtttttttcctcctcttctgagactcttattgtggaaatgttagacttttatgttttcctaaatgtccctgatattctacttatttagaacatcttttcattttttccattattctgattgggtaattttaatttgtctattttcaaatttgctggagtgttcacctgttgttatctgtgtcgtcccactgagtgcattcaccaccttttaaattttggtcactgtatgtatcagttctaaaatttccattttgttctctatattttaaatttcttgccttatattctattttcctgcaaatgtgtcagcatttgcttgtttgagctttttttttttcaagacagggtctcaactctgttacccaggctggagtgcagtggtgcgatctcagctcactgcaacctctgcctcctggttcaagcgattattgtgcctcagcctccagagtagctgggattacaggcatgcaccaccacagcccagctaattttttgtatttttagtagagacagagttttgctatgttggccaggctggttttgaactcctggcctcaagtgatccacccacctcagcctcccaaagtgctgggattacaggccactacacctggcacatttgagtatttttttttttttttttttttttttgagatggagtctcgctctgtcatctaggctggagtgcagtggtgtgatctcagctcactgcagcctctgtctcccgggctcaagcgattctcttgcctcagcctcctgagtagctaggactacaggtgcatgccaacacgcccggctaatttttttttaaaaatatttttagtagagacagggtttcaccattttggccaggatggtcttgatctcctgacctcatgatccacccgcctcggccttccaaagtgctgggattacaggcatgagccaccgtgcctggcctcatttgagtatttttataatgtctcttttaaagtctttgtcagataatttcactgtacatgttattcagtgtttggtgtccactgagttgtcatttgccagacaagtggagatttttgcagctcatccttgtattctcagtagttccgatatgtaccctcgaaatgtgaatgttatcttatgagactctgttttatttgtatccaacagaagatgtttattatttatttggctttctgtgaactgaggtcttaatatcagctcattttaaaagtctttgcagtggtattcggatctatcctgtgtgtgcctatgagattgggtgcagtgtatcctgttagctccattctcagggcgtttgaatgtgaattaggaccagcgcaatgaatgctcaagttggggttgggcgttagaattcataaaagtctttatatgctcagattctgcagctccatcctcttcatgattgtgatcgtaaggacagtggaattttgcagttgtctataccttatcttgaagtagaactaaattgttacatttgaagaatgtacttcataaatttacaaaaataaaaaaataggttaatgttattaaaacaaaaaggcacaca

SEQ ID NO: 114814 - DNA, 500 bp, Homo sapiens
  Payload ID: 2429
  Gene Symbol: CARD8
  Gene Name: caspase recruitment domain family, member 8
  ENST ID: ENST00000519332
  CDS Start-End: 243-455
aaaagaagttgagaaccagagaaaccgacctaaggggattctcccatttggcccgtcctaccctaaagtcaccacctgctgcttttctggagcgcttaccagtgaccaagaggaacagaacacagagcagcctggcagtgtccaagcaacaagcctccgctcctccttcctgcaccctggggctcctgaaactcacatgggtaaaaaagatacagtaaagacataaataccacatttgacaaatggaaaaaaaggagtgtccagaaaagagtagcagcagtgaggaagagctgccgagacgggacagtggatccagtaggaacatagatgcatccaaactcattagactacaaggatcacggaaactgttggttgacaatagcatacgggaactgcaatacacaaaaactggaattttttttcaggctgaggcctgtgtgacaaatgatacgtaagggacatctatttgttgggaaaaaattaaagatttggaattttgc

SEQ ID NO: 114815 - DNA, 579 bp, Homo sapiens
  Payload ID: 2429
  Gene Symbol: CARD8
  Gene Name: caspase recruitment domain family, member 8
  ENST ID: ENST00000521437
  CDS Start-End: 463-579
tttcaaaagaagttgagaaccagagaaaccgacctaaggggattctcccatttggcccgtcctaccctaaagtcaccacctgctgcttttctggagcgcttaccagtgaccaagaggaacagaacacagagcagcctggcagtgtccaagcaacaagcctccgctcctccttcctgcaccctggggctcctgaaactcacatgagaaggagggctgtctgagattcgagggaaacaagctctcaggacttccggtcgccatgatggctgtgggcggtaaacgcggttagtgcaagcatctgggccatcttcaatccccaaagtggaactcacccaaatgtctatcgtctgctgaatggataagagaatatgtgatgtctccatacggtggaatattattcagccatgaaagcaaaggagggtaaaaaagatacagtaaagacataaataccacatttgacaaatggaaaaaaaggagtgtccagaaaagagtagcagcagtgaggaagagctgccgagacgggacagtggatccagtaggaacatagatgcatccaaactcattagactacaaggatca

SEQ ID NO: 114816 - DNA, 673 bp, Homo sapiens
  Payload ID: 2429
  Gene Symbol: CARD8
  Gene Name: caspase recruitment domain family, member 8
  ENST ID: ENST00000523579
  CDS Start-End: 1-73
ccaccccgaagatattaagttccacttgtaccttgtccccagcgacgccttgctaacaaagacactattttagaggctgaggatacatcagtgaacaaaagaggcaaaaacatgacaaccaaagatattacatggaatgctataggaaaaatatatgtgcatatgataagaactataacaaataaagaaggttaagaaaattaatccagtggcgatagatgatgaggaagatcgcttccatggtgtgcgcctgcagacttcgcccccaatggaacccctgaactttggttccagttatattgtgtctaattctgctaacctgaaagtaatgcccaaggagttgaaattgtcctacaggagccctggagaaattcagcacttctcaaaattctatgctgggcagatgaaggaacccattcaacttgagattactgaaaaaagacatgggactttggtgtgggatactgaggtgaagccagtggatctccagcttgtagctgcatcagcccctcctcctttctcaggtgcagcctttgtgaaggagaaccaccggcaactccaagccaggatgggggacctgaaaggggtgctcgatgatctccaagacaatgaggttcttactgagaatgagaaggagctggtggagcaggaaaagacacggcagagcaagaat

SEQ ID NO: 114817 - DNA, 3533 bp, Homo sapiens
  Payload ID: 2429
  Gene Symbol: CARD8
  Gene Name: caspase recruitment domain family, member 8
  ENST ID: ENST00000518979
  CDS Start-End: 190-438
ctagttctcaacttcttttgaaataatgttcatagagaaggagggctgtctgagattcgagggaaacaagctctcaggacttccggtcgccatgatggctgtgggcggtaaacgcggttagtgcaagcatctgggccatcttcaatggtaaaaaagatacagtaaagacataaataccacatttgacaaatggaaaaaaaggagtgtccagaaaagagtagcagcagtgaggaagagctgccgagacgggtatacagggagctaccctgtgtttctgagaccctttgtgacatctcacattttttccaagaagatgatgagacagaggcagagccattattgttccgtgctgttcctgagtgtcaactatctgggggggacattcccaggagacatttgctcagaagagaatcaaatagtttcctcttatgcttctaaagtctgttttgagatcgaagaagattataaaaatcgtcagtttctggggcctgaaggaaatgtggatgttgagttgattgataagagcacaaacagatacagcgtttggttccccactgctggctggtatctgtggtcagccacaggcctcggcttcctggtaagggatgaggtcacagtgacgattgcgtttggttcctggagtcagcacctggccctggacctgcagcaccatgaacagtggctggtgggcggccccttgtttgatgtcactgcagagccagaggaggctgtcgccgaaatccacctcccccacttcatctccctccaaggtgaggtggacgtctcctggtttctcgttgcccattttaagaatgaagggatggtcctggagcatccagcccgggtggagcctttctatgctgtcctggaaagccccagcttctctctgatgggcatcctgctgcggatcgccagtgggactcgcctctccatccccatcacttccaacacattgatctattatcacccccaccccgaagatattaagttccacttgtaccttgtccccagcgacgccttgctaacaaaggcgatagatgatgaggaagatcgcttccatggtgtgcgcctgcagacttcgcccccaatggaacccctgaactttggttccagttatattgtgtctaattctgctaacctgaaagtaatgcccaagtggatctccagcttgtagctgcatcagcccctcctcctttctcaggtgcagcctttgtgaaggagaaccaccggcaactccaagccaggatgggggacctgaaaggggtgctcgatgatctccaagacaatgaggttcttactgagaatgagaaggagctggtggagcaggaaaagacacggcagagcaagaatgaggccttgctgagcatggtggagaagaaaggggacctggccctggacgtgctcttcagaagcattagtgaaagggacccttacctcgtgtcctatcttagacagcagaatttgtaaaatgagtcagttaggtagtctggaagagagaatccagcgttctcattggaaatggataaacagaaatgtgatcattgatttcagtgttcaagacagaagaagactgggtaacatctatcacacaggctttcaggacagacttgtaacctggcatgtacctattgactgtatcctcatgcattttcctcaagaatgtctgaagaaggtagtaatattccttttaaattttttccaaccattgcttgatatatcactattttatccattgacatgattcttgaagacccaggataaaggacatccggataggtgtgtttatgaaggatggggcctggaaaggcaacttttcctgattaatgtgaaaaataattcctatggacactccgtttgaagtatcaccttctcataactaaaagcagaaaagctaacaaaagcttctcagctgaggacactcaaggcatacatgatgacagtcttttttttttttgtatgttaggactttaacactttatctatggctactgttattagaacaatgtaaatgtatttgctgaaagagagcacaaaaatgggagaaaatgcaaacatgagcagaaaatattttcccactggtgtgtagcctgctacaaggagttgttgggttaaatgttcatggtcaactccaaggaatactgagatgaaatgtggtaaatcaactccacagaaccaccaaaaagaaaatgagggtaattcagcttattctgagacagacattcctggcaatgtaccatacaaaaaataagccaactctgacatttggattctaccatagactctgtcattttgtagccatttcagctgtcttttgattaatgttttcgtggcacacatatttccatccttttatgtttaatctgtttaaaacaagttcctagtagacaccatctggttgagtcagttttttttatggtgtattttgaacccattctgatagtctcttttaactggaagatttcaattacttacgttaatgtaattattaatatgttaggatttatcctcagtcagccagtttgttatgtcttttctattctactgttatcacatttgtaccacttaaagtggaatctaggcactttatcaccatttagatcctattaccttttctcatctaggatatagttatcttctacataatctttctgtatcttaaaacccatcaataaattattatatattttctacttttaatcactcagaagatttaaaaaactcatgagaagagtaatctgttatgtttttccagatatttaccatttctgttgctcttccttcattattttccaaatttcgttctgcaaatttccacttcctctgatagacgttttttagttcttttagagtggttctgataggtacagattctcttattttttgcttcctctgaggacatctttttctcaccttcattctcagtgatgttttttgcttgtagtatttttagttgacattgttttctgttcagcagtttccttttagcttccgtatttcctgatgagaaatctgcagtcattcaaattgttgtttccctgtatgtagtgtgtcatttttctgtcagatttcaaggtatttatctttagtttttagccatttcattatgttggggatgagtttccttgttttattccctttggaatttgctccaattcataaatttgcagttttatgtcttttaccaaacttagaggttttcagcctaatttctaaaaatactttttattagcctgattttcatctttataggaaatagtttaagtgatgacaagttccaatagcttatatgcccagaaggccttcaaaataagaattttgaaagaatacagaaaacaaacttttatatccttctcatgtcttctactgtaaaattcatatgctttgctactctaaacctagtttgaaatcaacagtcttgagaatagatgaaaattttgatgaatagtggaattcttttaaatggaaacctcttacatgtgattttccttgccatctagaaataaaccatagtatttatgttgaatcaatcaata

SEQ ID NO: 114818 - DNA, 567 bp, Homo sapiens
  Payload ID: 2429
  Gene Symbol: CARD8
  Gene Name: caspase recruitment domain family, member 8
  ENST ID: ENST00000522889
  CDS Start-End: 437-567
aaccgacctaaggggattctcccatttggcccgtcctaccctaaagtcaccacctgctgcttttctggagcgcttaccagtgaccaagaggaacagaacacagagcagcctggcagtgtccaagcaacaagcctccgctcctccttcctgcaccctggggctcctgaaactcacatgagaaggagggctgtctgagattcgagggaaacaagctctcaggacttccggtcgccatgatggctgtgggcggtaaacgcggttagtgcaagcatctgggccatcttcaatccccaaagtggaactcacccaaatgtctatcgtctgctgaatggataagagaatatgtgatgtctccatacggtggaatattattcagccatgaaagcaaaggagggtaaaaaagatacagtaaagacataaataccacatttgacaaatggaaaaaaaggagtgtccagaaaagagtagcagcagtgaggaagagctgccgagacgggtatacagggagctaccctgtgtttctgagaccctttgtgacatctcacattttttccaagaagatgatga

SEQ ID NO: 114819 - DNA, 1931 bp, Homo sapiens
  Payload ID: 2429
  Gene Symbol: CARD8
  Gene Name: caspase recruitment domain family, member 8
  Uniprot ID: Q9Y2G2
  ENST ID: ENST00000520015
  CDS Start-End: 127-1305
agaacacagagcagcctggcagtgtccaagcaacaagcctccgctcctccttcctgcaccctggggctcctgaaactcacatgggtaaaaaagatacagtaaagacataaataccacatttgacaaatggaaaaaaaggagtgtccagaaaagagtagcagcagtgaggaagagctgccgagacgggacagtggatccagtaggaacatagatgcatccaaactcattagactacaaggatcacggaaactgttggttgacaatagcatacgggaactgcaatacacaaaaactggaattttttttcaggctgaggcctgtgtgacaaatgatacggtatacagggagctaccctgtgtttctgagaccctttgtgacatctcacattttttccaagaagatgatgagacagaggcagagccattattgttccgtgctgttcctgagtgtcaactatctgggggggacattcccagtgtatcagaagagcaggaatcttcagagggacaagattcaggagacatttgctcagaagagaatcaaatagtttcctcttatgcttctaaagtctgttttgagatcgaagaagattataaaaatcgtcagtttctggggcctgaaggaaatgtggatgttgagttgattgataagagcacaaacagatacagcgtttggttccccactgctggctggtatctgtggtcagccacaggcctcggcttcctggtaagggatgaggtcacagtgacgattgcgtttggttcctggagtcagcacctggccctggacctgcagcaccatgaacagtggctggtgggcggccccttgtttgatgtcactgcagagccagaggaggctgtcgccgaaatccacctcccccacttcatctccctccaagcaggtgaggtggacgtctcctggtttctcgttgcccattttaagaatgaagggatggtcctggagcatccagcccgggtggagcctttctatgctgtcctggaaagccccagcttctctctgatgggcatcctgctgcggatcgccagtgggactcgcctctccatccccatcacttccaacacattgatctattatcacccccaccccgaagatattaagttccacttgtaccttgtccccagcgacgccttgctaacaaaggcgatagatgatgaggaagatcgcttccatggtgtgcgcctgcagacttcgcccccaatggaacccctgaactttggttccagttatattgtgtctaattctgctaacctgaaagtaatgcccaagtggatctccagcttgtagctgcatcagcccctcctcctttctcaggtgcagcctttgtgaaggagaaccaccggcaactccaagccaggatgggggacctgaaaggggtgctcgatgatctccaagacaatgaggttcttactgagaatgagaaggagctggtggagcaggaaaagacacggcagagcaagaatgaggccttgctgagcatggtggagaagaaaggggacctggccctggacgtgctcttcagaagcattagtgaaagggacccttacctcgtgtcctatcttagacagcagaatttgtaaaatgagtcagttaggtagtctggaagagagaatccagcgttctcattggaaatggataaacagaaatgtgatcattgatttcagtgttcaagacagaagaagactgggtaacatctatcacacaggctttcaggacagacttgtaacctggcatgtacctattgactgtatcctcatgcattttcctcaagaatgtctgaagaaggtagtaatattccttttaaattttttccaaccattgcttgatatatcactattttatccattgacatgattcttgaagacccaggataaaggacatccggataggtgtgtttatgaaggatggggcct

SEQ ID NO: 114820 - DNA, 2587 bp, Homo sapiens
  Payload ID: 2429
  Gene Symbol: CARD8
  Gene Name: caspase recruitment domain family, member 8
  ENST ID: ENST00000519646
  CDS Start-End: 120-560
agagcagcctggcagtgtccaagcaacaagcctccgctcctccttcctgcaccctggggctcctgaaactcacatgggtaaaaaagatacagtaaagacataaataccacatttgacaaatggaaaaaaaggagtgtccagaaaagagtagcagcagtgaggaagagctgccgagacgggacagtggatccagtaggaacatagatgcatccaaactcattagactacaaggatcacggaaactgttggttgacaatagcatacgggaactgcaatacacaaaaactggaattttttttcaggctgaggcctgtgtgacaaatgatacggtatacagggagctaccctgtgtttctgagaccctttgtgacatctcacattttttccaagaagatgatgagacagaggcagagccattattgttccgtgctgttcctgagtgtcaactatctgggggggacattcccagtctagatccgcccagtctaagagaactttctgtgatgacgggagtgttccattctctgctacacagtgttatagccgtgagtgatatgtagctgttgagcacttgaaatatggatagtgcaactgagaaactaaagtttacctaagtttaattcatacaaatttaaatagcatatccgggtagcggctactctacgggacagtgcagctctagttttcaataacatcgtcttcatcttcatcaactgattcttgatgtttttcatctttttgtaacatggggatcccaacctccagtgtatcagaagagcaggaatcttcagagggacaagattcaggagacatttgctcagaagagaatcaaatagtttcctcttatgcttctaaagtctgttttgagatcgaagaagattataaaaatcgtcagtttctggggcctgaaggaaatgtggatgttgagttgattgataagagcacaaacagatacagcgtttggttccccactgctggctggtatctgtggtcagccacaggcctcggcttcctggtaagggatgaggtcacagtgacgattgcgtttggttcctggagtcagcacctggccctggacctgcagcaccatgaacagtggctggtgggcggccccttgtttgatgtcactgcagagccagaggaggctgtcgccgaaatccacctcccccacttcatctccctccaagcaggtgaggtggacgtctcctggtttctcgttgcccattttaagaatgaagggatggtcctggagcatccagcccgggtggagcctttctatgctgtcctggaaagccccagcttctctctgatgggcatcctgctgcggatcgccagtgggactcgcctctccatccccatcacttccaacacattgatctattatcacccccaccccgaagatattaagttccacttgtaccttgtccccagcgacgccttgctaacaaaggcgatagatgatgaggaagatcgcttccatggtgtgcgcctgcagacttcgcccccaatggaacccctgaactttggttccagttatattgtgtctaattctgctaacctgaaagtaatgcccaaggagttgaaattgtcctacaggagccctggagaaattcagcacttctcaaaattctatgctgggcagatgaaggaacccattcaacttgagattactgaaaaaagacatgggactttggtgtgggatactgaggtgaagccagtggatctccagcttgtagctgcatcagcccctcctcctttctcaggtgcagcctttgtgaaggagaaccaccggcaactccaagccaggatgggggacctgaaaggggtgctcgatgatctccaagacaatgaggttcttactgagaatgagaaggagctggtggagcaggaaaagacacggcagagcaagaatgaggccttgctgagcatggtggagaagaaaggggacctggccctggacgtgctcttcagaagcattagtgaaagggacccttacctcgtgtcctatcttagacagcagaatttgtaaaatgagtcagttaggtagtctggaagagagaatccagcgttctcattggaaatggataaacagaaatgtgatcattgatttcagtgttcaagacagaagaagactgggtaacatctatcacacaggctttcaggacagacttgtaacctggcatgtacctattgactgtatcctcatgcattttcctcaagaatgtctgaagaaggtagtaatattccttttaaattttttccaaccattgcttgatatatcactattttatccattgacatgattcttgaagacccaggataaaggacatccggataggtgtgtttatgaaggatggggcctggaaaggcaacttttcctgattaatgtgaaaaataattcctatggacactccgtttgaagtatcaccttctcataactaaaagcagaaaagctaacaaaagcttctcagctgaggacactcaaggcatacatgatgacagtcttttttttttttgtatgttaggactttaacactttatctatggctactgttattagaacaatgtaaatgtatttgctgaaaga

SEQ ID NO: 114821 - DNA, 2123 bp, Homo sapiens
  Payload ID: 2430
  Gene Symbol: CARD9
  Gene Name: caspase recruitment domain family, member 9
  Uniprot ID: Q9H257
  ENST ID: ENST00000371732
  CDS Start-End: 167-1777
gactgtggagttaagcagaacccatcaggaagtgcacaggcgtccggcgtgctcctccctccctgcagccccgggcagcatctcccagaggctccgcggcccaggctcctggtgtgtctgcagtgcaggtggctcctggaagaccctcagcctgcctgctgaggccatgtcggactacgagaacgatgacgagtgctggagcgtcctggagggcttccgggtgacgctcacctcggtcatcgacccctcacgcatcacaccttacctgcggcagtgcaaggtcctgaaccccgatgatgaggagcaggtgctcagcgaccccaacctggtcatccgcaaacggaaagtgggtgtgctcctggacatcctgcagcggaccggccacaagggctacgtggccttcctcgagagcctggagctctactacccgcagctgtacaagaaggtcacaggcaaggagccggcccgcgtcttctccatgatcatcgacgcgtccggggagtcaggcctgactcagctgctgatgactgaggtcatgaagctgcagaagaaggtgcaggacctgaccgcgctgctgagctccaaagatgacttcatcaaggagctgcgggtgaaggacagcctgctgcgcaagcaccaggagcgtgtgcagaggctcaaggaggagtgcgaggccggcagccgcgagctcaagcgctgcaaggaggagaactacgacctggccatgcgcctggcgcaccagagtgaggagaagggcgccgcgctcatgcggaaccgtgacctgcagctggagattgaccagctcaagcacagcctcatgaaggccgaggacgactgcaaggtggagcgcaagcacacgctgaagctcaggcacgccatggagcagcggcccagccaggagctgctgtgggagctgcagcaggagaaggccctgctccaggcccgggtgcaggagctggaggcctccgtccaggaggggaagctggacaggagcagcccctacatccaggtactggaggaggactggcggcaggcgctgcgggaccaccaggagcaggccaacaccatcttctccctgcgcaaggacctccgccagggcgaggcccgacgcctccggtgcatggaggagaaggagatgttcgagctgcagtgcctggcactacgtaaggactccaagatgtacaaggaccgcatcgaggccatcctgctgcagatggaggaggtcgccattgagcgggaccaggccatagccacgcgggaggagctgcacgcacagcacgcccggggcctgcaggagaaggacgcgctgcgcaagcaggtgcgggagctgggcgagaaggcggatgagctgcagctgcaggtgttccagtgtgaggcgcagctactggccgtggagggcaggctcaggcggcagcagctggagacgctcgtcctgagctccgacctggaagatggctcacccaggaggtcccaggagctctcactcccccaggacctggaggacacccagctctcagacaaaggctgccttgccggcggggggagcccgaaacagccctttgcagctctgcaccaggagcaggttttgcggaacccccatgacgcaggcctgagcagcggggagccgcccgagaaggagcggcggcgcctcaaagagagttttgagaactaccgcaggaagcgcgccctcaggaagatgcagaaaggatggcggcagggggaggaggaccgggagaacaccacgggcagcgacaacaccgacactgagggctcctagccgcagcagcgcaggccccgaccagggcacacccaccggcccggcctcctgccacccgggggtgccgacgccctggggcgcagacttccccgagccgtcgctgacttggcctggaacgaggaatctggtgccctgaaaggcccagccggactgccgggcattggggccgtttgttaagcggcactcattttgcggaggccatgcgggtgctcaccacccccatgcacacgccatctgtgtaacttcaggatctgttctgtttcaccatgtaacacacaatacatgcatgcattgtattagtgttagaaaacacagctgcgtaaataaacagcacgggtgacccgca

SEQ ID NO: 114822 - DNA, 1814 bp, Homo sapiens
  Payload ID: 2430
  Gene Symbol: CARD9
  Gene Name: caspase recruitment domain family, member 9
  Uniprot ID: Q9H257
  ENST ID: ENST00000371734
  CDS Start-End: 167-1645
gactgtggagttaagcagaacccatcaggaagtgcacaggcgtccggcgtgctcctccctccctgcagccccgggcagcatctcccagaggctccgcggcccaggctcctggtgtgtctgcagtgcaggtggctcctggaagaccctcagcctgcctgctgaggccatgtcggactacgagaacgatgacgagtgctggagcgtcctggagggcttccgggtgacgctcacctcggtcatcgacccctcacgcatcacaccttacctgcggcagtgcaaggtcctgaaccccgatgatgaggagcaggtgctcagcgaccccaacctggtcatccgcaaacggaaagtgggtgtgctcctggacatcctgcagcggaccggccacaagggctacgtggccttcctcgagagcctggagctctactacccgcagctgtacaagaaggtcacaggcaaggagccggcccgcgtcttctccatgatcatcgacgcgtccggggagtcaggcctgactcagctgctgatgactgaggtcatgaagctgcagaagaaggtgcaggacctgaccgcgctgctgagctccaaagatgacttcatcaaggagctgcgggtgaaggacagcctgctgcgcaagcaccaggagcgtgtgcagaggctcaaggaggagtgcgaggccggcagccgcgagctcaagcgctgcaaggaggagaactacgacctggccatgcgcctggcgcaccagagtgaggagaagggcgccgcgctcatgcggaaccgtgacctgcagctggagattgaccagctcaagcacagcctcatgaaggccgaggacgactgcaaggtggagcgcaagcacacgctgaagctcaggcacgccatggagcagcggcccagccaggagctgctgtgggagctgcagcaggagaaggccctgctccaggcccgggtgcaggagctggaggcctccgtccaggaggggaagctggacaggagcagcccctacatccaggtactggaggaggactggcggcaggcgctgcgggaccaccaggagcaggccaacaccatcttctccctgcgcaaggacctccgccagggcgaggcccgacgcctccggtgcatggaggagaaggagatgttcgagctgcagtgcctggcactacgtaaggactccaagatgtacaaggaccgcatcgaggccatcctgctgcagatggaggaggtcgccattgagcgggaccaggccatagccacgcgggaggagctgcacgcacagcacgcccggggcctgcaggagaaggacgcgctgcgcaagcaggtgcgggagctgggcgagaaggcggatgagctgcagctgcaggtgttccagtgtgaggcgcagctactggccgtggagggcaggctcaggcggcagcagctggagacgctcgtcctgagctccgacctggaagatggctcacccaggaggtcccaggagctctcactcccccaggacctggaggacacccagctctcagacaaaggctgccttgccggcggggggagcccgaaacagccctttgcagctctgcaccaggagcaggttttgcggaacccccatgacgcaggcccagccggactgccgggcattggggccgtttgttaagcggcactcattttgcggaggccatgcgggtgctcaccacccccatgcacacgccatctgtgtaacttcaggatctgttctgtttcaccatgtaacacacaatacatgcatgcattgtattagtgttagaaaacacagctgcgtaaataaacagcacgggtgacccgca

SEQ ID NO: 114823 - DNA, 1912 bp, Homo sapiens
  Payload ID: 2430
  Gene Symbol: CARD9
  Gene Name: caspase recruitment domain family, member 9
  Uniprot ID: Q9H257
  ENST ID: ENST00000489932
  CDS Start-End: 145-1245
catcaggaagtgcacaggcgtccggcgtgctcctccctccctgcagccccgggcagcatctcccagaggctccgcggcccaggctcctggtgtgtctgcagtgcaggtggctcctggaagaccctcagcctgcctgctgaggccatgtcggactacgagaacgatgacgagtgctggagcgtcctggagggcttccgggtgacgctcacctcggtcatcgacccctcacgcatcacaccttacctgcggcagtgcaaggtcctgaaccccgatgatgaggagcaggtgctcagcgaccccaacctggtcatccgcaaacggaaagtgggtgtgctcctggacatcctgcagcggaccggccacaagggctacgtggccttcctcgagagcctggagctctactacccgcagctgtacaagaaggtcacaggcaaggagccggcccgcgtcttctccatgatcatcgacgcgtccggggagtcaggcctgactcagctgctgatgactgaggtcatgaagctgcagaagaaggtgcaggacctgaccgcgctgctgagctccaaagatgacttcatcaaggagctgcgggtgaaggacagcctgctgcgcaagcaccaggagcgtgtgcagaggctcaaggaggagtgcgaggccggcagccgcgagctcaagcgctgcaaggaggagaactacgacctggccatgcgcctggcgcaccagagtgaggagaagggcgccgcgctcatgcggaaccgtgacctgcagctggagattgaccagctcaagcacagcctcatgaaggccgaggacgactgcaaggtggagcgcaagcacacgctgaagctcaggcacgccatggagcagcggcccagccaggagctgctgtgggagctgcagcaggagaaggccctgctccaggcccgggtgcaggagctggaggcctccgtccaggaggggaagctggacaggagcagcccctacatccaggtactggaggaggactggcggcaggcgctgcgggaccaccaggagcaggccaacaccatcttctccctgcgcaaggacctccgccagggcgaggcccgacgcctccggtgcatggaggagaaggagatgttcgagctgcagtgcctggcactacgtaaggactccaagatgtacaaggaccgcatcgaggccatcctgctgcagatggaggaggtcgccattgagcgggaccagagcacacaaatggaggggctgtgaccagcctccgcgcccagcggcttgacgtcctccggagcctctgcttggagttgggcggccgggccgagggcccagggcaagcttggggccctcactgagggtcggccttgtgctgtcccgtcaggccatagccacgcgggaggagctgcacgcacagcacgcccggggcctgcaggagaaggacgcgctgcgcaagcaggtgcgggagctgggcgagaaggcggatgagctgcagctgcaggtgttccagtgtgaggcgcagctactggccgtggagggcaggctcaggcggcagcagctggagacgctcgtcctgagctccgacctggaagatggctcacccaggaggtcccaggagctctcactcccccaggacctggaggacacccagctctcagacaaaggctgccttgccggcggggggagcccgaaacagccctttgcagctctgcaccaggagcaggttttgcggaacccccatgacgcaggcctgagcagcggggagccgcccgagaaggagcggcggcgcctcaaagagagttttgagaactaccgcaggaagcgcgccctcaggaagatgcagaaaggatggcggcagggggaggaggaccgggagaacaccacgggcagcgacaacaccgacactgagggctcctagccgcagcag

SEQ ID NO: 114824 - DNA, 4405 bp, Homo sapiens
  Payload ID: 2431
  Gene Symbol: CASZ1
  Gene Name: castor zinc finger 1
  Uniprot ID: Q86V15
  ENST ID: ENST00000344008
  CDS Start-End: 321-3821
gcatgcgcgcccgcggcgctccatcccaaacacacacacatttttcccccggacttggaaagtcacccaaagccgccccaagtgcaggcaaacagaccttgctgactgaaggcaaagactcctccatcccacctgccctcccagctgccacggccatcgacccctcctttacaaggggctcctgcaactccccagcagcacgtgttggaatggacttcggaccctggcctcttgggatgcaaaggatgaagtgacacccccagctacatccgaggaggttctaggacctgctacgagagtttgggaccaaggagaagagaatggatcttggaacagctgagggcacccggtgcacggacccgcctgcaggcaagcccgccatggcgcccaaacgcaagggtggcctgaagctgaacgccatctgcgccaagctgagccgccaggtggtggtggagaagcgagctgacgccggctcccacacggagggcagcccatcgcagccccgggaccaagagcgcagtggccctgagtctggggcagcccgggccccccgcagcgaggaagacaagagacgggcagtgatcgagaagtgggtgaacggggagtacagcgaggagccggcacccacacccgtgttggggcggattgcccgcgagggcctggagctgcctcccgagggtgtctacatggtgcagccccaggggtgcagcgatgaggaagaccacgcggaggagccctccaaggacggcggtgccctggaggagaaggattcggacggggcagcctccaaggaggacagcggccccagcaccaggcaggcttcaggagaggcctcctcgctgcgggactacgcggcctccaccatgaccgagttcctcggcatgtttggctatgatgaccagaacacgcgggacgagctggccaggaagatcagctttgagaagctgcacgcgggctccaccccggaggcagccacctcctccatgctgcccacctccgaggataccctcagcaagcgggcgcggttctctaagtatgaggagtacatccgcaagctcaaggctggcgagcagctctcctggccggcccccagcaccaagaccgaggagcgggtgggcaaggaggtggtgggcaccctgcccggcctgcggctgcccagcagcacggcccacctggagaccaaggccaccatcctgcccctgccgtcgcacagcagtgtccagatgcagaacctggtagcccgggcctccaagtacgacttcttcatccaaaaactgaagaccggcgagaatctgcggccccagaacgggagcacctacaagaagccatccaagtacgacctggagaatgtcaagtacctgcacctcttcaaacccggggagggcagccccgacatgggcggggccatcgccttcaagacaggcaaggtggggcgcccttccaagtacgacgtccggggcatccagaagccaggccccgccaaggttccgcccacccccagcctggctcccgcacccctcgccagcgtgcccagtgcccccagcgcccccgggccagggccagagcctcctgcctccctgtccttcaacactcccgagtacctgaagtcaaccttctccaaaacagactccatcaccacggggaccgtctccactgtcaagaacggactgcccacagataaaccagccgtcactgaagatgtaaacatttaccagaaatatattgccaggttctcgggcagccagcactgtggccacatccactgtgcctaccagtaccgcgagcactaccactgccttgaccctgagtgtaactaccagaggttcacgagtaagcaggacgtgatccgccactacaacatgcacaagaagcgcgacaactccctgcagcacggcttcatgcgtttcagcccgctggacgactgcagcgtctactaccacggctgccacctcaatgggaagagcacccactatcactgcatgcaggtgggctgtaacaaggtgtacacgagcacgtctgacgtgatgacccacgagaacttccacaagaagaatacccagctcattaacgacggcttccagcgcttccgagccaccgaagactgtggcacagccgactgccagttctacggacagaagaccacgcacttccactgcaggcgccccggctgcacattcactttcaagaacaagtgtgacatcgagaagcacaagagctaccacatcaaggacgatgcctacgccaaggacggcttcaagaagttctacaagtacgaggagtgcaagtacgagggctgcgtgtacagcaaggctaccaaccacttccactgcatccgcgccggctgcggcttcaccttcacctccaccagccagatgacctctcacaagcgcaagcatgagcgccggcacatccgctcctcgggcgcgctggggctgccgccctcgctgctgggcgccaaggacacggagcacgaggagtccagcaacgacgaccttgttgacttctccgccctgagcagcaagaactccagcctgagcgcctcccctaccagccagcagtcctctgcgtccctggctgccgccactgccgccaccgaggctgggcccagtgccaccaaacctcccaacagcaagatctcggggctgctgccccagggcctgcctggctcaatccccctggccctggccctctccaactcgggcctgcccacccccacgccctacttccccatactggctggccgtgggagcacctccctgcctgtgggcacccccagcctcctgggtgccgtgtcgtctgggtcagcagcctcagccacccctgacacacccacgctggtcgcctcgggagctggagactcagcccccgtggctgccgcctctgtcccggcaccacccgcctccatcatggagaggatctctgcaagcaagggcctcatctcgcccatgatggccaggctggctgcagctgccctcaagccctctgccacctttgacccaggaagcgggcagcaggtcaccccagccaggttccccccggcccaagtgaagccggaacccggtgagagcaccggcgccccaggcccccacgaagcctcccaggaccgcagtctagacctgactgtgaaggagcccagcaacgaatcaaatggccacgcagtcccggcaaattcatctcttttatcctcgcttatgaataagatgtctcagggcaaccctggcctgggcagcctgctgaacatcaaggcggaagcggaggggagccccgctgcggagccctcgcccttcctaggcaaggccgtgaaggcgctggttcaggagaagttggcagagccctggaaggtgtacctgcgcaggtttggtacaaaggacttctgtgacggccagtgtgacttcctccacaaggcccacttccactgcgtggtggaggaatgcggcgcgctcttcagcaccttggacggggccatcaagcacgcaaacttccacttccggacagagggaggagcagcaaaaggaaacacagaggctgcctttccggcctcggccgccgagaccaaacctcccatggccccctcgtcccctccggtccctcctgtcaccacggccacggtgtcctctctggaggggcccgctcccagcccggcctccgtgccctccacccccaccctgctcgcctggaagcagctggcttccaccataccccagatgcctcagatcccagcgtcagtgcctcacctgcccgcctcgcccttggcaacgacttctctagagaacgccaagccccaggtcaaacccggattcctccagttccaggagaagtgagtccctcgatgagccgggagtcccgcgttcccctcgcgtctcgggagtaggtgctagcaagggcgctaggaggccctgttcctcactgcggatggtgctgctgtccccagcctctctggggcatggccatcgggtgatgtccttctagccaaagatgctgctgctcctacctcactgcctgtcccagagcaggccagcccgcgtgggccgatggtggcggcagtggctactgctcctgcagggcatgtggtgatcctgccagggccaggtggggtggactgggcgtggtggtcctcagaggacaactcccagcctgacaaggagggctgcgtctccctccgagcctccgtattggcctcctctgtggctcacacccatggctgaatctctgcagggcacgtgaagtcacgggtaggggccaggcccctccaggccgtcactggcctgcacagtggtctgagctcttgggtggaagggaccctcctcactggatggtggtggctccttgcagggagaacggtgactttgtattgtcatgtgtgcggcttcctgttctcaataaaagtaataaattggattattta

SEQ ID NO: 114825 - DNA, 7936 bp, Homo sapiens
  Payload ID: 2431
  Gene Symbol: CASZ1
  Gene Name: castor zinc finger 1
  Uniprot ID: Q86V15
  ENST ID: ENST00000377022
  CDS Start-End: 319-5598
atgcgcgcccgcggcgctccatcccaaacacacacacatttttcccccggacttggaaagtcacccaaagccgccccaagtgcaggcaaacagaccttgctgactgaaggcaaagactcctccatcccacctgccctcccagctgccacggccatcgacccctcctttacaaggggctcctgcaactccccagcagcacgtgttggaatggacttcggaccctggcctcttgggatgcaaaggatgaagtgacacccccagctacatccgaggaggttctaggacctgctacgagagtttgggaccaaggagaagagaatggatcttggaacagctgagggcacccggtgcacggacccgcctgcaggcaagcccgccatggcgcccaaacgcaagggtggcctgaagctgaacgccatctgcgccaagctgagccgccaggtggtggtggagaagcgagctgacgccggctcccacacggagggcagcccatcgcagccccgggaccaagagcgcagtggccctgagtctggggcagcccgggccccccgcagcgaggaagacaagagacgggcagtgatcgagaagtgggtgaacggggagtacagcgaggagccggcacccacacccgtgttggggcggattgcccgcgagggcctggagctgcctcccgagggtgtctacatggtgcagccccaggggtgcagcgatgaggaagaccacgcggaggagccctccaaggacggcggtgccctggaggagaaggattcggacggggcagcctccaaggaggacagcggccccagcaccaggcaggcttcaggagaggcctcctcgctgcgggactacgcggcctccaccatgaccgagttcctcggcatgtttggctatgatgaccagaacacgcgggacgagctggccaggaagatcagctttgagaagctgcacgcgggctccaccccggaggcagccacctcctccatgctgcccacctccgaggataccctcagcaagcgggcgcggttctctaagtatgaggagtacatccgcaagctcaaggctggcgagcagctctcctggccggcccccagcaccaagaccgaggagcgggtgggcaaggaggtggtgggcaccctgcccggcctgcggctgcccagcagcacggcccacctggagaccaaggccaccatcctgcccctgccgtcgcacagcagtgtccagatgcagaacctggtagcccgggcctccaagtacgacttcttcatccaaaaactgaagaccggcgagaatctgcggccccagaacgggagcacctacaagaagccatccaagtacgacctggagaatgtcaagtacctgcacctcttcaaacccggggagggcagccccgacatgggcggggccatcgccttcaagacaggcaaggtggggcgcccttccaagtacgacgtccggggcatccagaagccaggccccgccaaggttccgcccacccccagcctggctcccgcacccctcgccagcgtgcccagtgcccccagcgcccccgggccagggccagagcctcctgcctccctgtccttcaacactcccgagtacctgaagtcaaccttctccaaaacagactccatcaccacggggaccgtctccactgtcaagaacggactgcccacagataaaccagccgtcactgaagatgtaaacatttaccagaaatatattgccaggttctcgggcagccagcactgtggccacatccactgtgcctaccagtaccgcgagcactaccactgccttgaccctgagtgtaactaccagaggttcacgagtaagcaggacgtgatccgccactacaacatgcacaagaagcgcgacaactccctgcagcacggcttcatgcgtttcagcccgctggacgactgcagcgtctactaccacggctgccacctcaatgggaagagcacccactatcactgcatgcaggtgggctgtaacaaggtgtacacgagcacgtctgacgtgatgacccacgagaacttccacaagaagaatacccagctcattaacgacggcttccagcgcttccgagccaccgaagactgtggcacagccgactgccagttctacggacagaagaccacgcacttccactgcaggcgccccggctgcacattcactttcaagaacaagtgtgacatcgagaagcacaagagctaccacatcaaggacgatgcctacgccaaggacggcttcaagaagttctacaagtacgaggagtgcaagtacgagggctgcgtgtacagcaaggctaccaaccacttccactgcatccgcgccggctgcggcttcaccttcacctccaccagccagatgacctctcacaagcgcaagcatgagcgccggcacatccgctcctcgggcgcgctggggctgccgccctcgctgctgggcgccaaggacacggagcacgaggagtccagcaacgacgaccttgttgacttctccgccctgagcagcaagaactccagcctgagcgcctcccctaccagccagcagtcctctgcgtccctggctgccgccactgccgccaccgaggctgggcccagtgccaccaaacctcccaacagcaagatctcggggctgctgccccagggcctgcctggctcaatccccctggccctggccctctccaactcgggcctgcccacccccacgccctacttccccatactggctggccgtgggagcacctccctgcctgtgggcacccccagcctcctgggtgccgtgtcgtctgggtcagcagcctcagccacccctgacacacccacgctggtcgcctcgggagctggagactcagcccccgtggctgccgcctctgtcccggcaccacccgcctccatcatggagaggatctctgcaagcaagggcctcatctcgcccatgatggccaggctggctgcagctgccctcaagccctctgccacctttgacccaggaagcgggcagcaggtcaccccagccaggttccccccggcccaagtgaagccggaacccggtgagagcaccggcgccccaggcccccacgaagcctcccaggaccgcagtctagacctgactgtgaaggagcccagcaacgaatcaaatggccacgcagtcccggcaaattcatctcttttatcctcgcttatgaataagatgtctcagggcaaccctggcctgggcagcctgctgaacatcaaggcggaagcggaggggagccccgctgcggagccctcgcccttcctaggcaaggccgtgaaggcgctggttcaggagaagttggcagagccctggaaggtgtacctgcgcaggtttggtacaaaggacttctgtgacggccagtgtgacttcctccacaaggcccacttccactgcgtggtggaggaatgcggcgcgctcttcagcaccttggacggggccatcaagcacgcaaacttccacttccggacagagggaggagcagcaaaaggaaacacagaggctgcctttccggcctcggccgccgagaccaaacctcccatggccccctcgtcccctccggtccctcctgtcaccacggccacggtgtcctctctggaggggcccgctcccagcccggcctccgtgccctccacccccaccctgctcgcctggaagcagctggcttccaccataccccagatgcctcagatcccagcgtcagtgcctcacctgcccgcctcgcccttggcaacgacttctctagagaacgccaagccccaggtcaaacccggattcctccagttccaggagaacgatccttgcctcgccacggactgcaagtacgccaacaagttccacttccactgtctctttgggaactgcaagtacgtctgcaaaacgtctggcaaggccgaatcccactgcctggaccacatcaaccccaacaacaacctggtgaacgtgcgagaccagtttgcatactactctctgcagtgtctctgtcccaaccagcactgcgagttccgaatgcgtgggcactaccactgcctccgcaccggctgctattttgtgaccaacatcaccaccaagctcccctggcacatcaagaagcatgagaaggcggagcggcgggcagccaatggcttcaaatacttcaccaagcgcgaggagtgtggcaggctaggttgcaagtacaaccaggtgaacagccacttccactgcatccgggagggctgccagttctccttcctcctcaagcaccagatgacctcccacgcgcggaagcacatgcggaggatgctggggaagaacttcgaccgcgtgcccccctcccagggccccccaggcctgatggatgctgagacagatgagtgcatggactacactggctgcagcccaggcgccatgtcctctgagtcatccaccatggaccggagctgctccagcacccccgtgggtaacgagagcaccgcggcagggaacaccatctctatgccgacagcctcgggggccaaaaagcgcttctggatcatcgaggacatgtcgcccttcggcaagcggcggaagacggcgtcctcccggaagatgctggacgagggcatgatgctggagggcttccggcgcttcgacctttacgaggactgcaaggacgcagcttgtcagttctcgctcaaggtcacccactaccactgcacgcgcgagaactgcggctacaagttctgcgggcgcacgcacatgtacaagcacgcgcagcaccacgaccgcgtggacaacctggtgctggacgacttcaagcgcttcaaggcctcactcagctgccacttcgccgactgccccttctcgggcaccagcacgcacttccactgcctgcgctgccgcttccgctgcaccgacagcaccaaggtcacggcgcatcgcaagcaccacggcaaacaggacgtgatcagcgccgcgggcttctgccagttcagctccagcgccgactgcgccgtgcccgactgcaagtacaagctcaagtgctcgcacttccactgcaccttcccgggctgccgccacacggtggtgggcatgtcgcagatggactcgcacaagcgcaagcacgagaagcaggagcgcggcgagcccgcggcagagggccccgcgcccgggcctcccatcagtctggacggctccctgtcgctgggcgccgagccgggctcgctgctcttcctgcagtcggcggccgccggcctgggcctggcgctgggcgacgcgggcgaccccggcccgcccgacgccgccgcccccgggccgcgcgagggcgccgccgccgccgccgccgcagctggggagtcctcgcaggaggacgaggaggaggagctggagctgccggaggaggaggccgaagacgacgaggacgaggacgacgacgaggacgacgacgacgaggacgacgacgaggacgacgacgacgaggacctgcgcaccgactcggaggagtcgctgcccgaggcggcggcggaggcggcgggcgcgggcgcgcggaccccggccttggcggcgctggcggccctgggcgcccccggccccgcgcccactgcagcctcctcgccctagcggcgcccgcgggtggccctggcggcggcctcggcctcggcctcgggagcggcgccgccccgcgcgaagcggcccctgggcagagccccgcgccccgccggtgcttccggaccccgagtccgtctcaggacagaggcggggacccctctggtgctccgcggccgaggacacaggcggcggcggtggccctgctctagggaggccgggtctcttcagggaaacagaaggtgctcttgtcccggggtagggaacctaggagcaggggtcccgggcgaatgcggcgcagctcccggccgctgccccggcgcccctccccgcggccgattcggccccgcgaccattgctcaggactgggacgggcgctgggggccaccgggacccccaccgcgcgccaccagggcggggtggctcctggagccgctggcggggcctccctcatgcagctaggatcctcccccctgcccagggggagacgggcagaaggcagtcagcacgggtgacactacagggaccgtggaggaagcctcacgggagtagcagccgcggagctccagctcagccccaccccagggcccggctgctcccccaggcctgggtcgggtctgtttggcgactccctggccccagcctccgccccagggaaaccgaggctgcgtccaaaacccagagtagcccgctgggggccggggcggggtctcggccaccctggtggtgcaaacaggaaggatgcgcctggttttggctttaatgttcaaaatggaaaaaaatacaagaaagttgtacagtatttttcctgtaaaggttattattctacatagaacaaaaaggaagaaagcaggcgtggtgagagtgcagacccgcctgggcccggcctgaggttggaggctcagtcccgtttatcctgtgggatttggtccagggtttttgtagaggccttaactgtttgaggctgtctgtcttcacaatagcactgatgggagctgcgtgattccaactcttaacttgaattttgtagagacaagaaaaaaggactattactgttgatccaagtttgtagttaatttaacatttgagttctctcttggtgatgcgtgtggctttatagggcttttttttttttccagtttgttttattactttgtttgggatgcttcttcgctggtgcagtctacccagattgggttccctttgcaaaacatcccccttcctggagatgatgatgccatcgaagcccgggccagggcctgacctggcaggcacacacctggccagtggctctgaggtccccggggaccgagtcccctgcgagggcaggctgcccgaggccacacctgcccaccttccctactccaggccaccagctggtgtcagattgggccaccgggagagaacaggcctaggagggaatggaaggctggcggggaggctgtcatccagaagcctcctccccagaggtctccaggaggaacctggctcaactggggggcagtggtttacttttcccttttttcttcctttcttttgtcctctcagctgcccacagccagaaagccaggaccacccgaactggacagggagcagggagggaggagtggtcgcacggagcgtacctgattcaacaggaaatcagttattttctaaaacagcccctaccagagcctcctgaactctgtgggcaccacgtgctgctgtgagcatctgcccagacagtgacccgccacaggccccgggcgtctgtggaaggagttttgtaaaggaaaaaaaaacacacacacacaaacattttttcaatgtagcaaaatcaaacttaaaaaaaaaaaagaagaaaagaagaagatgccgacagtgcggagtctagccttttgtaaacttcatattgcacactaggactataagccattgctagctcattttgaattttaacgtgtaatttttgttttattttctttctgtggggaaacaatgcttgatccaccaatgctctttttaatgttttataactatgtatgtgtatatatataaatatcaaataatatgtatgcacatatgtgtgtgtatatatctatatgtatatacatatatagatatatagagatatatagagaggttttgagacaaaaaaaatacagaacgtgaaacccgagctgaacagcgtgtgctctgattacttgaatctggtctcctcggcacctggttattaagaactgaatatttttccacttgaatttagtgctattagaaatttaatatatgtgttttatttatttgatttttttttttttttttgcatgactgatgcaaggtttgacattttcactcaataaaaactggaaaaaaa

SEQ ID NO: 114826 - DNA, 695 bp, Homo sapiens
  Payload ID: 2431
  Gene Symbol: CASZ1
  Gene Name: castor zinc finger 1
  ENST ID: ENST00000447850
  CDS Start-End: 1-695
cgaatgcgtgggcactaccactgcctccgcaccggctgctattttgtgaccaacatcaccaccaagctcccctggcacatcaagaagcatgagaaggcggagcggcgggcagccaatggcttcaaatacttcaccaagcgcgaggagtgtggcaggctaggttgcaagtacaaccaggtgaacagccacttccactgcatccgggagggctgccagttctccttcctcctcaagcaccagatgacctcccacgcgcggaagcacatgcggaggatgctggggaagaacttcgaccgcgtgcccccctcccagggccccccaggcctgatggatgctgagacagatgagtgcatggactacactggctgcagcccaggcgccatgtcctctgagtcatccaccatggaccggagctgctccagcacccccgtgggtaacgagagcaccgcggcaggctgcccggctcctcctcctcctcctcttcctcctcctgcggccgctggtgatgaggctgcccgcacggccccgcagccgccagcgactccatccttctcgccggccacgctccggccgcccctcccccccctcccctgcctcttctctccgtcctgtctctcatactctctgctcagtgccactctcggagccggccggggcctggcccatcccacctgcagcccgcccagcttcccgcc

SEQ ID NO: 114827 - DNA, 3925 bp, Homo sapiens
  Payload ID: 2432
  Gene Symbol: CECR1
  Gene Name: cat eye syndrome chromosome region, candidate 1
  Uniprot ID: Q9NZK5
  ENST ID: ENST00000262607
  CDS Start-End: 213-1748
ttgggaaacccctacctgtctgtacctgtaggtcttttctctggggtctggaagaagaatccttcaatatcttgccttctggtaatctgagagcagggcgagaaaaggaagatcagagttccacccttaaatctgtaggttttcactcccccactctcctttgcagtcccgtggagtctccatctgagccctttcctagtccaggcatcccgatgttggtggatggcccatctgagcggccagccctgtgcttcttgctgttggctgtggcaatgtctttcttcggctcagctctatccatagatgaaacacgggcgcatctgttgttgaaagaaaagatgatgcggctgggggggcggctggtgctgaacaccaaggaggagctggccaatgagaggctcatgacgctcaaaatcgctgagatgaaggaggccatgaggaccctgatattcccacccagcatgcactttttccaggccaagcatctcattgagagaagtcaagtgtttaatattctaaggatgatgccaaaaggggctgccttgcacctccatgacattggcatcgtgactatggactggctggtgaggaatgtcacctacaggcctcactgccacatctgtttcaccccaagggggatcatgcagttcagatttgctcacccaactccccgtccatcagaaaaatgttccaagtggattctgctggaggattatcggaagcgggtgcagaacgtcactgagtttgatgacagcttgctgaggaatttcactctggtgacccagcacccggaggtgatttacacaaaccaaaatgttgtctggtcgaaatttgaaaccatcttcttcaccatctctggtctcatccattacgcaccagtgttcagagactatgtcttccggagcatgcaggagttctacgaggacaacgtgctctacatggagatcagagccaggctgctgccggtgtatgagctcagtggagagcaccatgacgaagagtggtcagtgaagacttaccaggaagtagctcagaagtttgtggaaactcaccctgagtttattggaatcaaaatcatttattcggatcacagatccaaagatgtggctgtcatcgcagaatccatccgaatggccatggggctccgaatcaagttccccacggtggtggcagggtttgacctggtggggcatgaggacactggccactccttgcatgactacaaggaagctctgatgatccccgccaaggatggcgttaagctgccttacttcttccacgccggagaaacagactggcagggtacttccatagacaggaacattctggatgctctgatgctgaacactaccagaatcggccatggatttgctttgagcaaacaccccgcagtcaggacttactcctggaaaaaggacatccccatagaagtctgtcccatctctaaccaggtgctgaaactggtgtctgacttgaggaaccaccctgtagccactctgatggccactgggcaccccatggtgatcagctctgatgacccagctatgtttggtgccaaaggcttgtcctatgatttctatgaggtcttcatgggcattggggggatgaaggctgacctgaggaccctcaaacagctggccatgaactctatcaagtacagtaccctgttggagagtgagaaaaatactttcatggaaatctggaagaagagatgggataagttcatagcagatgtggctacaaagtgaggagaagctagccagccctctacaagctgtcttcttgcacacgctgtcacttcctctcactcgttcttgaatcagctccatgtgcccatgaaatcaatggcctctgtatggagcgaccctgtgagaagcacttggctggctgagcaaattcatcctctggaaatattctctctcagccacagtgacattgaccctcttggttttctcctgtctctggccatttcttccagtttccctatttcagagtcttctcctctctctgatctctgtgctgtttcctcaggactcagtcctgggctctcttctattctggtctctttatttttttatttttgtattttttcgagatggagttttgctcttgttgcccaggctggagtacaatggtgcgatctcagctcagtgcaacctccgccacccgggttcaggcaattctcttgcatcagcctcgcgagtagttggaattataggcatgtgccaccacacccagctgatttttgcatttttagtagagacaggttttcaccatgttggcgaggctggtatccaactcttgacctcaggtgatccactcgccccttggctcccaaagtgctggaattacaggcattagccaccatgcctggcctattctggtctctttaactctctcctctttatttctcttctctctctgtacacttttcctgggtggtctcatccattcctttgctttttcataccatttatttgttaatgattcccacatttatttatgcacttggagagctcacaggaatctcagaaactgatgaggtacaattctgaaccctcagtctcttccctttaaacctttctttttctctactttaatttttctaaagagtgtcttgctatgttgcccaggctggtctccaactcaagtgatcctcctgccgcagtctcccgaagtgctgggattactgacatgagccaccacactcagccctttaaacctttccctggcctttcccatagctggtgaaggacacctccatccattccacgcagttgctcaaagcagaaattttcagtgcaagtcttgatgctgcgccgtcccccactccctacatcagaacgcatccctcatctggactccagcggtggcttcttgatgctgcgcggtcccccactccctacatcagaatgcatcccgcatccagactccagcggtggtgctctacctgcacgctgttgccaagtccaagctaccatactcctgcctgagctatgacaacagcctcctcactgatctcccctttcttccctttgcctcctccagctcatttttcacagtgtagaatgacattttgtttgtttgttttgttttgtttgagatggagtctcgctctgttgcccagggtggagtgcagcggtgcgatctcggctcactgcaacctccacctcccgggttcaagcggattctcgtgcctcagcctcctgagtagctgggattacaggcatgcaccaccatgcccggataatttttgtatttttagtagagatggggtttcactatgttggccaggctggtctcgaacacctgacctcgtggtccacccgcctcggcctcccaaagcactgggattacaggcgtgagccacccggcctggcctagaatgacttttaaaagatcaaattaaatcaggtcactcctttgcttacaacgcagtgcgtttagaggtacaccccatgtctccacagggcatacagcatccgatttaatctggatccattccggcgccttcctctcccagtcacccagagggccccaaccccggcggccctttcttcctcaaatgtcctcggctctataccgtgcctgggtcttttctctttctctctgcctggaagattccttctttccccttttgtcttgcccactcctgtttacccttcaagtttcaagttcatgtcactgtctcagagaggttttcctgtgctcgccctgtttctctcaggaagccttgctcttttccatcatgcctctaatcacagcttataatcggatatttatttctgtgtctacagtcttgccctgccagactgtatgccccatgtgggcaggcgctcatgattgtttctgattgtttcacgcatgctgctaacccagagcctgggcccaaagctagttagtactcaataaacaatgcattgaa

SEQ ID NO: 114828 - DNA, 3195 bp, Homo sapiens
  Payload ID: 2432
  Gene Symbol: CECR1
  Gene Name: cat eye syndrome chromosome region, candidate 1
  Uniprot ID: Q9NZK5
  ENST ID: ENST00000330232
  CDS Start-End: 206-1018
gatgtcgaaactaaagcctggaaaggtcaaagagcttgatgaaggtcaaataggtagtaaggggtggctggacccagaccagggctcctaagttcgtcgctttcctcaccgcgctgggctctctgagcgtcctaatagccacgcccacctcaaatggcgatcccagagagcatctggcttcaattttcctttttccggaggggagatggattccctggaatggaactgggctctggtgtatgagctcagtggagagcaccatgacgaagagtggtcagtgaagacttaccaggaagtagctcagaagtttgtggaaactcaccctgagtttattggaatcaaaatcatttattcggatcacagatccaaagatgtggctgtcatcgcagaatccatccgaatggccatggggctccgaatcaagttccccacggtggtggcagggtttgacctggtggggcatgaggacactggccactccttgcatgactacaaggaagctctgatgatccccgccaaggatggcgttaagctgccttacttcttccacgccggagaaacagactggcagggtacttccatagacaggaacattctggatgctctgatgctgaacactaccagaatcggccatggatttgctttgagcaaacaccccgcagtcaggacttactcctggaaaaaggacatccccatagaagtctgtcccatctctaaccaggtgctgaaactggtgtctgacttgaggaaccaccctgtagccactctgatggccactgggcaccccatggtgatcagctctgatgacccagctatgtttggtgccaaaggcttgtcctatgatttctatgaggtcttcatgggcattggggggatgaaggctgacctgaggaccctcaaacagctggccatgaactctatcaagtacagtaccctgttggagagtgagaaaaatactttcatggaaatctggaagaagagatgggataagttcatagcagatgtggctacaaagtgaggagaagctagccagccctctacaagctgtcttcttgcacacgctgtcacttcctctcactcgttcttgaatcagctccatgtgcccatgaaatcaatggcctctgtatggagcgaccctgtgagaagcacttggctggctgagcaaattcatcctctggaaatattctctctcagccacagtgacattgaccctcttggttttctcctgtctctggccatttcttccagtttccctatttcagagtcttctcctctctctgatctctgtgctgtttcctcaggactcagtcctgggctctcttctattctggtctctttatttttttatttttgtattttttcgagatggagttttgctcttgttgcccaggctggagtacaatggtgcgatctcagctcagtgcaacctccgccacccgggttcaggcaattctcttgcatcagcctcgcgagtagttggaattataggcatgtgccaccacacccagctgatttttgcatttttagtagagacaggttttcaccatgttggcgaggctggtatccaactcttgacctcaggtgatccactcgccccttggctcccaaagtgctggaattacaggcattagccaccatgcctggcctattctggtctctttaactctctcctctttatttctcttctctctctgtacacttttcctgggtggtctcatccattcctttgctttttcataccatttatttgttaatgattcccacatttatttatgcacttggagagctcacaggaatctcagaaactgatgaggtacaattctgaaccctcagtctcttccctttaaacctttctttttctctactttaatttttctaaagagtgtcttgctatgttgcccaggctggtctccaactcaagtgatcctcctgccgcagtctcccgaagtgctgggattactgacatgagccaccacactcagccctttaaacctttccctggcctttcccatagctggtgaaggacacctccatccattccacgcagttgctcaaagcagaaattttcagtgcaagtcttgatgctgcgccgtcccccactccctacatcagaacgcatccctcatctggactccagcggtggcttcttgatgctgcgcggtcccccactccctacatcagaatgcatcccgcatccagactccagcggtggtgctctacctgcacgctgttgccaagtccaagctaccatactcctgcctgagctatgacaacagcctcctcactgatctcccctttcttccctttgcctcctccagctcatttttcacagtgtagaatgacattttgtttgtttgttttgttttgtttgagatggagtctcgctctgttgcccagggtggagtgcagcggtgcgatctcggctcactgcaacctccacctcccgggttcaagcggattctcgtgcctcagcctcctgagtagctgggattacaggcatgcaccaccatgcccggataatttttgtatttttagtagagatggggtttcactatgttggccaggctggtctcgaacacctgacctcgtggtccacccgcctcggcctcccaaagcactgggattacaggcgtgagccacccggcctggcctagaatgacttttaaaagatcaaattaaatcaggtcactcctttgcttacaacgcagtgcgtttagaggtacaccccatgtctccacagggcatacagcatccgatttaatctggatccattccggcgccttcctctcccagtcacccagagggccccaaccccggcggccctttcttcctcaaatgtcctcggctctataccgtgcctgggtcttttctctttctctctgcctggaagattccttctttccccttttgtcttgcccactcctgtttacccttcaagtttcaagttcatgtcactgtctcagagaggttttcctgtgctcgccctgtttctctcaggaagccttgctcttttccatcatgcctctaatcacagcttataatcggatatttatttctgtgtctacagtcttgccctgccagactgtatgccccatgtgggcaggcgctcatgattgtttctgattgtttcacgcatgctgctaacccagagcctgggcccaaagctagttagtactcaataaacaatgcattgaa

SEQ ID NO: 114829 - DNA, 4505 bp, Homo sapiens
  Payload ID: 2432
  Gene Symbol: CECR1
  Gene Name: cat eye syndrome chromosome region, candidate 1
  Uniprot ID: Q9NZK5
  ENST ID: ENST00000399837
  CDS Start-End: 277-1812
aaactcagatgcacacagcaagcatgcatgtaagccacacacttgccactctggctgcctcagcactgcagagcccctctccccggcctctagttggatccctggtgcacactggagggaaataaaacctaccccaacaggaagtgaaacagttggtgagcttttccggtgctctgcacagatgctggggcgctgagcaaacagccctcagtttctggagctgttccgagtcccgtggagtctccatctgagccctttcctagtccaggcatcccgatgttggtggatggcccatctgagcggccagccctgtgcttcttgctgttggctgtggcaatgtctttcttcggctcagctctatccatagatgaaacacgggcgcatctgttgttgaaagaaaagatgatgcggctgggggggcggctggtgctgaacaccaaggaggagctggccaatgagaggctcatgacgctcaaaatcgctgagatgaaggaggccatgaggaccctgatattcccacccagcatgcactttttccaggccaagcatctcattgagagaagtcaagtgtttaatattctaaggatgatgccaaaaggggctgccttgcacctccatgacattggcatcgtgactatggactggctggtgaggaatgtcacctacaggcctcactgccacatctgtttcaccccaagggggatcatgcagttcagatttgctcacccaactccccgtccatcagaaaaatgttccaagtggattctgctggaggattatcggaagcgggtgcagaacgtcactgagtttgatgacagcttgctgaggaatttcactctggtgacccagcacccggaggtgatttacacaaaccaaaatgttgtctggtcgaaatttgaaaccatcttcttcaccatctctggtctcatccattacgcaccagtgttcagagactatgtcttccggagcatgcaggagttctacgaggacaacgtgctctacatggagatcagagccaggctgctgccggtgtatgagctcagtggagagcaccatgacgaagagtggtcagtgaagacttaccaggaagtagctcagaagtttgtggaaactcaccctgagtttattggaatcaaaatcatttattcggatcacagatccaaagatgtggctgtcatcgcagaatccatccgaatggccatggggctccgaatcaagttccccacggtggtggcagggtttgacctggtggggcatgaggacactggccactccttgcatgactacaaggaagctctgatgatccccgccaaggatggcgttaagctgccttacttcttccacgccggagaaacagactggcagggtacttccatagacaggaacattctggatgctctgatgctgaacactaccagaatcggccatggatttgctttgagcaaacaccccgcagtcaggacttactcctggaaaaaggacatccccatagaagtctgtcccatctctaaccaggtgctgaaactggtgtctgacttgaggaaccaccctgtagccactctgatggccactgggcaccccatggtgatcagctctgatgacccagctatgtttggtgccaaaggcttgtcctatgatttctatgaggtcttcatgggcattggggggatgaaggctgacctgaggaccctcaaacagctggccatgaactctatcaagtacagtaccctgttggagagtgagaaaaatactttcatggaaatctggaagaagagatgggataagttcatagcagatgtggctacaaagtgaggagaagctagccagccctctacaagctgtcttcttgcacacgctgtcacttcctctcactcgttcttgaatcagctccatgtgcccatgaaatcaatggcctctgtatggagcgaccctgtgagaagcacttggctggctgagcaaattcatcctctggaaatattctctctcagccacagtgacattgaccctcttggttttctcctgtctctggccatttcttccagtttccctatttcagagtcttctcctctctctgatctctgtgctgtttcctcaggactcagtcctgggctctcttctattctggtctctttatttttttatttttgtattttttcgagatggagttttgctcttgttgcccaggctggagtacaatggtgcgatctcagctcagtgcaacctccgccacccgggttcaggcaattctcttgcatcagcctcgcgagtagttggaattataggcatgtgccaccacacccagctgatttttgcatttttagtagagacaggttttcaccatgttggcgaggctggtatccaactcttgacctcaggtgatccactcgccccttggctcccaaagtgctggaattacaggcattagccaccatgcctggcctattctggtctctttaactctctcctctttatttctcttctctctctgtacacttttcctgggtggtctcatccattcctttgctttttcataccatttatttgttaatgattcccacatttatttatgcacttggagagctcacaggaatctcagaaactgatgaggtacaattctgaaccctcagtctcttccctttaaacctttctttttctctactttaatttttctaaagagtgtcttgctatgttgcccaggctggtctccaactcaagtgatcctcctgccgcagtctcccgaagtgctgggattactgacatgagccaccacactcagccctttaaacctttccctggcctttcccatagctggtgaaggacacctccatccattccacgcagttgctcaaagcagaaattttcagtgcaagtcttgatgctgcgccgtcccccactccctacatcagaacgcatccctcatctggactccagcggtggcttcttgatgctgcgcggtcccccactccctacatcagaatgcatcccgcatccagactccagcggtggtgctctacctgcacgctgttgccaagtccaagctaccatactcctgcctgagctatgacaacagcctcctcactgatctcccctttcttccctttgcctcctccagctcatttttcacagtgtagaatgacattttgtttgtttgttttgttttgtttgagatggagtctcgctctgttgcccagggtggagtgcagcggtgcgatctcggctcactgcaacctccacctcccgggttcaagcggattctcgtgcctcagcctcctgagtagctgggattacaggcatgcaccaccatgcccggataatttttgtatttttagtagagatggggtttcactatgttggccaggctggtctcgaacacctgacctcgtggtccacccgcctcggcctcccaaagcactgggattacaggcgtgagccacccggcctggcctagaatgacttttaaaagatcaaattaaatcaggtcactcctttgcttacaacgcagtgcgtttagaggtacaccccatgtctccacagggcatacagcatccgatttaatctggatccattccggcgccttcctctcccagtcacccagagggccccaaccccggcggccctttcttcctcaaatgtcctcggctctataccgtgcctgggtcttttctctttctctctgcctggaagattccttctttccccttttgtcttgcccactcctgtttacccttcaagtttcaagttcatgtcactgtctcagagaggttttcctgtgctcgccctgtttctctcaggaagccttgctcttttccatcatgcctctaatcacagcttataatcggatatttatttctgtgtctacagtcttgccctgccagactgtatgccccatgtgggcaggcgctcatgattgtttctgattgtttcacgcatgctgctaacccagagcctgggcccaaagctagttagtactcaataaacaatgcattgaatgagtggctgtcactgtgtctgttcagccagctgccaaggcagaggggagtagagcagagccgccccaaataaaagacctcatgtgatcagagtccagctcctcacctggccttggaagaaggatgcaagaagccacctctgtcctcacccaactcaaggatggcagggaatcaaagaattcctcaaaagccccaggcgaatgtcctctcatccatcttccatgacctgtacctgagctctcagacagcagcaagccctctctccattcctagtttatcaccatttggttcctggaactgggaaaaaacagcaaccataagctgtgcctggatggaagaagacaacctctagggtcctgtctaactctgcaggtgattcagtgccttacccaatccctgaagatcttttaggtcccaactgcgcaggggacctccaacacaggcagacgcaaacagcctctggcctggacttgctgtgatctctgatttggcaaaatgaaccagcaatagtcttgc

SEQ ID NO: 114830 - DNA, 3986 bp, Homo sapiens
  Payload ID: 2432
  Gene Symbol: CECR1
  Gene Name: cat eye syndrome chromosome region, candidate 1
  Uniprot ID: Q9NZK5
  ENST ID: ENST00000399839
  CDS Start-End: 272-1807
attcttcccgaatggcctcacgtgtgctccctatcatcacgccttttcagctaggcaacgctcagagtcacacctgagtggaggccgacgcccctttggaggcgactccagccataaaaagtcctgcttggagctggttttagccacagagggccaataaatggccccttctgaatgaggtgcccctgcacctctgcagagcctgctgccagcctccaggatctaactgggctctgattcaccgctcccaaccccacatccaggcatcccgatgttggtggatggcccatctgagcggccagccctgtgcttcttgctgttggctgtggcaatgtctttcttcggctcagctctatccatagatgaaacacgggcgcatctgttgttgaaagaaaagatgatgcggctgggggggcggctggtgctgaacaccaaggaggagctggccaatgagaggctcatgacgctcaaaatcgctgagatgaaggaggccatgaggaccctgatattcccacccagcatgcactttttccaggccaagcatctcattgagagaagtcaagtgtttaatattctaaggatgatgccaaaaggggctgccttgcacctccatgacattggcatcgtgactatggactggctggtgaggaatgtcacctacaggcctcactgccacatctgtttcaccccaagggggatcatgcagttcagatttgctcacccaactccccgtccatcagaaaaatgttccaagtggattctgctggaggattatcggaagcgggtgcagaacgtcactgagtttgatgacagcttgctgaggaatttcactctggtgacccagcacccggaggtgatttacacaaaccaaaatgttgtctggtcgaaatttgaaaccatcttcttcaccatctctggtctcatccattacgcaccagtgttcagagactatgtcttccggagcatgcaggagttctacgaggacaacgtgctctacatggagatcagagccaggctgctgccggtgtatgagctcagtggagagcaccatgacgaagagtggtcagtgaagacttaccaggaagtagctcagaagtttgtggaaactcaccctgagtttattggaatcaaaatcatttattcggatcacagatccaaagatgtggctgtcatcgcagaatccatccgaatggccatggggctccgaatcaagttccccacggtggtggcagggtttgacctggtggggcatgaggacactggccactccttgcatgactacaaggaagctctgatgatccccgccaaggatggcgttaagctgccttacttcttccacgccggagaaacagactggcagggtacttccatagacaggaacattctggatgctctgatgctgaacactaccagaatcggccatggatttgctttgagcaaacaccccgcagtcaggacttactcctggaaaaaggacatccccatagaagtctgtcccatctctaaccaggtgctgaaactggtgtctgacttgaggaaccaccctgtagccactctgatggccactgggcaccccatggtgatcagctctgatgacccagctatgtttggtgccaaaggcttgtcctatgatttctatgaggtcttcatgggcattggggggatgaaggctgacctgaggaccctcaaacagctggccatgaactctatcaagtacagtaccctgttggagagtgagaaaaatactttcatggaaatctggaagaagagatgggataagttcatagcagatgtggctacaaagtgaggagaagctagccagccctctacaagctgtcttcttgcacacgctgtcacttcctctcactcgttcttgaatcagctccatgtgcccatgaaatcaatggcctctgtatggagcgaccctgtgagaagcacttggctggctgagcaaattcatcctctggaaatattctctctcagccacagtgacattgaccctcttggttttctcctgtctctggccatttcttccagtttccctatttcagagtcttctcctctctctgatctctgtgctgtttcctcaggactcagtcctgggctctcttctattctggtctctttatttttttatttttgtattttttcgagatggagttttgctcttgttgcccaggctggagtacaatggtgcgatctcagctcagtgcaacctccgccacccgggttcaggcaattctcttgcatcagcctcgcgagtagttggaattataggcatgtgccaccacacccagctgatttttgcatttttagtagagacaggttttcaccatgttggcgaggctggtatccaactcttgacctcaggtgatccactcgccccttggctcccaaagtgctggaattacaggcattagccaccatgcctggcctattctggtctctttaactctctcctctttatttctcttctctctctgtacacttttcctgggtggtctcatccattcctttgctttttcataccatttatttgttaatgattcccacatttatttatgcacttggagagctcacaggaatctcagaaactgatgaggtacaattctgaaccctcagtctcttccctttaaacctttctttttctctactttaatttttctaaagagtgtcttgctatgttgcccaggctggtctccaactcaagtgatcctcctgccgcagtctcccgaagtgctgggattactgacatgagccaccacactcagccctttaaacctttccctggcctttcccatagctggtgaaggacacctccatccattccacgcagttgctcaaagcagaaattttcagtgcaagtcttgatgctgcgccgtcccccactccctacatcagaacgcatccctcatctggactccagcggtggcttcttgatgctgcgcggtcccccactccctacatcagaatgcatcccgcatccagactccagcggtggtgctctacctgcacgctgttgccaagtccaagctaccatactcctgcctgagctatgacaacagcctcctcactgatctcccctttcttccctttgcctcctccagctcatttttcacagtgtagaatgacattttgtttgtttgttttgttttgtttgagatggagtctcgctctgttgcccagggtggagtgcagcggtgcgatctcggctcactgcaacctccacctcccgggttcaagcggattctcgtgcctcagcctcctgagtagctgggattacaggcatgcaccaccatgcccggataatttttgtatttttagtagagatggggtttcactatgttggccaggctggtctcgaacacctgacctcgtggtccacccgcctcggcctcccaaagcactgggattacaggcgtgagccacccggcctggcctagaatgacttttaaaagatcaaattaaatcaggtcactcctttgcttacaacgcagtgcgtttagaggtacaccccatgtctccacagggcatacagcatccgatttaatctggatccattccggcgccttcctctcccagtcacccagagggccccaaccccggcggccctttcttcctcaaatgtcctcggctctataccgtgcctgggtcttttctctttctctctgcctggaagattccttctttccccttttgtcttgcccactcctgtttacccttcaagtttcaagttcatgtcactgtctcagagaggttttcctgtgctcgccctgtttctctcaggaagccttgctcttttccatcatgcctctaatcacagcttataatcggatatttatttctgtgtctacagtcttgccctgccagactgtatgccccatgtgggcaggcgctcatgattgtttctgattgtttcacgcatgctgctaacccagagcctgggcccaaagctagttagtactcaataaacaatgcattgaatg

SEQ ID NO: 114831 - DNA, 581 bp, Homo sapiens
  Payload ID: 2432
  Gene Symbol: CECR1
  Gene Name: cat eye syndrome chromosome region, candidate 1
  ENST ID: ENST00000441548
  CDS Start-End: 175-581
ggttttagccacagagggccaataaatggccccttctgaatgaggtgcccctgcacctctgcagagcctgctgccagcctccaggatctaactgggctctgattcaccgctcccaaccccacatccagtcccgtggagtctccatctgagccctttcctagtccaggcatcccgatgttggtggatggcccatctgagcggccagccctgtgcttcttgctgttggctgtggcaatgtctttcttcggctcagctctatccatagatgaaacacgggcgcatctgttgttgaaagaaaagatgatgcggctgggggggcggctggtgctgaacaccaaggaggagctggccaatgagaggctcatgacgctcaaaatcgctgagatgaaggaggccatgaggaccctgatattcccacccagcatgcactttttccaggccaagcatctcattgagagaagtcaagtgtttaatattctaaggatgatgccaaaaggggctgccttgcacctccatgacattggcatcgtgactatggactggctggtgaggaatgtcacctacaggcctcactgccacat

SEQ ID NO: 114832 - DNA, 4278 bp, Homo sapiens
  Payload ID: 2432
  Gene Symbol: CECR1
  Gene Name: cat eye syndrome chromosome region, candidate 1
  ENST ID: ENST00000449907
  CDS Start-End: 176-1585
ggttttagccacagagggccaataaatggccccttctgaatgaggtgcccctgcacctctgcagagcctgctgccagcctccaggatctaactgggctctgattcaccgctcccaaccccacatccagctctatccatagatgaaacacgggcgcatctgttgttgaaagaaaagatgatgcggctgggggggcggctggtgctgaacaccaaggaggagctggccaatgagaggctcatgacgctcaaaatcgctgagatgaaggaggccatgaggaccctgatattcccacccagcatgcactttttccaggccaagcatctcattgagagaagtcaagtgtttaatattctaaggatgatgccaaaaggggctgccttgcacctccatgacattggcatcgtgactatggactggctggtgaggaatgtcacctacaggcctcactgccacatctgtttcaccccaagggggatcatgcagttcagatttgctcacccaactccccgtccatcagaaaaatgttccaagtggattctgctggaggattatcggaagcgggtgcagaacgtcactgagtttgatgacagcttgctgaggaatttcactctggtgacccagcacccggaggtgatttacacaaaccaaaatgttgtctggtcgaaatttgaaaccatcttcttcaccatctctggtctcatccattacgcaccagtgttcagagactatgtcttccggagcatgcaggagttctacgaggacaacgtgctctacatggagatcagagccaggctgctgccggtgtatgagctcagtggagagcaccatgacgaagagtggtcagtgaagacttaccaggaagtagctcagaagtttgtggaaactcaccctgagtttattggaatcaaaatcatttattcggatcacagatccaaagatgtggctgtcatcgcagaatccatccgaatggccatggggctccgaatcaagttccccacggtggtggcagggtttgacctggtggggcatgaggacactggccactccttgcatgactacaaggaagctctgatgatccccgccaaggatggcgttaagctgccttacttcttccacgccggagaaacagactggcagggtacttccatagacaggaacattctggatgctctgatgctgaacactaccagaatcggccatggatttgctttgagcaaacaccccgcagtcaggacttactcctggaaaaaggacatccccatagaagtctgtcccatctctaaccaggtgctgaaactggtgtctgacttgaggaaccaccctgtagccactctgatggccactgggcaccccatggtgatcagctctgatgacccagctatgtttggtgccaaaggcttgtcctatgatttctatgaggtcttcatgggcattggggggatgaaggctgacctgaggaccctcaaacagctggccatgaactctatcaagtacagtaccctgttggagagtgagaaaaatactttcatggaaatctggaagaagagatgggataagttcatagcagatgtggctacaaagtgaggagaagctagccagccctctacaagctgtcttcttgcacacgctgtcacttcctctcactcgttcttgaatcagctccatgtgcccatgaaatcaatggcctctgtatggagcgaccctgtgagaagcacttggctggctgagcaaattcatcctctggaaatattctctctcagccacagtgacattgaccctcttggttttctcctgtctctggccatttcttccagtttccctatttcagagtcttctcctctctctgatctctgtgctgtttcctcaggactcagtcctgggctctcttctattctggtctctttatttttttatttttgtattttttcgagatggagttttgctcttgttgcccaggctggagtacaatggtgcgatctcagctcagtgcaacctccgccacccgggttcaggcaattctcttgcatcagcctcgcgagtagttggaattataggcatgtgccaccacacccagctgatttttgcatttttagtagagacaggttttcaccatgttggcgaggctggtatccaactcttgacctcaggtgatccactcgccccttggctcccaaagtgctggaattacaggcattagccaccatgcctggcctattctggtctctttaactctctcctctttatttctcttctctctctgtacacttttcctgggtggtctcatccattcctttgctttttcataccatttatttgttaatgattcccacatttatttatgcacttggagagctcacaggaatctcagaaactgatgaggtacaattctgaaccctcagtctcttccctttaaacctttctttttctctactttaatttttctaaagagtgtcttgctatgttgcccaggctggtctccaactcaagtgatcctcctgccgcagtctcccgaagtgctgggattactgacatgagccaccacactcagccctttaaacctttccctggcctttcccatagctggtgaaggacacctccatccattccacgcagttgctcaaagcagaaattttcagtgcaagtcttgatgctgcgccgtcccccactccctacatcagaacgcatccctcatctggactccagcggtggcttcttgatgctgcgcggtcccccactccctacatcagaatgcatcccgcatccagactccagcggtggtgctctacctgcacgctgttgccaagtccaagctaccatactcctgcctgagctatgacaacagcctcctcactgatctcccctttcttccctttgcctcctccagctcatttttcacagtgtagaatgacattttgtttgtttgttttgttttgtttgagatggagtctcgctctgttgcccagggtggagtgcagcggtgcgatctcggctcactgcaacctccacctcccgggttcaagcggattctcgtgcctcagcctcctgagtagctgggattacaggcatgcaccaccatgcccggataatttttgtatttttagtagagatggggtttcactatgttggccaggctggtctcgaacacctgacctcgtggtccacccgcctcggcctcccaaagcactgggattacaggcgtgagccacccggcctggcctagaatgacttttaaaagatcaaattaaatcaggtcactcctttgcttacaacgcagtgcgtttagaggtacaccccatgtctccacagggcatacagcatccgatttaatctggatccattccggcgccttcctctcccagtcacccagagggccccaaccccggcggccctttcttcctcaaatgtcctcggctctataccgtgcctgggtcttttctctttctctctgcctggaagattccttctttccccttttgtcttgcccactcctgtttacccttcaagtttcaagttcatgtcactgtctcagagaggttttcctgtgctcgccctgtttctctcaggaagccttgctcttttccatcatgcctctaatcacagcttataatcggatatttatttctgtgtctacagtcttgccctgccagactgtatgccccatgtgggcaggcgctcatgattgtttctgattgtttcacgcatgctgctaacccagagcctgggcccaaagctagttagtactcaataaacaatgcattgaatgagtggctgtcactgtgtctgttcagccagctgccaaggcagaggggagtagagcagagccgccccaaataaaagacctcatgtgatcagagtccagctcctcacctggccttggaagaaggatgcaagaagccacctctgtcctcacccaactcaaggatggcagggaatcaaagaattcctcaaaagccccaggcgaatgtcctctcatccatcttccatgacctgtacctgagctctcagacagcagcaagccctctctccattcctagtttatcaccatttggttcctggaactgggaaaaaacagcaaccataagctgtgcctggatggaagaagacaacctctagggtcctgtctaactctgcaggtgattcagtgccttacccaatccctgaagatcttttaggtcccaactgcgcaggggacctccaacacaggcagacgcaaacagcctctggcctggacttgctgtgatctctgatttggcaaaatgaaccagcaatagtcttgc

SEQ ID NO: 114833 - DNA, 549 bp, Homo sapiens
  Payload ID: 2432
  Gene Symbol: CECR1
  Gene Name: cat eye syndrome chromosome region, candidate 1
  ENST ID: ENST00000543038
  CDS Start-End: 94-549
agttggtgagcttttccggtgctctgcacagatgctggggcgctgagcaaacagccctcagtttctggagctgttccgagtccaggcatcccgatgttggtggatggcccatctgagcggccagccctgtgcttcttgctgttggctgtggcaatgtctttcttcggctcagctctatccatagatgaaacacgggcgcatctgttgttgaaagaaaagatgatgcggctgggggggcggctggtgctgaacaccaaggaggagctggccaatgagaggctcatgacgctcaaaatcgctgagatgaaggaggccatgaggaccctgatattcccacccagcatgcactttttccaggccaagcatctcattgagagaagtcaagtgtttaatattctaaggatgatgccaaaaggggctgccttgcacctccatgacattggcatcgtgactatggactggctggtgaggaatgtcacctacaggcctcactgccacatctgtttcaccccaagggggatcatgcagttcagatttgctcacccaact

SEQ ID NO: 114834 - DNA, 4137 bp, Homo sapiens
  Payload ID: 2432
  Gene Symbol: CECR1
  Gene Name: cat eye syndrome chromosome region, candidate 1
  ENST ID: ENST00000610390
  CDS Start-End: 269-1444
aaactcagatgcacacagcaagcatgcatgtaagccacacacttgccactctggctgcctcagcactgcagagcccctctccccggcctctagttggatccctggtgcacactggagggaaataaaacctaccccaacaggaagtgaaacagttggtgagcttttccggtgctctgcacagatgctggggcgctgagcaaacagccctcagtttctggagctgttccgaggggctgccttgcacctccatgacattggcatcgtgactatggactggctggtgaggaatgtcacctacaggcctcactgccacatctgtttcaccccaagggggatcatgcagttcagatttgctcacccaactccccgtccatcagaaaaatgttccaagtggattctgctggaggattatcggaagcgggtgcagaacgtcactgagtttgatgacagcttgctgaggaatttcactctggtgacccagcacccggaggtgatttacacaaaccaaaatgttgtctggtcgaaatttgaaaccatcttcttcaccatctctggtctcatccattacgcaccagtgttcagagactatgtcttccggagcatgcaggagttctacgaggacaacgtgctctacatggagatcagagccaggctgctgccggtgtatgagctcagtggagagcaccatgacgaagagtggtcagtgaagacttaccaggaagtagctcagaagtttgtggaaactcaccctgagtttattggaatcaaaatcatttattcggatcacagatccaaagatgtggctgtcatcgcagaatccatccgaatggccatggggctccgaatcaagttccccacggtggtggcagggtttgacctggtggggcatgaggacactggccactccttgcatgactacaaggaagctctgatgatccccgccaaggatggcgttaagctgccttacttcttccacgccggagaaacagactggcagggtacttccatagacaggaacattctggatgctctgatgctgaacactaccagaatcggccatggatttgctttgagcaaacaccccgcagtcaggacttactcctggaaaaaggacatccccatagaagtctgtcccatctctaaccaggtgctgaaactggtgtctgacttgaggaaccaccctgtagccactctgatggccactgggcaccccatggtgatcagctctgatgacccagctatgtttggtgccaaaggcttgtcctatgatttctatgaggtcttcatgggcattggggggatgaaggctgacctgaggaccctcaaacagctggccatgaactctatcaagtacagtaccctgttggagagtgagaaaaatactttcatggaaatctggaagaagagatgggataagttcatagcagatgtggctacaaagtgaggagaagctagccagccctctacaagctgtcttcttgcacacgctgtcacttcctctcactcgttcttgaatcagctccatgtgcccatgaaatcaatggcctctgtatggagcgaccctgtgagaagcacttggctggctgagcaaattcatcctctggaaatattctctctcagccacagtgacattgaccctcttggttttctcctgtctctggccatttcttccagtttccctatttcagagtcttctcctctctctgatctctgtgctgtttcctcaggactcagtcctgggctctcttctattctggtctctttatttttttatttttgtattttttcgagatggagttttgctcttgttgcccaggctggagtacaatggtgcgatctcagctcagtgcaacctccgccacccgggttcaggcaattctcttgcatcagcctcgcgagtagttggaattataggcatgtgccaccacacccagctgatttttgcatttttagtagagacaggttttcaccatgttggcgaggctggtatccaactcttgacctcaggtgatccactcgccccttggctcccaaagtgctggaattacaggcattagccaccatgcctggcctattctggtctctttaactctctcctctttatttctcttctctctctgtacacttttcctgggtggtctcatccattcctttgctttttcataccatttatttgttaatgattcccacatttatttatgcacttggagagctcacaggaatctcagaaactgatgaggtacaattctgaaccctcagtctcttccctttaaacctttctttttctctactttaatttttctaaagagtgtcttgctatgttgcccaggctggtctccaactcaagtgatcctcctgccgcagtctcccgaagtgctgggattactgacatgagccaccacactcagccctttaaacctttccctggcctttcccatagctggtgaaggacacctccatccattccacgcagttgctcaaagcagaaattttcagtgcaagtcttgatgctgcgccgtcccccactccctacatcagaacgcatccctcatctggactccagcggtggcttcttgatgctgcgcggtcccccactccctacatcagaatgcatcccgcatccagactccagcggtggtgctctacctgcacgctgttgccaagtccaagctaccatactcctgcctgagctatgacaacagcctcctcactgatctcccctttcttccctttgcctcctccagctcatttttcacagtgtagaatgacattttgtttgtttgttttgttttgtttgagatggagtctcgctctgttgcccagggtggagtgcagcggtgcgatctcggctcactgcaacctccacctcccgggttcaagcggattctcgtgcctcagcctcctgagtagctgggattacaggcatgcaccaccatgcccggataatttttgtatttttagtagagatggggtttcactatgttggccaggctggtctcgaacacctgacctcgtggtccacccgcctcggcctcccaaagcactgggattacaggcgtgagccacccggcctggcctagaatgacttttaaaagatcaaattaaatcaggtcactcctttgcttacaacgcagtgcgtttagaggtacaccccatgtctccacagggcatacagcatccgatttaatctggatccattccggcgccttcctctcccagtcacccagagggccccaaccccggcggccctttcttcctcaaatgtcctcggctctataccgtgcctgggtcttttctctttctctctgcctggaagattccttctttccccttttgtcttgcccactcctgtttacccttcaagtttcaagttcatgtcactgtctcagagaggttttcctgtgctcgccctgtttctctcaggaagccttgctcttttccatcatgcctctaatcacagcttataatcggatatttatttctgtgtctacagtcttgccctgccagactgtatgccccatgtgggcaggcgctcatgattgtttctgattgtttcacgcatgctgctaacccagagcctgggcccaaagctagttagtactcaataaacaatgcattgaatgagtggctgtcactgtgtctgttcagccagctgccaaggcagaggggagtagagcagagccgccccaaataaaagacctcatgtgatcagagtccagctcctcacctggccttggaagaaggatgcaagaagccacctctgtcctcacccaactcaaggatggcagggaatcaaagaattcctcaaaagccccaggcgaatgtcctctcatccatcttccatgacctgtacctgagctctcagacagcagcaagccctctctccattcctagtttatcaccatttggttcctggaactgggaaaaaacagcaaccataagctgtgcctggatggaagaagacaacctctagggtcctgtctaactctgcaggtgattcagtgccttacccaatccctgaagatcttttaggtcccaactgcgcaggggacctccaacacaggcagacgcaaacagcctctggcctggacttgctgtgatctctgatttggcaaaatgaaccagcaatagtcttgc

SEQ ID NO: 114835 - DNA, 4783 bp, Homo sapiens
  Payload ID: 2433
  Gene Symbol: CECR2
  Gene Name: cat eye syndrome chromosome region, candidate 2
  ENST ID: ENST00000262608
  CDS Start-End: 386-4291
cctgcccgacttcgagatcgaggagttagaagccgctcttcacagagatgacgtggagtttatcagtgacctgattgcctgcctgcttcagggctgctatcaacgaagagatatcacgcctcagacattccacagctacctagaggacatcatcaactaccgctgggagctcgaagaagggaagcccaaccctctgagggaagccagtttccaggacctgcctcttcgcacacgggtggagatcctgcaccgactctgtgattaccggctggatgcagacgatgtcttcgatcttctaaagggcctggatgcagacagtctccgtgtggagccattgggtgaagacaattctggggcactatattggtatttctatggaacacgaatgtacaaagaggacccggtgcaaggaaaatccaatggagaactctctttgagcagggaaagtgaaggacaaaaaaatgtctcaagtattcctggaaaaacgggaaaaagaagaggaagacccccaaaacggaagaaactgcaggaggagattctgttgagtgaaaagcaggaagaaaattccttggcatccgagccacagacaagacatgggtcccaagggccaggccaaggtacttggtggctcctgtgccagacagaagaggaatggagacaggtcaccgagagttttcgcgagaggacctcccttcgagaacggcagctctacaagctcctcagtgaggacttcctgcctgagatctgcaacatgatcgcccagaagggaaaacgtccacagcgcacaaaggcagagttgcatcctaggtggatgtctgaccacctgtccatcaaacccgtcaagcaagaggagactcctgtgctgaccagaatagaaaaacaaaagcgcaaagaggaggaagaagagcgtcagattcttctagcagtgcagaagaaggagcaggagcagatgctaaaggaagagaggaaacgcgagttggaggagaaggtcaaggcagtggaagatcgagcgaagaggagaaagctcagggaagaaagggcatggctgctggctcaaggaaaggagctccctccagaactttcccatctggaccccaattcccccatgagagaggaaaaaaagactaaagacctctttgagttggatgatgatttcactgctatgtataaagttctagacgtggtaaaggctcacaaggattcctggcccttcttggaacctgtggatgaatcttatgcccctaactattatcagattattaaggcccccatggatatttccagcatggagaagaaactgaatggaggtttatactgtaccaaggaggaatttgtaaatgacatgaagaccatgttcaggaattgtcgaaagtataatggggaaagtagtgagtataccaagatgtctgataatttagagaggtgtttccatcgggcaatgatgaaacattttcctggagaagatggagacacagatgaagaattttggattcgagaggatgaaaagcgggagaaaagacggagtcgggctgggcgaagtggtgggagccatgtttggacccgctccagggacccagaagggtccagcaggaaacagcagcccatggagaatggaggaaagtcgttgccccccacacgccgagcgccctcttctggggacgatcagagcagcagctccacacagcccccgcgggaggtgggcacttccaatggccgaggtttttctcatcccctgcattgtggtgggacacccagccaggcaccctttttaaaccagatgaggccagcagtaccaggaacatttggccctctgcgaggatcagatcctgccaccttgtatggctcctctggagtcccggagccacaccccggggagcctgtgcagcagcgtcagcctttcaccatgcagcctccagttggaattaacagcctccgaggacccaggctaggcacaccagaggagaagcaaatgtgcggggggctgacacacctttctaacatgggcccacaccctggatccttgcagcttgggcagataagtggcccaagtcaggatggaagcatgtatgctccagctcagttccagccaggattcattcctccccggcatgggggggctccagcccggccaccagactttcctgaaagctcagaaattcctcccagccatatgtatcgatcgtacaagtacctgaatcgagtacactctgccgtctggaatgggaaccatggtgctacgaaccaaggacccttgggcccagatgagaagccccacctggggccaggaccctctcaccagcctcgcactctcggtcacgtgatggattcccgagtcatgagaccacctgtcccccccaaccagtggactgaacaatcaggcttcctacctcatggagttccttcctcagggtacatgcgaccgccctgcaagtctgccggacatcggttacagccacctccagtgccagcacccagttctttgtttggagcacctgcccaggctcttcggggggtgcagggaggggactccatgatggacagcccagagatgattgcgatgcagcagctctcctcccgcgtctgccccccaggtgtgccttaccacccccaccagcctgcacacccccgtttacctggcccttttccgcaggtagctcacccaatgtcagtcactgtgtcagcccccaagcctgccctgggcaaccctgggagggcaccggagaacagtgaagcacaagagcctgagaatgaccaagcagagccgttgcctggccttgaagagaaaccaccaggtgttggtacttcagagggggtctacctcacacaactacctcaccccacacctcccctgcagactgactgcaccaggcagagctcaccacaagaaagggaaacagtgggcccggagctcaaaagcagctcctccgaatctgcggacaactgtaaagcaatgaagggcaagaatccctggccctcggatagcagctaccccggcccagccgcccaagggtgcgtgagagacctctccacggtggcagacaggggcgctctatccgagaacggagtcattggggaagcatctccttgtggatcggaggggaagggccttggtagcagtggttccgaaaagctgctctgccccagaggcagaacgttgcaggaaaccatgccatgcacgggacagaacgcagcgacaccgcccagcacagaccccggtttgacgggaggcactgtgagccagtttcccccgctgtatatgcctggcctagagtacccgaattcagctgcccattaccacatcagtccaggcctgcagggtgtgggccctgtgatgggagggaagtccccagcatcccatccccagcattttcccccaaggggctttcagtctaaccacccacattctggaggctttccccggtatcgccccccacaaggaatgaggtattcctaccacccaccgccacagccttcctaccaccactatcagcgaactccttactatgcctgtccacagagcttttctgactggcagagacctctccatccccagggaagcccaagcggacccccagccagtcagcctcccccaccaaggtccctcttctcagataagaatgccatggccagtctgcaaggctgtgagacactgaatgctgccttaacttctccaacccgtatggatgcagtggctgctaaagtcccaaatgacgggcagaatcctggtccagaggaagagaagctggatgaatctatggagaggccagagagtcccaaagaatttttagacctggacaaccataacgcagctaccaagcggcagagctcgttgtcagccagcgagtatctctatggaactcctccgcctctgagttcaggaatgggatttggttcatctgcatttccaccccacagtgtgatgctgcagacggggcctccctatacccctcagcggccggccagtcactttcagcccagggcttactcttcccctgtggctgccctcccacctcaccacccaggggccacccagcccaacggcctctctcaggagggtcccatctatcgctgccaggaagaaggcctgggtcactttcaagctgtgatgatggaacaaattggcactagaagtggaataagaggacctttccaggaaatgtacagaccatcaggaatgcagatgcacccggtccagtcgcaggcctcgttcccaaagacccccacagcagcaacatcacaggaggaggtgccgcctcataagcctccaacacttcccctggatcagagctagtccaaggaggaaatgagccccaagcaatggaaagctgcacacgaagactggaatgtggagaactggggagtgccctgtcagctctattcccatcacctgctccaccccttcacggcgacccactcgtgccatacttgagctggagccagtcacgggccctaaaaggacactccttagatgactgacacacagattgcaaaggtcctcggccagggatctcttgcacagctgatgtagacagtcaggcaaaactaatgaacgtggagttaatgatgacttttccaaatcctgagacacttttcagggaaaatcactttaaacttgggggagggggtatactcaagaatggagtggtgcttttaaactttgatgagcagctaaactcaggtatatatttggggaagggactactcttagtattaatggttttggagctgggtccagtttacagaattttcatgttgccttttaaaataatttttgttggtggtg

SEQ ID NO: 114836 - DNA, 6178 bp, Homo sapiens
  Payload ID: 2433
  Gene Symbol: CECR2
  Gene Name: cat eye syndrome chromosome region, candidate 2
  Uniprot ID: Q9BXF3
  ENST ID: ENST00000342247
  CDS Start-End: 419-4873
cgggggttgttgttgtggcgcgggcagccccgccccctcctcgtgggcggcccctcccccaggccccgcgtccggcccctccgcccctagccccatctgtttctccggcggggactcgattatattgtaggggactgggggcggccgccgccgcagccgcgggatggggcgagcgcgcggaccccgcgggcagccgcagccgcagccgcctcagtagttcgggcccccgcgccgccgccccccgcccggcgcccgccctcggctcctgcactcgccgagcggcggcagcagcgggaggagcgccccgccgcccccgccgaggaccgcgcggaggctgcggcgctgccgcggcgggagtcccaggtcggcgggcagagcgcgggcagcgaggggccgccgcctgtgccgcagcggggagatgtgcccagaggagggcggcgcggccgggctgggcgagctccgctcctggtgggaggtcccggccatcgcgcacttctgctcgctctttcgcaccgcgttccgcctgcccgacttcgagatcgaggagttagaagccgctcttcacagagatgacgtggagtttatcagtgacctgattgcctgcctgcttcagggctgctatcaacgaagagatatcacgcctcagacattccacagctacctagaggacatcatcaactaccgctgggagctcgaagaagggaagcccaaccctctgagggaagccagtttccaggacctgcctcttcgcacacgggtggagatcctgcaccgactctgtgattaccggctggatgcagacgatgtcttcgatcttctaaagggcctggatgcagacagtctccgtgtggagccattgggtgaagacaattctggggcactatattggtatttctatggaacacgaatgtacaaagaggacccggtgcaaggaaaatccaatggagaactctctttgagcagggaaagtgaaggacaaaaaaatgtctcaagtattcctggaaaaacgggaaaaagaagaggaagacccccaaaacggaagaaactgcaggaggagattctgttgagtgaaaagcaggaagaaaattccttggcatccgagccacagacaagacatgggtcccaagggccaggccaaggtacttggtggctcctgtgccagacagaagaggaatggagacaggtcaccgagagttttcgcgagaggacctcccttcgagaacggcagctctacaagctcctcagtgaggacttcctgcctgagatctgcaacatgatcgcccagaagggaaaacgtccacagcgcacaaaggcagagttgcatcctaggtggatgtctgaccacctgtccatcaaacccgtcaagcaagaggagactcctgtgctgaccagaatagaaaaacaaaagcgcaaagaggaggaagaagagcgtcagattcttctagcagtgcagaagaaggagcaggagcagatgctaaaggaagagaggaaacgcgagttggaggagaaggtcaaggcagtggaaggtatgtgcagtgtccgcgtggtctggagaggtgcatgtctgtcgaccagccgtcctgtggatcgagcgaagaggagaaagctcagggaagaaagggcatggctgctggctcaaggaaaggagctccctccagaactttcccatctggaccccaattcccccatgagagaggaaaaaaagactaaagacctctttgagttggatgatgatttcactgctatgtataaagttctagacgtggtaaaggctcacaaggattcctggcccttcttggaacctgtggatgaatcttatgcccctaactattatcagattattaaggcccccatggatatttccagcatggagaagaaactgaatggaggtttatactgtaccaaggaggaatttgtaaatgacatgaagaccatgttcaggaattgtcgaaagtataatggggaaagtagtgagtataccaagatgtctgataatttagagaggtgtttccatcgggcaatgatgaaacattttcctggagaagatggagacacagatgaagaattttggattcgagaggatgaaaagcgggagaaaagacggagtcgggctgggcgaagtggtgggagccatgtttggacccgctccagggacccagaagggtccagcaggaaacagcagcccatggagaatggaggaaagtcgttgccccccacacgccgagcgccctcttctggggacgatcagagcagcagctccacacagcccccgcgggaggtgggcacttccaatggccgaggtttttctcatcccctgcattgtggtgggacacccagccaggcaccctttttaaaccagatgaggccagcagtaccaggaacatttggccctctgcgaggatcagatcctgccaccttgtatggctcctctggagtcccggagccacaccccggggagcctgtgcagcagcgtcagcctttcaccatgcagcctccagttggaattaacagcctccgaggacccaggctaggcacaccagaggagaagcaaatgtgcggggggctgacacacctttctaacatgggcccacaccctggatccttgcagcttgggcagataagtggcccaagtcaggatggaagcatgtatgctccagctcagttccagccaggattcattcctccccggcatgggggggctccagcccggccaccagactttcctgaaagctcagaaattcctcccagccatatgtatcgatcgtacaagtacctgaatcgagtacactctgccgtctggaatgggaaccatggtgctacgaaccaaggacccttgggcccagatgagaagccccacctggggccaggaccctctcaccagcctcgcactctcggtcacgtgatggattcccgagtcatgagaccacctgtcccccccaaccagtggactgaacaatcaggcttcctacctcatggagttccttcctcagggtacatgcgaccgccctgcaagtctgccggacatcggttacagccacctccagtgccagcacccagttctttgtttggagcacctgcccaggctcttcggggggtgcagggaggggactccatgatggacagcccagagatgattgcgatgcagcagctctcctcccgcgtctgccccccaggtgtgccttaccacccccaccagcctgcacacccccgtttacctggcccttttccgcaggtagctcacccaatgtcagtcactgtgtcagcccccaagcctgccctgggcaaccctgggagggcaccggagaacagtgaagcacaagagcctgagaatgaccaagcagagccgttgcctggccttgaagagaaaccaccaggtgttggtacttcagagggggtctacctcacacaactacctcaccccacacctcccctgcagactgactgcaccaggcagagctcaccacaagaaagggaaacagtgggcccggagctcaaaagcagctcctccgaatctgcggacaactgtaaagcaatgaagggcaagaatccctggccctcggatagcagctaccccggcccagccgcccaagggtgcgtgagagacctctccacggtggcagacaggggcgctctatccgagaacggagtcattggggaagcatctccttgtggatcggaggggaagggccttggtagcagtggttccgaaaagctgctctgccccagaggcagaacgttgcaggaaaccatgccatgcacgggacagaacgcagcgacaccgcccagcacagaccccggtttgacgggaggcactgtgagccagtttcccccgctgtatatgcctggcctagagtacccgaattcagctgcccattaccacatcagtccaggcctgcagggtgtgggccctgtgatgggagggaagtccccagcatcccatccccagcattttcccccaaggggctttcagtctaaccacccacattctggaggctttccccggtatcgccccccacaaggaatgaggtattcctaccacccaccgccacagccttcctaccaccactatcagcgaactccttactatgcctgtccacagagcttttctgactggcagagacctctccatccccagggaagcccaagcggacccccagccagtcagcctcccccaccaaggtccctcttctcagataagaatgccatggccagtctgcaaggctgtgagacactgaatgctgccttaacttctccaacccgtatggatgcagtggctgctaaagtcccaaatgacgggcagaatcctggtccagaggaagagaagctggatgaatctatggagaggccagagagtcccaaagaatttttagacctggacaaccataacgcagctaccaagcggcagagctcgttgtcagccagcgagtatctctatggaactcctccgcctctgagttcaggaatgggatttggttcatctgcatttccaccccacagtgtgatgctgcagacggggcctccctatacccctcagcggccggccagtcactttcagcccagggcttactcttcccctgtggctgccctcccacctcaccacccaggggccacccagcccaacggcctctctcaggagggtcccatctatcgctgccaggaagaaggcctgggtcactttcaagctgtgatgatggaacaaattggcactagaagtggaataagaggacctttccaggaaatgtacagaccatcaggaatgcagatgcacccggtccagtcgcaggcctcgttcccaaagacccccacagcagcaacatcacaggaggaggtgccgcctcataagcctccaacacttcccctggatcagagctagtccaaggaggaaatgagccccaagcaatggaaagctgcacacgaagactggaatgtggagaactggggagtgccctgtcagctctattcccatcacctgctccaccccttcacggcgacccactcgtgccatacttgagctggagccagtcacgggccctaaaaggacactccttagatgactgacacacagattgcaaaggtcctcggccagggatctcttgcacagctgatgtagacagtcaggcaaaactaatgaacgtggagttaatgatgacttttccaaatcctgagacacttttcagggaaaatcactttaaacttgggggagggggtatactcaagaatggagtggtgcttttaaactttgatgagcagctaaactcaggtatatatttggggaagggactactcttagtattaatggttttggagctgggtccagtttacagaattttcatgttgccttttaaaataatttttgttggtggtgaatgtattgtacataaagtgggaagggtgggtggggatgcggaagaaatgggggtcctaactggtgggcacacagcactggagtgatttttatctgtttacaatcatgtcacactgaatacttatgggagccggagatgagggtaggaaaggtttgatcttgtaatatgtcactgtgtttccttagtggccagccagccttcagaatagctaaaggccttccttccttccagtcagcctgagagagaacacctgtcccctaagcacctggtgtctccattggaggcagactgctctcaggagactactagaagcttcagcccggaagacaggctgctctctcatgctggtggcccaaattgagaaagtggtgtcccttcctgattttgccaccagccctaccgaatagttgtaaaccagtatcaggaattgggatcgctagagtgtttcacgtattagaagatgaatcgtcctcatcacagacctccctgtcaggactgtgatctagaaggcatcacacacagctttctggcacgaatcacattttgtggaagtgactactcaggtttgtatattttagtatcaataaagaattgcacaggtttgaataggaaaaatgtattctatagatttacagtttgaatttaggaatatttcagtatatatagtttttattcgttttaagtgaatcatagtaaaatcagtcatggtgatttaaaatagctatcaagaacaagttcttggaattatctgttgtatctgtgataggaaaccattttacagtattaaattactttattacagttgtagagtt

SEQ ID NO: 114837 - DNA, 2144 bp, Homo sapiens
  Payload ID: 2433
  Gene Symbol: CECR2
  Gene Name: cat eye syndrome chromosome region, candidate 2
  ENST ID: ENST00000355219
  CDS Start-End: 1-657
tcagataagaatgccatggccagtctgcaaggctgtgagacactgaatgctgccttaacttctccaacccgtatggatgcagtggctgctaaagtcccaaatgacgggcagaatcctggtccagaggaagagaagctggatgaatctatggagaggccagagagtcccaaagaatttttagacctggacaaccataacgcagctaccaagcggcagagctcgttgtcagccagcgagtatctctatggaactcctccgcctctgagttcaggaatgggatttggttcatctgcatttccaccccacagtgtgatgctgcagacggggcctccctatacccctcagcggccggccagtcactttcagcccagggcttactcttcccctgtggctgccctcccacctcaccacccaggggccacccagcccaacggcctctctcaggagggtcccatctatcgctgccaggaagaaggcctgggtcactttcaagctgtgatgatggaacaaattggcactagaagtggaataagaggacctttccaggaaatgtacagaccatcagggttcaagcgattctcctgcctcatcctcccaagtagctgggattacaggtgcccgccaccacacctggctgagttttgtatgatactataaacttaataaccacagtttgagagctgtaagcaagcctgtgtcaacattgctgccatgtggagacactctgaccaagaatgcagatgcacccggtccagtcgcaggcctcgttcccaaagacccccacagcagcaacatcacaggaggaggtgccgcctcataagcctccaacacttcccctggatcagagctagtccaaggaggaaatgagccccaagcaatggaaagctgcacacgaagactggaatgtggagaactggggagtgccctgtcagctctattcccatcacctgctccaccccttcacggcgacccactcgtgccatacttgagctggagccagtcacgggccctaaaaggacactccttagatgactgacacacagattgcaaaggtcctcggccagggatctcttgcacagctgatgtagacagtcaggcaaaactaatgaacgtggagttaatgatgacttttccaaatcctgagacacttttcagggaaaatcactttaaacttgggggagggggtatactcaagaatggagtggtgcttttaaactttgatgagcagctaaactcaggtatatatttggggaagggactactcttagtattaatggttttggagctgggtccagtttacagaattttcatgttgccttttaaaataatttttgttggtggtgaatgtattgtacataaagtgggaagggtgggtggggatgcggaagaaatgggggtcctaactggtgggcacacagcactggagtgatttttatctgtttacaatcatgtcacactgaatacttatgggagccggagatgagggtaggaaaggtttgatcttgtaatatgtcactgtgtttccttagtggccagccagccttcagaatagctaaaggccttccttccttccagtcagcctgagagagaacacctgtcccctaagcacctggtgtctccattggaggcagactgctctcaggagactactagaagcttcagcccggaagacaggctgctctctcatgctggtggcccaaattgagaaagtggtgtcccttcctgattttgccaccagccctaccgaatagttgtaaaccagtatcaggaattgggatcgctagagtgtttcacgtattagaagatgaatcgtcctcatcacagacctccctgtcaggactgtgatctagaaggcatcacacacagctttctggcacgaatcacattttgtggaagtgactactcaggtttgtatattttagtatcaataaagaattgcacaggtttgaataggaaaaatgtattctatagatttacagtttgaatttaggaatatttcagtatatatagtttttattcgttttaagtgaatcatagtaaaatcagtcatggtgatttaaaatagctatcaagaacaagttcttggaattatctgttgtatctgtgataggaaaccattttacagtattaaattactttattac

SEQ ID NO: 114838 - DNA, 4833 bp, Homo sapiens
  Payload ID: 2433
  Gene Symbol: CECR2
  Gene Name: cat eye syndrome chromosome region, candidate 2
  ENST ID: ENST00000400585
  CDS Start-End: 439-4341
aggaaaaaggatgaacaaatgcctgtgtggtttcacttatatagtactcagcttgacgccatgtgaaatgaagaggagttagaagccgctcttcacagagatgacgtggagtttatcagtgacctgattgcctgcctgcttcagggctgctatcaacgaagagatatcacgcctcagacattccacagctacctagaggacatcatcaactaccgctgggagctcgaagaagggaagcccaaccctctgagggaagccagtttccaggacctgcctcttcgcacacgggtggagatcctgcaccgactctgtgattaccggctggatgcagacgatgtcttcgatcttctaaagggcctggatgcagacagtctccgtgtggagccattgggtgaagacaattctggggcactatattggtatttctatggaacacgaatgtacaaagaggacccggtgcaaggaaaatccaatggagaactctctttgagcagggaaagtgaaggacaaaaaaatgtctcaagtattcctggaaaaacgggaaaaagaagaggaagacccccaaaacggaagaaactgcaggaggagattctgttgagtgaaaagcaggaagaaaattccttggcatccgagccacagacaagacatgggtcccaagggccaggccaaggtacttggtggctcctgtgccagacagaagaggaatggagacaggtcaccgagagttttcgcgagaggacctcccttcgagaacggcagctctacaagctcctcagtgaggacttcctgcctgagatctgcaacatgatcgcccagaagggaaaacgtccacagcgcacaaaggcagagttgcatcctaggtggatgtctgaccacctgtccatcaaacccgtcaagcaagaggagactcctgtgctgaccagaatagaaaaacaaaagcgcaaagaggaggaagaagagcgtcagattcttctagcagtgcagaagaaggagcaggagcagatgctaaaggaagagaggaaacgcgagttggaggagaaggtcaaggcagtggaagatcgagcgaagaggagaaagctcagggaagaaagggcatggctgctggctcaaggaaaggagctccctccagaactttcccatctggaccccaattcccccatgagagaggaaaaaaagactaaagacctctttgagttggatgatgatttcactgctatgtataaagttctagacgtggtaaaggctcacaaggattcctggcccttcttggaacctgtggatgaatcttatgcccctaactattatcagattattaaggcccccatggatatttccagcatggagaagaaactgaatggaggtttatactgtaccaaggaggaatttgtaaatgacatgaagaccatgttcaggaattgtcgaaagtataatggggaaagtagtgagtataccaagatgtctgataatttagagaggtgtttccatcgggcaatgatgaaacattttcctggagaagatggagacacagatgaagaattttggattcgagaggatgaaaagcgggagaaaagacggagtcgggctgggcgaagtggtgggagccatgtttggacccgctccagggacccagaagggtccagcaggaaacagcagcccatggagaatggaggaaagtcgttgccccccacacgccgagcgccctcttctggggacgatcagagcagcagctccacacagcccccgcgggaggtgggcacttccaatggccgaggtttttctcatcccctgcattgtggtgggacacccagccaggcaccctttttaaaccagatgaggccagcagtaccaggaacatttggccctctgcgaggatcagatcctgccaccttgtatggctcctctggagtcccggagccacaccccggggagcctgtgcagcagcgtcagcctttcaccatgcagcctccagttggaattaacagcctccgaggacccaggctaggcacaccagaggagaagcaaatgtgcggggggctgacacacctttctaacatgggcccacaccctggatccttgcagcttgggcagataagtggcccaagtcaggatggaagcatgtatgctccagctcagttccagccaggattcattcctccccggcatgggggggctccagcccggccaccagactttcctgaaagctcagaaattcctcccagccatatgtatcgatcgtacaagtacctgaatcgagtacactctgccgtctggaatgggaaccatggtgctacgaaccaaggacccttgggcccagatgagaagccccacctggggccaggaccctctcaccagcctcgcactctcggtcacgtgatggattcccgagtcatgagaccacctgtcccccccaaccagtggactgaacaatcaggcttcctacctcatggagttccttcctcagggtacatgcgaccgccctgcaagtctgccggacatcggttacagccacctccagtgccagcacccagttctttgtttggagcacctgcccaggctcttcggggggtgcagggaggggactccatgatggacagcccagagatgattgcgatgcagcagctctcctcccgcgtctgccccccaggtgtgccttaccacccccaccagcctgcacacccccgtttacctggcccttttccgcaggtagctcacccaatgtcagtcactgtgtcagcccccaagcctgccctgggcaaccctgggagggcaccggagaacagtgaagcacaagagcctgagaatgaccaagagccgttgcctggccttgaagagaaaccaccaggtgttggtacttcagagggggtctacctcacacaactacctcaccccacacctcccctgcagactgactgcaccaggcagagctcaccacaagaaagggaaacagtgggcccggagctcaaaagcagctcctccgaatctgcggacaactgtaaagcaatgaagggcaagaatccctggccctcggatagcagctaccccggcccagccgcccaagggtgcgtgagagacctctccacggtggcagacaggggcgctctatccgagaacggagtcattggggaagcatctccttgtggatcggaggggaagggccttggtagcagtggttccgaaaagctgctctgccccagaggcagaacgttgcaggaaaccatgccatgcacgggacagaacgcagcgacaccgcccagcacagaccccggtttgacgggaggcactgtgagccagtttcccccgctgtatatgcctggcctagagtacccgaattcagctgcccattaccacatcagtccaggcctgcagggtgtgggccctgtgatgggagggaagtccccagcatcccatccccagcattttcccccaaggggctttcagtctaaccacccacattctggaggctttccccggtatcgccccccacaaggaatgaggtattcctaccacccaccgccacagccttcctaccaccactatcagcgaactccttactatgcctgtccacagagcttttctgactggcagagacctctccatccccagggaagcccaagcggacccccagccagtcagcctcccccaccaaggtccctcttctcagataagaatgccatggccagtctgcaaggctgtgagacactgaatgctgccttaacttctccaacccgtatggatgcagtggctgctaaagtcccaaatgacgggcagaatcctggtccagaggaagagaagctggatgaatctatggagaggccagagagtcccaaagaatttttagacctggacaaccataacgcagctaccaagcggcagagctcgttgtcagccagcgagtatctctatggaactcctccgcctctgagttcaggaatgggatttggttcatctgcatttccaccccacagtgtgatgctgcagacggggcctccctatacccctcagcggccggccagtcactttcagcccagggcttactcttcccctgtggctgccctcccacctcaccacccaggggccacccagcccaacggcctctctcaggagggtcccatctatcgctgccaggaagaaggcctgggtcactttcaagctgtgatgatggaacaaattggcactagaagtggaataagaggacctttccaggaaatgtacagaccatcaggaatgcagatgcacccggtccagtcgcaggcctcgttcccaaagacccccacagcagcaacatcacaggaggaggtgccgcctcataagcctccaacacttcccctggatcagagctagtccaaggaggaaatgagccccaagcaatggaaagctgcacacgaagactggaatgtggagaactggggagtgccctgtcagctctattcccatcacctgctccaccccttcacggcgacccactcgtgccatacttgagctggagccagtcacgggccctaaaaggacactccttagatgactgacacacagattgcaaaggtcctcggccagggatctcttgcacagctgatgtagacagtcaggcaaaactaatgaacgtggagttaatgatgacttttccaaatcctgagacacttttcagggaaaatcactttaaacttgggggagggggtatactcaagaatggagtggtgcttttaaactttgatgagcagctaaactcaggtatatatttggggaagggactactcttagtattaatggttttggagctgggtccagtttacagaattttcatgttgccttttaaaataatttttgttggtggtg

SEQ ID NO: 114839 - DNA, 9645 bp, Homo sapiens
  Payload ID: 2433
  Gene Symbol: CECR2
  Gene Name: cat eye syndrome chromosome region, candidate 2
  ENST ID: ENST00000612582
  CDS Start-End: 8-4336
ctaacaaatgccattcaaaatacagtggttctttaaagctgttgcagatggtttatctcttgagaaggagttagaagccgctcttcacagagatgacgtggagtttatcagtgacctgattgcctgcctgcttcagggctgctatcaacgaagagatatcacgcctcagacattccacagctacctagaggacatcatcaactaccgctgggagctcgaagaagggaagcccaaccctctgagggaagccagtttccaggacctgcctcttcgcacacgggtggagatcctgcaccgactctgtgattaccggctggatgcagacgatgtcttcgatcttctaaagggcctggatgcagacagtctccgtgtggagccattgggtgaagacaattctggggcactatattggtatttctatggaacacgaatgtacaaagaggacccggtgcaaggaaaatccaatggagaactctctttgagcagggaaagtgaaggacaaaaaaatgtctcaagtattcctggaaaaacgggaaaaagaagaggaagacccccaaaacggaagaaactgcaggaggagattctgttgagtgaaaagcaggaagaaaattccttggcatccgagccacagacaagacatgggtcccaagggccaggccaaggtacttggtggctcctgtgccagacagaagaggaatggagacaggtcaccgagagttttcgcgagaggacctcccttcgagaacggcagctctacaagctcctcagtgaggacttcctgcctgagatctgcaacatgatcgcccagaagggaaaacgtccacagcgcacaaaggcagagttgcatcctaggtggatgtctgaccacctgtccatcaaacccgtcaagcaagaggagactcctgtgctgaccagaatagaaaaacaaaagcgcaaagaggaggaagaagagcgtcagattcttctagcagtgcagaagaaggagcaggagcagatgctaaaggaagagaggaaacgcgagttggaggagaaggtcaaggcagtggaagatcgagcgaagaggagaaagctcagggaagaaagggcatggctgctggctcaaggaaaggagctccctccagaactttcccatctggaccccaattcccccatgagagaggaaaaaaagactaaagacctctttgagttggatgatgatttcactgctatgtataaagttctagacgtggtaaaggctcacaaggattcctggcccttcttggaacctgtggatgaatcttatgcccctaactattatcagattattaaggcccccatggatatttccagcatggagaagaaactgaatggaggtttatactgtaccaaggaggaatttgtaaatgacatgaagaccatgttcaggaattgtcgaaagtataatggggaaagtagtgagtataccaagatgtctgataatttagagaggtgtttccatcgggcaatgatgaaacattttcctggagaagatggagacacagatgaagaattttggattcgagaggatgaaaagcgggagaaaagacggagtcgggctgggcgaagtggtgggagccatgtttggacccgctccagggacccagaagggtccagcaggaaacagcagcccatggagaatggaggaaagtcgttgccccccacacgccgagcgccctcttctggggacgatcagagcagcagctccacacagcccccgcgggaggtgggcacttccaatggccgaggtttttctcatcccctgcattgtggtgggacacccagccaggcaccctttttaaaccagatgaggccagcagtaccaggaacatttggccctctgcgaggatcagatcctgccaccttgtatggctcctctggagtcccggagccacaccccggggagcctgtgcagcagcgtcagcctttcaccatgcagcctccagttggaattaacagcctccgaggacccaggctaggcacaccagaggagaagcaaatgtgcggggggctgacacacctttctaacatgggcccacaccctggatccttgcagcttgggcagataagtggcccaagtcaggatggaagcatgtatgctccagctcagttccagccaggattcattcctccccggcatgggggggctccagcccggccaccagactttcctgaaagctcagaaattcctcccagccatatgtatcgatcgtacaagtacctgaatcgagtacactctgccgtctggaatgggaaccatggtgctacgaaccaaggacccttgggcccagatgagaagccccacctggggccaggaccctctcaccagcctcgcactctcggtcacgtgatggattcccgagtcatgagaccacctgtcccccccaaccagtggactgaacaatcaggcttcctacctcatggagttccttcctcagggtacatgcgaccgccctgcaagtctgccggacatcggttacagccacctccagtgccagcacccagttctttgtttggagcacctgcccaggctcttcggggggtgcagggaggggactccatgatggacagcccagagatgattgcgatgcagcagctctcctcccgcgtctgccccccaggtgtgccttaccacccccaccagcctgcacacccccgtttacctggcccttttccgcaggtagctcacccaatgtcagtcactgtgtcagcccccaagcctgccctgggcaaccctgggagggcaccggagaacagtgaagcacaagagcctgagaatgaccaagcagagccgttgcctggccttgaagagaaaccaccaggtgttggtacttcagagggggtctacctcacacaactacctcaccccacacctcccctgcagactgactgcaccaggcagagctcaccacaagaaagggaaacagtgggcccggagctcaaaagcagctcctccgaatctgcggacaactgtaaagcaatgaagggcaagaatccctggccctcggatagcagctaccccggcccagccgcccaagggtgcgtgagagacctctccacggtggcagacaggggcgctctatccgagaacggagtcattggggaagcatctccttgtggatcggaggggaagggccttggtagcagtggttccgaaaagctgctctgccccagaggcagaacgttgcaggaaaccatgccatgcacgggacagaacgcagcgacaccgcccagcacagaccccggtttgacgggaggcactgtgagccagtttcccccgctgtatatgcctggcctagagtacccgaattcagctgcccattaccacatcagtccaggcctgcagggtgtgggccctgtgatgggagggaagtccccagcatcccatccccagcattttcccccaaggggctttcagtctaaccacccacattctggaggctttccccggtatcgccccccacaaggaatgaggtattcctaccacccaccgccacagccttcctaccaccactatcagcgaactccttactatgcctgtccacagagcttttctgactggcagagacctctccatccccagggaagcccaagcggacccccagccagtcagcctcccccaccaaggtccctcttctcagataagaatgccatggccagtctgcaaggctgtgagacactgaatgctgccttaacttctccaacccgtatggatgcagtggctgctaaagtcccaaatgacgggcagaatcctggtccagaggaagagaagctggatgaatctatggagaggccagagagtcccaaagaatttttagacctggacaaccataacgcagctaccaagcggcagagctcgttgtcagccagcgagtatctctatggaactcctccgcctctgagttcaggaatgggatttggttcatctgcatttccaccccacagtgtgatgctgcagacggggcctccctatacccctcagcggccggccagtcactttcagcccagggcttactcttcccctgtggctgccctcccacctcaccacccaggggccacccagcccaacggcctctctcaggagggtcccatctatcgctgccaggaagaaggcctgggtcactttcaagctgtgatgatggaacaaattggcactagaagtggaataagaggacctttccaggaaatgtacagaccatcaggaatgcagatgcacccggtccagtcgcaggcctcgttcccaaagacccccacagcagcaacatcacaggaggaggtgccgcctcataagcctccaacacttcccctggatcagagctagtccaaggaggaaatgagccccaagcaatggaaagctgcacacgaagactggaatgtggagaactggggagtgccctgtcagctctattcccatcacctgctccaccccttcacggcgacccactcgtgccatacttgagctggagccagtcacgggccctaaaaggacactccttagatgactgacacacagattgcaaaggtcctcggccagggatctcttgcacagctgatgtagacagtcaggcaaaactaatgaacgtggagttaatgatgacttttccaaatcctgagacacttttcagggaaaatcactttaaacttgggggagggggtatactcaagaatggagtggtgcttttaaactttgatgagcagctaaactcaggtatatatttggggaagggactactcttagtattaatggttttggagctgggtccagtttacagaattttcatgttgccttttaaaataatttttgttggtggtgaatgtattgtacataaagtgggaagggtgggtggggatgcggaagaaatgggggtcctaactggtgggcacacagcactggagtgatttttatctgtttacaatcatgtcacactgaatacttatgggagccggagatgagggtaggaaaggtttgatcttgtaatatgtcactgtgtttccttagtggccagccagccttcagaatagctaaaggccttccttccttccagtcagcctgagagagaacacctgtcccctaagcacctggtgtctccattggaggcagactgctctcaggagactactagaagcttcagcccggaagacaggctgctctctcatgctggtggcccaaattgagaaagtggtgtcccttcctgattttgccaccagccctaccgaatagttgtaaaccagtatcaggaattgggatcgctagagtgtttcacgtattagaagatgaatcgtcctcatcacagacctccctgtcaggactgtgatctagaaggcatcacacacagctttctggcacgaatcacattttgtggaagtgactactcaggtttgtatattttagtatcaataaagaattgcacaggtttgaataggaaaaatgtattctatagatttacagtttgaatttaggaatatttcagtatatatagtttttattcgttttaagtgaatcatagtaaaatcagtcatggtgatttaaaatagctatcaagaacaagttcttggaattatctgttgtatctgtgataggaaaccattttacagtattaaattactttattacagttgtagagttgaattacactggattctccctcgttagcattctgtatttgattttagctgaaaggtcaccaaagttaggacccatgttttaaacttttgaatattccacaaaagaaaaaactaaggaaaatactgaaattacaggtctttgtaaagaatagcatatttttaagcatgcttttgggatagtagaagagtctctatgaaatattaatctgccctagtttcttataaattcagctgtgggaggggccagtagagtgtttccctccaattccaggattcctagtgaagcatggaactgtcgtgtttacagtttgctaaacatatgctgtccgtggaaaaggaagctaatcggaagcatccatgatacagagaaatgaaagccaagacaccagttccaggatgatggaagttcatatccgtacgcaaatgctgaacctggtgctgctgcctagggctcaggcagatttgagagttgagtagggaacacaggtgcctctaaggtataatgcacaaaaatacagattttctctcagagaggttttaattttaaatttgatgtatttgcaagtggattgagttttgagcctgtgttctcactggatcctaattcttgttagaaacctatcactggcataacctggtttagaagagtgaagaggacagaaggattgtggatgggtctgccctttagctagtatccgctaacatggggcattactacttcagtttctgtgtttgtgcagaagcagggaggaggtaaaaagctagtttggagctggttagacctggtctaggcccagagaatttggccactgacagcctttctcttttcctggtaatgctggtttgaatcagaggcctctcacttctccttaacaggagcactgacactgtgggcctctccccatgactaccccaggggcctgggtgggagtggctgtaagcagcagttgggccattgccccctttccttctgccctcgtggtccttgagcagttgtgtgcacactcttccaggtaatcctgtctcctctctctcccagtgaccgccccaatcagctgttgctagagcgatgctgtgaacgatacaggaaaagtcagtaaatccctttatccttaatctcccttcttggttttcgacagaaaatattaaggaagagcaataggaaatagaactactgtattataacactgtgaacaagaacatcagcagcagcagaattgtcagccttcctgcgtcctgtgtgggaatgtgtccatgccttataggtactagtgcttcgtccattgtccagggagtgtcctgagctttcactggtctttgaagtgcagatctgctataagctgtctggagctgcaaggttgcaggaatccacaggagcgtgagctgctgtgaacccctagcccacccatccccaagcaggatcttcttctcaccttttcttcctcctctagcacttctctttccaagtgtcttaagcagatgcaatgtcttaaagcagatgcaaatgcatttgccatcttctccattaggaaaatgatggttatgtgatatgttatatttaggaagtagtgtgtaaggtatcctgaaaaggtttgctctcaagctagaaggacatttcaccctgtgggtcactgtcaccttgtcagcgtgccggctctcagtggtccccaggaggatggggatagctgagatcgtggagaatgggaaataccattgcatctctttgatttaacactcatggctcacctttagtagagttgttaataagttagaaacttgtgtccctaaggcccaagagaaaagatgagcttcttgggaggattctgggtttgttttcccctcagaattaaaaaatagtttttaattcagctactttttcccctcagttaaaaggtagcaggagctattggctgaaatttgttacagtgaatgaatgtggagaataaataagaacaaaccctgtaggattcttgttgacgtaactttccatcccacctctccgcctctccttcatcaccagccttcatcaggttggtttagtttacctggccgtacacacgagctgctcatcaacagttcgtatcttctcactgagcccgggccagatgctctcagaaggccttctcatgctcctcttcgttaggcttagtgaaaaccttaagacctgcagtttgtgcccctcagttcagtcagacctcagctttaaatgtcgatttactctgtcttgttccctgaaagtgtttcttgtgactaagcatttggtgtcattatcccatgccatttatctgctgtatagttactatattatttttgctgattcctactgctggcagatgccatcccaggcccacaaaatcccagtgttgcagtcaccacagctgtcagaaacaagtttgcaatccatacttcttggttcaatttttttttttaatggacattcaaatctgtaaatactacactgctcttaagacctgatttgaaatttcacaggaaggcctaatcctatagtcacaaggtaaggacagttgagtagtgtaagaaccccaacctgcttgcagagaaccttggttttcatagaaaggaaaggctgaaggttttctagcattgttgcccttctttgtctgtcagtcagttcaccctctgtgattctccatggacccgcattgcagaaaatcagtcccatatattagtgagccatgtactgcccaatccgggggctcctggggtgtggtgtgtccaccagtgactctccggacactagcttcagtaaggatacttcttatttcggttgagaatgcagaggcttttattcgtggactcacatcactgcatagcacaaagaatgtgattgccatttgctgcgtgagaaaaagctgggctccctatttcttttttgggttggactctgccgtgcagccataggacaccaagcctcacgcactttccccttgggacagtagtgtttgggtgaatgttactgcatcccgttttttttcttttcttttttttttttttttttttgagacgaaatcttgctcttgtcccccagactggagtgcaatggcacgatctcggctcactgcaacctccacctcccaggttcaagggattcgtctgcctcggcctcccaagtagctgggactacaagcgcgcaccaccactcccagctaatttttgtatttttagtagaggcggggtttcaccatgttggccaggctggtctcaaactcctgacctcaggtgatccacccgccttggcctcccaacatgctgggattacaggcgtgagccaacacaccggaccttcattttttaaattaagctgggacacaagttttgcctccaggctggatgttgatcctgctctgtgctagacagatgtgcggagggactgttccgggctcggcttgaccttttcctacctagtttctccctcttgtcctgcacaagaggactaactgaactctaacgtcagaacggctgacgagcagttgattgtccttgcttgtgttgttgacaggggtgggtggggtgggagcaggggtatggatattgcataagttattgaaatgctgacccccgttcaggaaaccatgcagccccttcccttcccttcccttcccttcctttcccttccctagccagggctcaggtacctcactctcctgccttgtgcgtagctcctggggccccggtcagtccccagcagccttggcacacagtgtctggagcctctgctcctgctgcaaaagcagaaaccatgtgaaccttctggccagtactggaaaggggaatgctatttatttttatattgtgtatattttgtcgtggtctgctgattccctgtttcactgagagcgacacttacctcaatagttagttcaatattgtgtgttggataattttttaaaagaactttttaaaaagctttttgatccttggaggtctgtagatttatttccatatgaactggttattttgtataaagtacatgcttaaaatagc

SEQ ID NO: 114840 - DNA, 1735 bp, Homo sapiens
  Payload ID: 2434
  Gene Symbol: CECR5
  Gene Name: cat eye syndrome chromosome region, candidate 5
  Uniprot ID: Q9BXW7
  ENST ID: ENST00000155674
  CDS Start-End: 44-1225
ctggtggaccagctggctcctaaagaggagaggggactaaatcatgtatgcttggttctttcttcccagcttctctcagagcccacccacctttgggttcctgttggacatcgatggagtgcttgtgcggggccacagagtgatccctgctgctctgaaagccttccgaaggctggtgaactcccaggggcagctgcgggtgcccgtggtttttgttacaaatgctgggaacatcttacaacacagcaaagcccaggagctgtcagccctgctggggtgcgaggtggatgcagaccaagttatcctctctcacagccccatgaagctcttctccgagtaccatgagaagcggatgctggtgtctggacaggggcccgtgatggaaaatgcccagggactgggcttccgaaatgtcgtcaccgtggatgagctgcggatggcctttcctctgcttgacatggtggacctggagcggcggctaaagaccacgcccctcccgaggaatgacttcccccgcattgaaggggtgctcctcctaggggagccggtccgctgggagaccagcctgcagctgatcatggatgtcctcctcagcaatgggagccctggggctggcctggcaacacccccctacccccacctccccgtcctagccagcaacatggatctcctgtggatggctgaagccaagatgcccaggtttggacatggcacctttctgctgtgcctggaaaccatttaccagaaagtgacgggcaaggagctgagatacgagggcctgatgggcaaacccagcatcctcacttaccagtatgccgaggacctgatcaggcgacaggcggagaggcggggctgggccgcccccatccggaagctctatgctgtgggtgataaccctatgtctgacgtatacggcgccaacctgttccaccagtacctgcagaaggcaacgcatgatggggcgccagaactaggggccgggggcacacggcagcaacagccctcagcaagccagagctgcatctccatcctggtgtgtacaggcgtctacaatcccaggaacccacagtccacggagcctgtccttggaggaggggagcctccattccacgggcaccgagacttatgcttcagtccagggctcatggaggcctcccacgtggtgaatgacgtgaatgaggctgtgcagctggtcttccgcaaggagggctgggctttggagtgagggcagtgcggtggaggtgagggggtgagcctggacctgtgggcgagtcccattggctgggctctggcctgatcactgggctcaggtcagggcttggttcccttgccacccttcttgctgccccatgagtgtggcattactggtcacttggaagaagacagtgactctttttccctgctgggtagcattttgtatggaacggttggaattttctgggcccagttcccacgtgcctttcgtggcagtctaacctcaggccattctcttcccctgtgtgcctcagtgtccttctcatttcagtagggacttctgaaatgggggaggcagtgtggaatactgtggatgtctgtgcagagcctttgccggcactgaaggcatgcagcctgtcggcagagtgtcttaacaccagatgctactttttactgtattgtagtttattgcccggagatgtggggctttttttttaaataaaataatcataataaatgttcatgatgctgactcttgtga

SEQ ID NO: 114841 - DNA, 1799 bp, Homo sapiens
  Payload ID: 2434
  Gene Symbol: CECR5
  Gene Name: cat eye syndrome chromosome region, candidate 5
  Uniprot ID: Q9BXW7
  ENST ID: ENST00000336737
  CDS Start-End: 27-1298
gtgcacgtgcgcacggcgacggccggatggctgcgtggggctgtgtggctgcgctcggcgcggcgcgtgggctttgctggcgggcggcgcgcgcggctgcggggctccagggccgccccgcccgcaggtgctatgctgtgggccccgctcagagcccacccacctttgggttcctgttggacatcgatggagtgcttgtgcggggccacagagtgatccctgctgctctgaaagccttccgaaggctggtgaactcccaggggcagctgcgggtgcccgtggtttttgttacaaatgctgggaacatcttacaacacagcaaagcccaggagctgtcagccctgctggggtgcgaggtggatgcagaccaagttatcctctctcacagccccatgaagctcttctccgagtaccatgagaagcggatgctggtgtctggacaggggcccgtgatggaaaatgcccagggactgggcttccgaaatgtcgtcaccgtggatgagctgcggatggcctttcctctgcttgacatggtggacctggagcggcggctaaagaccacgcccctcccgaggaatgacttcccccgcattgaaggggtgctcctcctaggggagccggtccgctgggagaccagcctgcagctgatcatggatgtcctcctcagcaatgggagccctggggctggcctggcaacacccccctacccccacctccccgtcctagccagcaacatggatctcctgtggatggctgaagccaagatgcccaggtttggacatggcacctttctgctgtgcctggaaaccatttaccagaaagtgacgggcaaggagctgagatacgagggcctgatgggcaaacccagcatcctcacttaccagtatgccgaggacctgatcaggcgacaggcggagaggcggggctgggccgcccccatccggaagctctatgctgtgggtgataaccctatgtctgacgtatacggcgccaacctgttccaccagtacctgcagaaggcaacgcatgatggggcgccagaactaggggccgggggcacacggcagcaacagccctcagcaagccagagctgcatctccatcctggtgtgtacaggcgtctacaatcccaggaacccacagtccacggagcctgtccttggaggaggggagcctccattccacgggcaccgagacttatgcttcagtccagggctcatggaggcctcccacgtggtgaatgacgtgaatgaggctgtgcagctggtcttccgcaaggagggctgggctttggagtgagggcagtgcggtggaggtgagggggtgagcctggacctgtgggcgagtcccattggctgggctctggcctgatcactgggctcaggtcagggcttggttcccttgccacccttcttgctgccccatgagtgtggcattactggtcacttggaagaagacagtgactctttttccctgctgggtagcattttgtatggaacggttggaattttctgggcccagttcccacgtgcctttcgtggcagtctaacctcaggccattctcttcccctgtgtgcctcagtgtccttctcatttcagtagggacttctgaaatgggggaggcagtgtggaatactgtggatgtctgtgcagagcctttgccggcactgaaggcatgcagcctgtcggcagagtgtcttaacaccagatgctactttttactgtattgtagtttattgcccggagatgtggggctttttttttaaataaaataatcataataaatgttcatgatgctga

SEQ ID NO: 114842 - DNA, 1118 bp, Homo sapiens
  Payload ID: 2434
  Gene Symbol: CECR5
  Gene Name: cat eye syndrome chromosome region, candidate 5
  ENST ID: ENST00000399852
  CDS Start-End: 5-676
ccggatggctgcgtggggctgtgtggctgcgctcggcgcggcgcgtgggctttgctggcgggcggcgcgcgcggctgcggggctccagggccgccccgcccgcaggtgctatgctgtgggccccgctcagcccctcccgaggaatgacttcccccgcattgaaggggtgctcctcctaggggagccggtccgctgggagaccagcctgcagctgatcatggatgtcctcctcagcaatgggagccctggggctggcctggcaacacccccctacccccacctccccgtcctagccagcaacatggatctcctgtggatggctgaagccaagatgcccagtgataaccctatgtctgacgtatacggcgccaacctgttccaccagtacctgcagaaggcaacgcatgatggggcgccagaactaggggccgggggcacacggcagcaacagccctcagcaagccagagctgcatctccatcctggtgtgtacaggcgtctacaatcccaggaacccacagtccacggagcctgtccttggaggaggggagcctccattccacgggcaccgagacttatgcttcagtccagggctcatggaggcctcccacgtggtgaatgacgtgaatgaggctgtgcagctggtcttccgcaaggagggctgggctttggagtgagggcagtgcggtggaggtgagggggtgagcctggacctgtgggcgagtcccattggctgggctctggcctgatcactgggctcaggtcagggcttggttcccttgccacccttcttgctgccccatgagtgtggcattactggtcacttggaagaagacagtgactctttttccctgctgggtagcattttgtatggaacggttggaattttctgggcccagttcccacgtgcctttcgtggcagtctaacctcaggccattctcttcccctgtgtgcctcagtgtccttctcatttcagtagggacttctgaaatgggggaggcagtgtggaatactgtggatgtctgtgcagagcctttgccggcactgaaggcatgcagcctgtcggcagagtgtcttaacaccagatgctactttttactgtattgtagtttattgcc

SEQ ID NO: 114843 - DNA, 4954 bp, Homo sapiens
  Payload ID: 2435
  Gene Symbol: CECR6
  Gene Name: cat eye syndrome chromosome region, candidate 6
  Uniprot ID: Q9BXQ6
  ENST ID: ENST00000331437
  CDS Start-End: 127-1863
aggtgcgagtccccactgctggggaggcggcgggccccggctcccctcggccgcctagcccgcctcgcccgcccggggttggcggggagggaacagctgggcggccccagagcccctcggaggacaatgcgcccggcgctcggccaccctcgctcggtctcctccgcgtccggttccttcccgccgcccccggcagccgcccggctgcagcccctcttcctccgcgggggctccttccgcggccggagaggctccggcgacagcagcaccagcaccagcaccagccgcgggggaggcggcggcagacgcggcgggggcggcggctccccgagcagcagcacgggcgccgagcgcgaggacgacgacgagagcctcagcgtcagcaagccgctggtgcccaacgccgcgctcctggggccgccggctcaggtgggcgcccccgccggccccgcgcctgtcgccttctcctcctcagcggccacctcctcctccacctccacgcccacctcctcctgcagcatgacagccgcggacttcggcgggggcgccgcggccggggccgtcgggggccccgggagccgctcggcggggggcgcgggcggcaccgggaccggcagcggcgcctcctgctgcccgtgttgctgctgctgcggctgcccagaccgccccggccgcagaggtcggcgccgcggctgcgcccccagtcccaggtgccgctggggctaccaggcgctgtccgtggtgctgctgctggcgcagggcggcctgctggacctgtacctcatcgccgtcaccgacctgtactggtgctcctggatcgccactgacctggtggtggtggtgggctgggccatcttcttcgccaagaacagccggggccgtcggggcggcgcagccagcggcgcgcacaaccaccacctgcaccaccaccacgccgcgccgcccctgcatctgcccgccccctcggccgctaccgctggggccaaggcacgcggagcccgcgggggcgccggcggcgcggggggcggcctgggggcggccgcggcagcgggcgagttcgccttcgcctacctggcctggcttatctactccatcgccttcactcccaaggtggtgctgatcctgggcacgtccatcctagacctcatcgagctacgcgcgcccttcggcaccacgggcttccgtctcaccatggcgctgtcggtgcccctgctctacagcttggtgcgggccatcagcgaggcgggcgcgcccccgggatcggcaggacccctgctgctgcagccccagcggcaccgcgcggccggatgcttcctgggcacgtgcttggacctgctcgacagcttcacgctggtggagctgatgctggagggccgcgtgccgctgcccgcgcacctgcgctacctgcttatcgccgtctacttcctcaccctcgcctcgccggtgctctggctctacgagctcaacgccgcggccgcagcggctgcatcctggggccaggcctccgggcctggcagctgcagccgccttctgcgcctgctgggcggctgcctggtggacgtgcccttgctggcgctgcgctgcctcctggtggtcagctaccagcagcccctctccatcttcatgctcaagaacctcttcttcctcggctgccggggcctggaggccctggagggctgctgggaccggggcaatcgggcctccccgagtcgggccagagggggctacggtgctccgccctccgcccctccaccacctccgccaccacctcagggaggctcccagctgggccactgcatctcggagaacgaggggggtgctcatggctatgtcaacaccctggctgtggcctctcagaattgagggtgaagggcacgggtccttgtttttgggttgagagtccccaacccccttgtcttctaccttctgtcacctagatttgatcagggtctatttggaagaggtaacccttttcagggctaagggccagggtgttcttctgcaccctggggtgaggacggcttggagggagaccagcagttaacggtgagggaggtaggtgcacttaccctctcctctcttctcctatcctaccccaatcctgacctccaaggggctggtacctctgcttcttgctttgcccacctccactctaattcccatccattaggaggagaggggtgctgggccttggaccttctcccttgcttagaagtgccagcctcttttaggctgtggttagtggccattgtcccatgccttgaaattgacccagaacccactttccactgatgtgtctcttggatttcttccaggtgatagatacaaagtgtatgtctctgtgtgtgtagtgttgttttctcgtgtccaccctgtggccctttgcaatgggtaggagatctggggaggccctgccccctacaccatacttatcaccaccctcctcttttctgcctggatttgtgaccatgaattcccaggaagagctgggcccctgggagctgcccaggtactccccttgaagggagaatctcacccaggatcttcctcaatactgctcctctcttctcagctcagggagaggaggggatccattctctaaggaccaaactgcaccctttcttgggtgagtgagcatttctacctccgtgctttcaacttttgttgcatcatgcactgatgctgcttgcaaaaaatgaagacaaaatactcagaagttgcatttgccatggccactggctccagctggggtttggtgccagtgttattacagggtctgcggagtatcagccattggcttggcctctctctgttcctccctctgcacctagaactcttatccttcctgtggtttggtgccgactgggtcggatctgggcttagagtaatagctttggtgggtttcctggatggatgtgaagttgggcctcccatgggcccaagggagtaggaagccccattccccacctgtccttcctctaggaagtgtagatcagaaagtgaggtggtgacctcccacctctggtctggttaagagtctcactagggccaaggcaggctgcagaactttccctcttcctctcattgagggtgatgacaagagacatccggggactgtgcacttacagtcggtgtggaatgtcactcttgcagtctttgaggcaggataagtatttttacatattttaagggtgcaggaggacagcagctaacaaggccaggaaatactcacttccctccaccctcaacaggatgtggtgggggtgaaacttgaagaatttttgtttccccttctcccttcttacgtttgggaagttttatgtagtgtaacaaactctagacgagttaccagaagatgtggattctagttctgattctgtcactcattggctttgagtgacatatttttatttcctgggcctgttttctcacattaaaaaagtagaagttagatgagtgatctctaaggttgaaggtaatttcagctctcacattcttttgagtttgtggctcttgaaagccctggtcctgatgctccctgtaaaggtggctgggagagaagccagccaggctgcacttgcagaacattccctgctctgtactgggtgtgtgaagccccagcagagaaggccggagggagggcttgggtgcctgggctgggtgtggggcagggcctggcacagctgcagagtgcacagggagggtcagaagtgccaagtcactggccgttaactcagcacccaggccaagcccccgcctcccacttgaagccccctcttacaactgttttgggggcttggagcagaagacacccttgtagacagacataagaggggcagaaggcttgaccagagttctcttgagcctcctcatgctctcagagcagggaacagcgggggaaaatgtttacactccatgcacaatctgtgcttccagtccctcaccctatgtggcccaatagctggctggatttcacacttaattggtatttttttctgccttcttcccctgcccccactgactcctctcctctccctttgattgtactcaaggttctggggcctgggccctgggtgggtaccaacagctgctcgctgttcccatgtcctctctccagctttgctgtgtttctctgctacctaatctcagtgactgtgaaaggacattgtgtctgagccatggccagccgctggctggccccctgatctgccccccttctattgtttggatggccatctcctgctgggcctccctgactgtaaaatctctgtactgtttgttaggtttttggtgggaggctgtgataagttccaatgagctgccacttccctggatatgtcaagaagctgatggcaacttggccaattctggcagatatcaggcccccagttcagccccagtcaccctcttttacacatgtgggtcaaccactgtgtgctcagagggtcagtcccttcctctgctgtgtttttcttgagtccttgcactcacttcccctgccccagtcacgatgacccctaaagcttcctttgcccttgctttctagggcatccctagtgaaggggcaaacctgagatttctccgtggacctgacagccaaggcagggcactgtctcctgaggccagtgccagcacgtgcatggttcacagaaaaggatcctgggctcagaatctcgagaaccgcctgctcctaacaattcagcaagtcaggggcttcctctctgttagtccccaaatccttacttattttaaaaagactagaccctctctaaagactgttccattttaacatgtcctgattctgcatccgtgggttttgtgaaagagagctagctggcggttagagcctggaagaaggagggaagtggcacctcactagcatttatcacttttttccttctctttttaaaaataaaaccagactctgttctgaaaataaaaaacttgagacttg

SEQ ID NO: 114844 - DNA, 3961 bp, Homo sapiens
  Payload ID: 2435
  Gene Symbol: CECR6
  Gene Name: cat eye syndrome chromosome region, candidate 6
  Uniprot ID: Q9BXQ6
  ENST ID: ENST00000399875
  CDS Start-End: 198-869
ctcgcctgtcttcaccgcggtccgctcggttcaccgcctgccccctctccctgccgcccggcccggctcgcccagtccagtggctccagtccggatctcgccgccgcccggcccaggtggtgctgatcctgggcacgtccatcctagacctcatcgagctacgcgcgcccttcggcaccacgggcttccgtctcaccatggcgctgtcggtgcccctgctctacagcttggtgcgggccatcagcgaggcgggcgcgcccccgggatcggcaggacccctgctgctgcagccccagcggcaccgcgcggccggatgcttcctgggcacgtgcttggacctgctcgacagcttcacgctggtggagctgatgctggagggccgcgtgccgctgcccgcgcacctgcgctacctgcttatcgccgtctacttcctcaccctcgcctcgccggtgctctggctctacgagctcaacgccgcggccgcagcggctgcatcctggggccaggcctccgggcctggcagctgcagccgccttctgcgcctgctgggcggctgcctggtggacgtgcccttgctggcgctgcgctgcctcctggtggtcagctaccagcagcccctctccatcttcatgctcaagaacctcttcttcctcggctgccggggcctggaggccctggagggctgctgggaccggggcaatcgggcctccccgagtcgggccagagggggctacggtgctccgccctccgcccctccaccacctccgccaccacctcagggaggctcccagctgggccactgcatctcggagaacgaggggggtgctcatggctatgtcaacaccctggctgtggcctctcagaattgagggtgaagggcacgggtccttgtttttgggttgagagtccccaacccccttgtcttctaccttctgtcacctagatttgatcagggtctatttggaagaggtaacccttttcagggctaagggccagggtgttcttctgcaccctggggtgaggacggcttggagggagaccagcagttaacggtgagggaggtaggtgcacttaccctctcctctcttctcctatcctaccccaatcctgacctccaaggggctggtacctctgcttcttgctttgcccacctccactctaattcccatccattaggaggagaggggtgctgggccttggaccttctcccttgcttagaagtgccagcctcttttaggctgtggttagtggccattgtcccatgccttgaaattgacccagaacccactttccactgatgtgtctcttggatttcttccaggtgatagatacaaagtgtatgtctctgtgtgtgtagtgttgttttctcgtgtccaccctgtggccctttgcaatgggtaggagatctggggaggccctgccccctacaccatacttatcaccaccctcctcttttctgcctggatttgtgaccatgaattcccaggaagagctgggcccctgggagctgcccaggtactccccttgaagggagaatctcacccaggatcttcctcaatactgctcctctcttctcagctcagggagaggaggggatccattctctaaggaccaaactgcaccctttcttgggtgagtgagcatttctacctccgtgctttcaacttttgttgcatcatgcactgatgctgcttgcaaaaaatgaagacaaaatactcagaagttgcatttgccatggccactggctccagctggggtttggtgccagtgttattacagggtctgcggagtatcagccattggcttggcctctctctgttcctccctctgcacctagaactcttatccttcctgtggtttggtgccgactgggtcggatctgggcttagagtaatagctttggtgggtttcctggatggatgtgaagttgggcctcccatgggcccaagggagtaggaagccccattccccacctgtccttcctctaggaagtgtagatcagaaagtgaggtggtgacctcccacctctggtctggttaagagtctcactagggccaaggcaggctgcagaactttccctcttcctctcattgagggtgatgacaagagacatccggggactgtgcacttacagtcggtgtggaatgtcactcttgcagtctttgaggcaggataagtatttttacatattttaagggtgcaggaggacagcagctaacaaggccaggaaatactcacttccctccaccctcaacaggatgtggtgggggtgaaacttgaagaatttttgtttccccttctcccttcttacgtttgggaagttttatgtagtgtaacaaactctagacgagttaccagaagatgtggattctagttctgattctgtcactcattggctttgagtgacatatttttatttcctgggcctgttttctcacattaaaaaagtagaagttagatgagtgatctctaaggttgaaggtaatttcagctctcacattcttttgagtttgtggctcttgaaagccctggtcctgatgctccctgtaaaggtggctgggagagaagccagccaggctgcacttgcagaacattccctgctctgtactgggtgtgtgaagccccagcagagaaggccggagggagggcttgggtgcctgggctgggtgtggggcagggcctggcacagctgcagagtgcacagggagggtcagaagtgccaagtcactggccgttaactcagcacccaggccaagcccccgcctcccacttgaagccccctcttacaactgttttgggggcttggagcagaagacacccttgtagacagacataagaggggcagaaggcttgaccagagttctcttgagcctcctcatgctctcagagcagggaacagcgggggaaaatgtttacactccatgcacaatctgtgcttccagtccctcaccctatgtggcccaatagctggctggatttcacacttaattggtatttttttctgccttcttcccctgcccccactgactcctctcctctccctttgattgtactcaaggttctggggcctgggccctgggtgggtaccaacagctgctcgctgttcccatgtcctctctccagctttgctgtgtttctctgctacctaatctcagtgactgtgaaaggacattgtgtctgagccatggccagccgctggctggccccctgatctgccccccttctattgtttggatggccatctcctgctgggcctccctgactgtaaaatctctgtactgtttgttaggtttttggtgggaggctgtgataagttccaatgagctgccacttccctggatatgtcaagaagctgatggcaacttggccaattctggcagatatcaggcccccagttcagccccagtcaccctcttttacacatgtgggtcaaccactgtgtgctcagagggtcagtcccttcctctgctgtgtttttcttgagtccttgcactcacttcccctgccccagtcacgatgacccctaaagcttcctttgcccttgctttctagggcatccctagtgaaggggcaaacctgagatttctccgtggacctgacagccaaggcagggcactgtctcctgaggccagtgccagcacgtgcatggttcacagaaaaggatcctgggctcagaatctcgagaaccgcctgctcctaacaattcagcaagtcaggggcttcctctctgttagtccccaaatccttacttattttaaaaagactagaccctctctaaagactgttccattttaacatgtcctgattctgcatccgtgggttttgtgaaagagagctagctggcggttagagcctggaagaaggagggaagtggcacctcactagcatttatcacttttttccttctctttttaaaaataaaaccagactctgttctgaaaataaaaaacttgagacttgt

SEQ ID NO: 114845 - DNA, 2302 bp, Homo sapiens
  Payload ID: 2436
  Gene Symbol: CAT
  Gene Name: catalase
  Uniprot ID: P04040
  ENST ID: ENST00000241052
  CDS Start-End: 90-1673
actcggggcaacaggcagatttgcctgctgagggtggagacccacgagccgaggcctcctgcagtgttctgcacagcaaaccgcacgctatggctgacagccgggatcccgccagcgaccagatgcagcactggaaggagcagcgggccgcgcagaaagctgatgtcctgaccactggagctggtaacccagtaggagacaaacttaatgttattacagtagggccccgtgggccccttcttgttcaggatgtggttttcactgatgaaatggctcattttgaccgagagagaattcctgagagagttgtgcatgctaaaggagcaggggcctttggctactttgaggtcacacatgacattaccaaatactccaaggcaaaggtatttgagcatattggaaagaagactcccatcgcagttcggttctccactgttgctggagaatcgggttcagctgacacagttcgggaccctcgtgggtttgcagtgaaattttacacagaagatggtaactgggatctcgttggaaataacacccccattttcttcatcagggatcccatattgtttccatcttttatccacagccaaaagagaaatcctcagacacatctgaaggatccggacatggtctgggacttctggagcctacgtcctgagtctctgcatcaggtttctttcttgttcagtgatcgggggattccagatggacatcgccacatgaatggatatggatcacatactttcaagctggttaatgcaaatggggaggcagtttattgcaaattccattataagactgaccagggcatcaaaaacctttctgttgaagatgcggcgagactttcccaggaagatcctgactatggcatccgggatctttttaacgccattgccacaggaaagtacccctcctggactttttacatccaggtcatgacatttaatcaggcagaaacttttccatttaatccattcgatctcaccaaggtttggcctcacaaggactaccctctcatcccagttggtaaactggtcttaaaccggaatccagttaattactttgctgaggttgaacagatagccttcgacccaagcaacatgccacctggcattgaggccagtcctgacaaaatgcttcagggccgcctttttgcctatcctgacactcaccgccatcgcctgggacccaattatcttcatatacctgtgaactgtccctaccgtgctcgagtggccaactaccagcgtgacggcccgatgtgcatgcaggacaatcagggtggtgctccaaattactaccccaacagctttggtgctccggaacaacagccttctgccctggagcacagcatccaatattctggagaagtgcggagattcaacactgccaatgatgataacgttactcaggtgcgggcattctatgtgaacgtgctgaatgaggaacagaggaaacgtctgtgtgagaacattgccggccacctgaaggatgcacaaattttcatccagaagaaagcggtcaagaacttcactgaggtccaccctgactacgggagccacatccaggctcttctggacaagtacaatgctgagaagcctaagaatgcgattcacacctttgtgcagtccggatctcacttggcggcaagggagaaggcaaatctgtgaggccggggccctgcacctgtgcagcgaagcttagcgttcatccgtgtaacccgctcatcactggatgaagattctcctgtgctagatgtgcaaatgcaagctagtggcttcaaaatagagaatcccactttctatagcagattgtgtaacaattttaatgctatttccccaggggaaaatgaaggttaggatttaacagtcatttaaaaaaaaaatttgttttgacggatgattggattattcatttaaaatgattagaaggcaagtttctagctagaaatatgattttatttgacaaaatttgttgaaattatgtatgtttacatatcacctcatggcctattatattaaaatatggctataaatatataaaaagaaaagataaagatgatctactcagaaatttttatttttctaaggttctcataggaaaagtacatttaatacagcagtgtcatcagaagataacttgagcaccgtcatggcttaatgtttattcctgataataattgatcaaattcatttttttcactggagttacattaatgttaattcagcactgatttcacaacagatcaatttgtaattgcttacatttttacaataaataatctgtacgtaagaacaga

SEQ ID NO: 114846 - DNA, 1319 bp, Homo sapiens
  Payload ID: 2437
  Gene Symbol: COMT
  Gene Name: catechol-O-methyltransferase
  ENST ID: ENST00000207636
  CDS Start-End: 166-765
cagctccaccaggagtcaggagtgaatcccctctgggaacgaggcactaggaagaagaacttccagcccaggagaaataacatctgctttgctgccgagctcagaggagaccccagacccctcccgcagccagagggctggagcctgctcagaggtgctttgaagatgccggaggccccgcctctgctgttggcagctgtgttgctgggcctggtgctgctggtggtgctgctgctgcttctgaggcactggggctggggcctgtgccttatcggctggaacgagttcatcctgcagcccatccacaacctgctcatgggtgacaccaaggagcagcgcatcctgaaccacgtgctgcagcatgcggagcccgggaacgcacagagcgtgctggaggccattgacacctactgcgagcagaaggagtgggccatgaacgtgggcgacaagaaaggcaagatcgtggacgccgtgattcaggagcaccagccctccgtgctgctggagctgggggcctactgtggctactcagctgtgcgcatggcccgcctgctgtcaccaggggcgaggctcatcaccatcgagatcaaccccgactgtgccgccatcacccagcggatggtggatttcgctggcgtgaaggacaaggtgtgtagggatggcctcctgtctgtgaggacgtgggcactgacaggcgctgttccaggtcacccttgtggttggagcgtcccaggacatcatcccccagctgaagaagaagtatgatgtggacacactggacatggtcttcctcgaccactggaaggaccggtacctgccggacacgcttctcttggaggaatgtggcctgctgcggaaggggacagtgctactggctgacaacgtgatctgcccaggtgcgccagacttcctagcacacgtgcgcgggagcagctgctttgagtgcacacactaccaatcgttcctggaatacagggaggtggtggacggcctggagaaggccatctacaagggcccaggcagcgaagcagggccctgactgcccccccggcccccctctcgggctctctcacccagcctggtactgaaggtgccagacgtgctcctgctgaccttctgcggctccgggctgtgtcctaaatgcaaagcacacctcggccgaggcctgcgccctgacatgctaacctctctgaactgcaacactggattgttcttttttaagactcaatcatgacttctttactaacactggctagctatattatcttatatactaatatcatgttttaaaaatataaaatagaaattaagaatctaaa

SEQ ID NO: 114847 - DNA, 2437 bp, Homo sapiens
  Payload ID: 2437
  Gene Symbol: COMT
  Gene Name: catechol-O-methyltransferase
  Uniprot ID: P21964
  ENST ID: ENST00000361682
  CDS Start-End: 383-1198
cggggacaccctggccaccgccgcgcggacaccctcacgaggacaccccggccgcgcggacacctaccgcggggacgccccgaccccatcctacctgctgcgccccgcgccgcgccccgcaccccgcccgccacggcctgcgtccgccaccggaagcgccctcctaatccccgcagcgccaccgccattgccgccatcgtcgtggggcttctggggcagctagggctgcccgccgcgctgcctgcgccggaccggggcgggtccagtcccgggcgggccgtcgcgggagagaaataacatctgctttgctgccgagctcagaggagaccccagacccctcccgcagccagagggctggagcctgctcagaggtgctttgaagatgccggaggccccgcctctgctgttggcagctgtgttgctgggcctggtgctgctggtggtgctgctgctgcttctgaggcactggggctggggcctgtgccttatcggctggaacgagttcatcctgcagcccatccacaacctgctcatgggtgacaccaaggagcagcgcatcctgaaccacgtgctgcagcatgcggagcccgggaacgcacagagcgtgctggaggccattgacacctactgcgagcagaaggagtgggccatgaacgtgggcgacaagaaaggcaagatcgtggacgccgtgattcaggagcaccagccctccgtgctgctggagctgggggcctactgtggctactcagctgtgcgcatggcccgcctgctgtcaccaggggcgaggctcatcaccatcgagatcaaccccgactgtgccgccatcacccagcggatggtggatttcgctggcgtgaaggacaaggtcacccttgtggttggagcgtcccaggacatcatcccccagctgaagaagaagtatgatgtggacacactggacatggtcttcctcgaccactggaaggaccggtacctgccggacacgcttctcttggaggaatgtggcctgctgcggaaggggacagtgctactggctgacaacgtgatctgcccaggtgcgccagacttcctagcacacgtgcgcgggagcagctgctttgagtgcacacactaccaatcgttcctggaatacagggaggtggtggacggcctggagaaggccatctacaagggcccaggcagcgaagcagggccctgactgcccccccggcccccctctcgggctctctcacccagcctggtactgaaggtgccagacgtgctcctgctgaccttctgcggctccgggctgtgtcctaaatgcaaagcacacctcggccgaggcctgcgccctgacatgctaacctctctgaactgcaacactggattgttcttttttaagactcaatcatgacttctttactaacactggctagctatattatcttatatactaatatcatgttttaaaaatataaaatagaaattaagaatctaaatatttagatataactcgacttagtacatccttctcaactgccattcccctgctgcccttgacttgggcaccaaacattcaaagctccccttgacggacgctaacgctaagggcggggcccctagctggctgggttctgggtggcacgcctggcccactggcctcccagccacagtggtgcagaggtcagccctcctgcagctaggccaggggcacctgttagccccatggggacgactgccggcctgggaaacgaagaggagtcagccagcattcacacctttctgaccaagcaggcgctggggacaggtggaccccgcagcagcaccagcccctctgggccccatgtggcacagagtggaagcatctccttccctactccccactgggccttgcttacagaagaggcaatggctcagaccagctcccgcatccctgtagttgcctccctggcccatgagtgaggatgcagtgctggtttctgcccacctacacctagagctgtccccatctcctccaaggggtcagactgctagccacctcagaggctccaagggcccagttcccaggcccaggacaggaatcaaccctgtgctagctgagttcacctgcaccgagaccagcccctagccaagattctactcctgggctcaaggcctggctagcccccagccagcccactcctatggatagacagaccagtgagcccaagtggacaagtttggggccacccagggaccagaaacagagcctctgcaggacacagcagatgggcacctgggaccacctccacccagggccctgccccagacgcgcagaggcccgacacaagggagaagccagccacttgtgccagacctgagtggcagaaagcaaaaagttcctttgctgctttaatttttaaattttcttacaaaaatttaggtgtttaccaatagtcttattttggcttatttttaa

SEQ ID NO: 114848 - DNA, 2217 bp, Homo sapiens
  Payload ID: 2437
  Gene Symbol: COMT
  Gene Name: catechol-O-methyltransferase
  ENST ID: ENST00000403184
  CDS Start-End: 257-964
cccgccacggcctgcgtccgccaccggaagcgccctcctaatccccgcagcgccaccgccattgccgccatcgtcgtggggcttctggggcagctagggctgcccgccgcgctgcctgcgccggaccggggcgggtccagtcccgggcgggccgtcgcgggagagaaataacatctgctttgctgccgagctcagaggagaccccagacccctcccgcagccagagggctggagcctgctcagaggtgctttgaagatgccggaggccccgcctctgctgttggcagctgtgttgctgggcctggtgctgctggtggtgctgctgctgcttctgaggcactggggctggggcctgtgccttatcggctggaacgagttcatcctgcagcccatccacaacctgctcatgggtgacaccaaggagcagcgcatcctgaaccacgtgctgcagcatgcggagcccgggaacgcacagagcgtgctggaggccattgacacctactgcgagcagaaggagtgggccatgaacgtgggcgacaagaaaggcaagatcgtggacgccgtgattcaggagcaccagccctccgtgctgctggagctgggggcctactgtggctactcagctgtgcgcatggcccgcctgctgtcaccaggggcgaggctcatcaccatcgagatcaaccccgactgtgccgccatcacccagcggatggtggatttcgctggcgtgaaggacaaggtcacccttgtggttggagcgtcccaggacatcatcccccagctgaagaagaagtatgatgtggacacactggacatggtcttcctcgaccactggaaggaccggtacctgccggacacgcttctcttggaggtgagccccaaccaggatggcatccgtgccagctgctgcccagagcccattcagtcagcctcagcctctccaaagagccaggcattccagtagagccctgtgtggacacagctcgctctggaggcaccacctgaggtctgggagtgtgggggactgaggaggccctgtggtgggtggagatgggtggggagctgggccaggggcctggctgggtggcctgttgggaactggggagccagctgcctgtgcaggtgcaaaatgggtggcagaagtggggtgcacaccccagaccagacaccagggcagaaacggcacaggaccaaggagatggggtggggaagggccgctctgggcccagcctgctctcccccaagcaagccactgctcgtgcaaagaaagcatgtgtctcctgcagatcttcctcctgaggccccatcttgtgcattcccccaacccagccccactggcgaggaccctgagtgccccgagtgaggctagacagcgggtggggctgtcctcgcttccctggggggcgtggggcactggtggcccttcacagactgatgcttaaggagcctcacatcagtgacacactgccccatccctccctggtggtcagcgacactgagtggctctgtgatcctccactgggcttgggacacccaccctcacggcctccccacctggtgctcgctcacctgcagctctcccagaaactggacactgctgttagcagccggactaggagcacgaggggcacagcccccatgcctggctaggtagggccgctggaccctggacacggattggaaggaaccagcactagcagaagcctgaggtgtgaaagggcagagaatgttccaggaacaatgggagtcagggcacacaggactttgggcaggtgaggatgaggttagacctgtcttctggagctgggctcaggggctcatgcctgtaacccttgcactttgggaggctacggcaggaggagcgcttgaggccaggagagttcgagaccagcctgggcaacatggcaaaagaaaaaatatatatatatattttagatggagtcttgctctgtcaccaggctggagtgcagtggcacgatcacggctcactgcaacctccacctcttgggttcaagcgattaccctgccttagcctcctgagtagctgggactacaggcgcgcgctgccacacccggctagttttttgtagtttagtagagatggggtttcaccacattggccaggatggtctcaatatcctgacttcgtgatccgcccgcctcggcctcccaaagtgctgggattacaggcgtgagccactgcgtccggccgtattc

SEQ ID NO: 114849 - DNA, 1457 bp, Homo sapiens
  Payload ID: 2437
  Gene Symbol: COMT
  Gene Name: catechol-O-methyltransferase
  Uniprot ID: P21964
  ENST ID: ENST00000407537
  CDS Start-End: 380-1195
ccgccattgccgccatcgtcgtggggcttctggggcagctagggctgcccgccgcgctgcctgcgccggaccggggcgggtccagtcccgggcgggccgtcgcgggagagaaataacatctgctttgctgccgagctcagaggagaccccagacccctcccgcagccagagggctggagcctgctcagaggtgctttgaagggtctgtgacctgaacccctgggcttctgcctcaggcctcctgtgctctgctctctgcctgctgggtcccctcaccaggcttctgtctggttcccaggctacctgcctggagggtcacaccaggaggatttcaaacaggtttcaagtggggtcacttgccatcactgtgccccacgagatgccggaggccccgcctctgctgttggcagctgtgttgctgggcctggtgctgctggtggtgctgctgctgcttctgaggcactggggctggggcctgtgccttatcggctggaacgagttcatcctgcagcccatccacaacctgctcatgggtgacaccaaggagcagcgcatcctgaaccacgtgctgcagcatgcggagcccgggaacgcacagagcgtgctggaggccattgacacctactgcgagcagaaggagtgggccatgaacgtgggcgacaagaaaggcaagatcgtggacgccgtgattcaggagcaccagccctccgtgctgctggagctgggggcctactgtggctactcagctgtgcgcatggcccgcctgctgtcaccaggggcgaggctcatcaccatcgagatcaaccccgactgtgccgccatcacccagcggatggtggatttcgctggcgtgaaggacaaggtcacccttgtggttggagcgtcccaggacatcatcccccagctgaagaagaagtatgatgtggacacactggacatggtcttcctcgaccactggaaggaccggtacctgccggacacgcttctcttggaggaatgtggcctgctgcggaaggggacagtgctactggctgacaacgtgatctgcccaggtgcgccagacttcctagcacacgtgcgcgggagcagctgctttgagtgcacacactaccaatcgttcctggaatacagggaggtggtggacggcctggagaaggccatctacaagggcccaggcagcgaagcagggccctgactgcccccccggcccccctctcgggctctctcacccagcctggtactgaaggtgccagacgtgctcctgctgaccttctgcggctccgggctgtgtcctaaatgcaaagcacacctcggccgaggcctgcgccctgacatgctaacctctctgaactgcaacactggattgttcttttttaagactcaatcatgacttctttactaacactggctagctatattatcttatatactaatatcatgttttaaaaatataaaat

SEQ ID NO: 114850 - DNA, 1339 bp, Homo sapiens
  Payload ID: 2437
  Gene Symbol: COMT
  Gene Name: catechol-O-methyltransferase
  Uniprot ID: P21964
  ENST ID: ENST00000406520
  CDS Start-End: 244-1059
cccgcatgagcaggcagagtggagataacacggatcgctgtgtacactgtgtgctccggttgttgcatccgagggttgatcggatggtggttcccatccagatccaagtcctggcccctgatcacagagaaacacagctggacattaaagtgaaataacatctgctttgctgccgagctcagaggagaccccagacccctcccgcagccagagggctggagcctgctcagaggtgctttgaagatgccggaggccccgcctctgctgttggcagctgtgttgctgggcctggtgctgctggtggtgctgctgctgcttctgaggcactggggctggggcctgtgccttatcggctggaacgagttcatcctgcagcccatccacaacctgctcatgggtgacaccaaggagcagcgcatcctgaaccacgtgctgcagcatgcggagcccgggaacgcacagagcgtgctggaggccattgacacctactgcgagcagaaggagtgggccatgaacgtgggcgacaagaaaggcaagatcgtggacgccgtgattcaggagcaccagccctccgtgctgctggagctgggggcctactgtggctactcagctgtgcgcatggcccgcctgctgtcaccaggggcgaggctcatcaccatcgagatcaaccccgactgtgccgccatcacccagcggatggtggatttcgctggcgtgaaggacaaggtcacccttgtggttggagcgtcccaggacatcatcccccagctgaagaagaagtatgatgtggacacactggacatggtcttcctcgaccactggaaggaccggtacctgccggacacgcttctcttggaggaatgtggcctgctgcggaaggggacagtgctactggctgacaacgtgatctgcccaggtgcgccagacttcctagcacacgtgcgcgggagcagctgctttgagtgcacacactaccaatcgttcctggaatacagggaggtggtggacggcctggagaaggccatctacaagggcccaggcagcgaagcagggccctgactgcccccccggcccccctctcgggctctctcacccagcctggtactgaaggtgccagacgtgctcctgctgaccttctgcggctccgggctgtgtcctaaatgcaaagcacacctcggccgaggcctgcgccctgacatgctaacctctctgaactgcaacactggattgttcttttttaagactcaatcatgacttctttactaacactggctagctatattatcttatatactaatatcatgttttaaaaatataaaatagaaattaagaatctaaa

SEQ ID NO: 114851 - DNA, 1548 bp, Homo sapiens
  Payload ID: 2437
  Gene Symbol: COMT
  Gene Name: catechol-O-methyltransferase
  Uniprot ID: P21964
  ENST ID: ENST00000403710
  CDS Start-End: 511-1326
atccccgcagcgccaccgccattgccgccatcgtcgtggggcttctggggcagctagggctgcccgccgcgctgcctgcgccggaccggggcgggtccagtcccgggcgggccgtcgcgggagagaaataacatctgctttgctgccgagctcagaggagaccccagacccctcccgcagccagagggctggagcctgctcagaggtgctttgaagaggatccctgggctgcctggggaagcacccagggccagggagtgtgaccctgcaggctccacacaggactgccagaggcacacacctgctctgtctacccgagggcaccagagggcacgagaaggctggctccctggcgctgacacgtcaggcaactgaggcacaaggctggcatttctgaaccttgcccctctgcaaacacaagggggcgatggtggcactccaagcaaaggggcgtgtgggtgctgcaggaggagcacagagcactggcgcccctcccctcccgccctgcagatgccggaggccccgcctctgctgttggcagctgtgttgctgggcctggtgctgctggtggtgctgctgctgcttctgaggcactggggctggggcctgtgccttatcggctggaacgagttcatcctgcagcccatccacaacctgctcatgggtgacaccaaggagcagcgcatcctgaaccacgtgctgcagcatgcggagcccgggaacgcacagagcgtgctggaggccattgacacctactgcgagcagaaggagtgggccatgaacgtgggcgacaagaaaggcaagatcgtggacgccgtgattcaggagcaccagccctccgtgctgctggagctgggggcctactgtggctactcagctgtgcgcatggcccgcctgctgtcaccaggggcgaggctcatcaccatcgagatcaaccccgactgtgccgccatcacccagcggatggtggatttcgctggcgtgaaggacaaggtcacccttgtggttggagcgtcccaggacatcatcccccagctgaagaagaagtatgatgtggacacactggacatggtcttcctcgaccactggaaggaccggtacctgccggacacgcttctcttggaggaatgtggcctgctgcggaaggggacagtgctactggctgacaacgtgatctgcccaggtgcgccagacttcctagcacacgtgcgcgggagcagctgctttgagtgcacacactaccaatcgttcctggaatacagggaggtggtggacggcctggagaaggccatctacaagggcccaggcagcgaagcagggccctgactgcccccccggcccccctctcgggctctctcacccagcctggtactgaaggtgccagacgtgctcctgctgaccttctgcggctccgggctgtgtcctaaatgcaaagcacacctcggccgaggcctgcgccctgacatgctaacctctctgaactgcaacactggattgttcttttttaagactcaatcatgacttctttactaacactggctagctata

SEQ ID NO: 114852 - DNA, 724 bp, Homo sapiens
  Payload ID: 2437
  Gene Symbol: COMT
  Gene Name: catechol-O-methyltransferase
  ENST ID: ENST00000428707
  CDS Start-End: 1-457
caaccccgactgtgccgccatcacccagcggatggtggatttcgctggcgtgaaggacaaggtcacccttgtggttggagcgtcccaggacatcatcccccagctgaagaagaagtatgatgtggacacactggacatggtcttcctcgaccactggaaggaccggtacctgccggacacgcttctcttggaggtgcagtggtctggtgtctttcagtccgctgacgtcttctgtatccctgatgaccagattgggctcctgagtcccctggcgcaacccgagaagtccaggagcccaggcccctcactcatgcattccctggcccagactggaaggcagccgccctgctcaaggcctaggccattgtcctcctcccgggtggcgctttgttctacgtcttttcagctgacattgctaggacatttttttttttttctaaatgaaaacacatcatgattcatggtggtacttcctgctcaactccggaccttggggctgtcccctgacctcactgaccttgcagccgtgtggtgtccatactgtcacatgaaagccccctgctttctctgcagcatacaggctggaaacgaccgccacccaccaccaggacagctgcaagccctgtgggactctccaggcccatcccagaggcatgtggggtcggataccagtgtttcaaggcacctgcctgcaaattgattttattatactttagatgtttga

SEQ ID NO: 114853 - DNA, 871 bp, Homo sapiens
  Payload ID: 2437
  Gene Symbol: COMT
  Gene Name: catechol-O-methyltransferase
  ENST ID: ENST00000412786
  CDS Start-End: 203-871
acgggaggagcaagaacacagaacagagggggcaagacagctccaccaggagtcaggagtgaatcccctctgggaacgaggcactaggaagaagaacttccagcccaggagaaataacatctgctttgctgccgagctcagaggagaccccagacccctcccgcagccagagggctggagcctgctcagaggtgctttgaagatgccggaggccccgcctctgctgttggcagctgtgttgctgggcctggtgctgctggtggtgctgctgctgcttctgaggcactggggctggggcctgtgccttatcggctggaacgagttcatcctgcagcccatccacaacctgctcatgggtgacaccaaggagcagcgcatcctgaaccacgtgctgcagcatgcggagcccgggaacgcacagagcgtgctggaggccattgacacctactgcgagcagaaggagtgggccatgaacgtgggcgacaagaaaggcaagatcgtggacgccgtgattcaggagcaccagccctccgtgctgctggagctgggggcctactgtggctactcagctgtgcgcatggcccgcctgctgtcaccaggggcgaggctcatcaccatcgagatcaaccccgactgtgccgccatcacccagcggatggtggatttcgctggcgtgaaggacaaggtcacccttgtggttggagcgtcccaggacatcatcccccagctgaagaagaagtatgatgtggacacactggacatggtcttcctcgaccactggaaggaccggtacctgccggacacgcttctcttggaggaatgtggcctgctgcggaaggggacagtgctactggctgacaacgtgatctgc

SEQ ID NO: 114854 - DNA, 1035 bp, Homo sapiens
  Payload ID: 2437
  Gene Symbol: COMT
  Gene Name: catechol-O-methyltransferase
  Uniprot ID: P21964
  ENST ID: ENST00000449653
  CDS Start-End: 108-773
gcctggtgctgctggtggtgctgctgctgcttctgaggcactggggctggggcctgtgccttatcggctggaacgagttcatcctgcagcccatccacaacctgctcatgggtgacaccaaggagcagcgcatcctgaaccacgtgctgcagcatgcggagcccgggaacgcacagagcgtgctggaggccattgacacctactgcgagcagaaggagtgggccatgaacgtgggcgacaagaaaggcaagatcgtggacgccgtgattcaggagcaccagccctccgtgctgctggagctgggggcctactgtggctactcagctgtgcgcatggcccgcctgctgtcaccaggggcgaggctcatcaccatcgagatcaaccccgactgtgccgccatcacccagcggatggtggatttcgctggcgtgaaggacaaggtcacccttgtggttggagcgtcccaggacatcatcccccagctgaagaagaagtatgatgtggacacactggacatggtcttcctcgaccactggaaggaccggtacctgccggacacgcttctcttggaggaatgtggcctgctgcggaaggggacagtgctactggctgacaacgtgatctgcccaggtgcgccagacttcctagcacacgtgcgcgggagcagctgctttgagtgcacacactaccaatcgttcctggaatacagggaggtggtggacggcctggagaaggccatctacaagggcccaggcagcgaagcagggccctgactgcccccccggcccccctctcgggctctctcacccagcctggtactgaaggtgccagacgtgctcctgctgaccttctgcggctccgggctgtgtcctaaatgcaaagcacacctcggccgaggcctgcgccctgacatgctaacctctctgaactgcaacactggattgttcttttttaagactcaatcatgacttctttactaacactggctagctatattatcttatatactaatatcatgttttaaaaatataaaat

SEQ ID NO: 114855 - DNA, 976 bp, Homo sapiens
  Payload ID: 2438
  Gene Symbol: COMTD1
  Gene Name: catechol-O-methyltransferase domain containing 1
  Uniprot ID: Q86VU5
  ENST ID: ENST00000372538
  CDS Start-End: 84-872
gcgggcccgcgagtccgagacctgtcccaggagctccagctcacgtgacctgtcactgcctcccgccgcctcctgcccgcgccatgacccagccggtgccccggctctccgtgcccgccgcgctggccctgggctcagccgcactgggcgccgccttcgccactggcctcttcctggggaggcggtgccccccatggcgaggccggcgagagcagtgcctgcttccccccgaggacagccgcctgtggcagtatcttctgagccgctccatgcgggagcacccggcgctgcgaagcctgaggctgctgaccctggagcagccgcagggggattctatgatgacctgcgagcaggcccagctcttggccaacctggcgcggctcatccaggccaagaaggcgctggacctgggcaccttcacgggctactccgccctggccctggccctggcgctgcccgcggacgggcgcgtggtgacctgcgaggtggacgcgcagcccccggagctgggacggcccctgtggaggcaggccgaggcggagcacaagatcgacctccggctgaagcccgccttggagaccctggacgagctgctggcggcgggcgaggccggcaccttcgacgtggccgtggtggatgcggacaaggagaactgctccgcctactacgagcgctgcctgcagctgctgcgacccggaggcatcctcgccgtcctcagagtcctgtggcgcgggaaggtgctgcaacctccgaaaggggacgtggcggccgagtgtgtgcgaaacctaaacgaacgcatccggcgggacgtcagggtctacatcagcctcctgcccctgggcgatggactcaccttggccttcaagatctagggctggcccctagtgagtgggctcgagggagggttgcctgggaaccccaggaattgaccctgagttttaaattcgaaaataaagtggggctgggacacacgacc

SEQ ID NO: 114856 - DNA, 871 bp, Homo sapiens
  Payload ID: 2438
  Gene Symbol: COMTD1
  Gene Name: catechol-O-methyltransferase domain containing 1
  ENST ID: ENST00000469299
  CDS Start-End: 1-782
acccagccggtgccccggctctccgtgcccgccgcgctggccctgggctcagccgcactgggcgccgccttcgccactggcctcttcctggggaggcggtgccccccatggcgaggccggcgagagcagtgcctgcttccccccgaggacagccgcctgtggcagtatcttctgagccgctccatgcgggagcacccggcgctgcgaagcctgagctgaccctggagcagccgcagggggattctatgatgacctgcgagcaggcccagctcttggccaacctggcgcggctcatccaggccaagaaggcgctggacctgggcaccttcacgggctactccgccctggccctggccctggcgctgcccgcggacgggcgcgtggtgacctgcgaggtggacgcgcagcccccggagctgggacggcccctgtggaggcaggccgaggcggagcacaagatcgacctccggctgaagcccgccttggagaccctggacgagctgctggcggcgggcgaggccggcaccttcgacgtggccgtggtggatgcggacaaggagaactgctccgcctactacgagcgctgcctgcagctgctgcgacccggaggcatcctcgccgtcctcagagtcctgtggcgcgggaaggtgctgcaacctccgaaaggggacgtggcggccgagtgtgtgcgaaacctaaacgaacgcatccggcgggacgtcagggtctacatcagcctcctgcccctgggcgatggactcaccttggccttcaagatctagggctggcccctagtgagtgggctcgagggagggttgcctgggaaccccaggaattgaccctgagttttaaattcgaaaataaagtgggg

SEQ ID NO: 114857 - DNA, 3756 bp, Homo sapiens
  Payload ID: 2439
  Gene Symbol: CTNNA1
  Gene Name: catenin (cadherin-associated protein), alpha 1, 102kDa
  Uniprot ID: P35221
  ENST ID: ENST00000302763
  CDS Start-End: 91-2811
tcctcctcctagccggactggagggagacaaagcagcgcccgtctgcttcgggcctctggaatttagcgctcgcccagctagccgcagaaatgactgctgtccatgcaggcaacataaacttcaagtgggatcctaaaagtctagagatcaggactctggcagttgagagactgttggagcctcttgttacacaggttacaacccttgtaaacaccaatagtaaagggccctctaataagaagagaggtcgttctaagaaggcccatgttttggctgcatctgttgaacaagcaactgagaatttcttggagaagggggataaaattgcgaaggagagccagtttctcaaggaggagcttgtggctgctgtagaagatgttcgaaaacaaggtgatttgatgaaggctgctgcaggagagttcgcagatgatccctgctcttctgtgaagcgaggcaacatggttcgggcagctcgagctttgctctctgctgttacccggttgctgattttggctgacatggcagatgtctacaaattacttgttcagctgaaagttgtggaagatggtatcttgaagttgaggaatgctggcaatgaacaagacttaggaatccagtataaagccctaaaacctgaagtggataagctgaacattatggcagccaaaagacaacaggaattgaaagatgttggccatcgtgatcagatggctgcagctagaggaatcctgcagaagaacgttccgatcctctatactgcatcccaggcatgcctacagcaccctgatgtcgcagcctataaggccaacagggacctgatatacaagcagctgcagcaggcggtcacaggcatttccaatgcagcccaggccactgcctcagacgatgcctcacagcaccagggtggaggaggaggagaactggcatatgcactcaataactttgacaaacaaatcattgtggaccccttgagcttcagcgaggagcgctttaggccttccctggaggagcgtctggaaagcatcattagtggggctgccttgatggccgactcgtcctgcacgcgtgatgaccgtcgtgagcgaattgtggcagagtgtaatgctgtccgccaggccctgcaggacctgctttcggagtacatgggcaatgctggacgtaaagaaagaagtgatgcactcaattctgcaatagataaaatgaccaagaagaccagggacttgcgtagacagctccgcaaagctgtcatggaccacgtttcagattctttcctggaaaccaatgttccacttttggtattgattgaagctgcaaagaatggaaatgagaaagaagttaaggagtatgcccaagttttccgtgaacatgccaacaaattgattgaggttgccaacttggcctgttccatctcaaataatgaagaaggtgtaaagcttgttcgaatgtctgcaagccagttagaagccctctgtcctcaggttattaatgctgcactggctttagcagcaaaaccacagagtaaactggcccaagagaacatggatctttttaaagaacaatgggaaaaacaagtccgtgttctcacagatgctgtcgatgacattacttccattgatgacttcttggctgtctcagagaatcacattttggaagatgtgaacaaatgtgtcattgctctccaagagaaggatgtggatggcctggaccgcacagctggtgcaattcgaggccgggcagcccgggtcattcacgtagtcacctcagagatggacaactatgagccaggagtctacacagagaaggttctggaagccactaagctgctctccaacacagtcatgccacgttttactgagcaagtagaagcagccgtggaagccctcagctcggaccctgcccagcccatggatgagaatgagtttatcgatgcttcccgcctggtatatgatggcatccgggacatcaggaaagcagtgctgatgataaggacccctgaggagttggatgactctgactttgagacagaagattttgatgtcagaagcaggacgagcgtccagacagaagacgatcagctgatagctggccagagtgcccgggcgatcatggctcagcttccccaggagcaaaaagcgaagattgcggaacaggtggccagcttccaggaagaaaagagcaagctggatgctgaagtgtccaaatgggacgacagtggcaatgacatcattgtgctggccaagcagatgtgcatgattatgatggagatgacagactttacccgaggtaaaggaccactcaaaaatacatcggatgtcatcagtgctgccaagaaaattgctgaggcaggatccaggatggacaagcttggccgcaccattgcagaccattgccccgactcggcttgcaagcaggacctgctggcctacctgcaacgcatcgccctctactgccaccagctgaacatctgcagcaaggtcaaggccgaggtgcagaatctcggcggggagcttgttgtctctggggtggacagcgccatgtccctgatccaggcagccaagaacttgatgaatgctgtggtgcagacagtgaaggcatcctacgtcgcctctaccaaataccaaaagtcacagggtatggcttccctcaaccttcctgctgtgtcatggaagatgaaggcaccagagaaaaagccattggtgaagagagagaaacaggatgagacacagaccaagattaaacgggcatctcagaagaagcacgtgaacccggtgcaggccctcagcgagttcaaagctatggacagcatctaagtctgcccaggccggccgcccccacccctcggggctcctgaatatcagtcactgttcgtcactcaaatgaatttgctaaatacaacactgatactagattccacagggaaatgggcagactgaaccagtccaggtggtgaattttccaagaacatagtttaagttgattaaaaatgcttttagaatgcaggagcctacttctagctgtattttttgtatgcttaaataaaaataaaaattcataaccaaagagaatcccacattagcttgttagtaatgctctgaccaagccgagatgcccattctcttagtgatggcggcgttagggtttgagagaagggaatttggctcaacttcagttgagagggtgcagtccagacagcttgactgcttttaaatgaccaaagatgacctgtggtaagcaacctgggcatcttaggaagcagtccctggagaaggcatgttcccagaaaggtctctggagggacaaactcactcagtaaaacataatgtatcatgaagaaaactgattctctatgacatgaaatgaaaattttaatgcattgttataattactaatgtacgctgctgcaggacattaataaagttgcttttttaggctacagtgtctcgatgccataatcagaacacactttttttcctctttctcccagcttcaaatgcaaattcatcattgggctcacttctaataactgcagtgtttcccgccttgggcttgcagcagaaaaacctgacaacatagtgtttgctaaggcagtaatttagactttaccttatttgtgattactgtagtgattgattgattgattactattaactacaaggtataatttactatcaccttatttaaattttatgaattaatttgaatgttttttacactaactaacttttcccaataaagtccactatgaaaccacgaca

SEQ ID NO: 114858 - DNA, 3536 bp, Homo sapiens
  Payload ID: 2439
  Gene Symbol: CTNNA1
  Gene Name: catenin (cadherin-associated protein), alpha 1, 102kDa
  ENST ID: ENST00000518825
  CDS Start-End: 3-2528
aaatgactgctgtccatgcaggcaacataaacttcaagtgggatcctaaaagtctagagatcaggactctggcagttgagagactgttggagcctcttgttacacaggttacaacccttgtaaacaccaatagtaaagggccctctaataagaagagaggtcgttctaagaaggcccatgttttggctgcatctgttgaacaagcaactgagaatttcttggagaagggggataaaattgcgaaggagagccagtttctcaaggaggagcttgtggctgctgtagaagatgttcgaaaacaaggtgatttgatgaaggctgctgcaggagagttcgcagatgatccctgctcttctgtgaagcgaggcaacatggttcgggcagctcgagctttgctctctgctgttacccggttgctgattttggctgacatggcagatgtctacaaattacttgttcagctgaaagttgtggaagatggtatcttgaagttgaggaatgctggcaatgaacaagacttaggaatccagtataaagccctaaaacctgaagtggataagctgaacattatggcagccaaaagacaacaggaattgaaagatgttggccatcgtgatcagatggctgcagctagaggaatcctgcagaagaacgttccgatcctctatactgcatcccaggcatgcctacagcaccctgatgtcgcagcctataaggccaacagggacctgatatacaagcagctgcagcaggcggtcacaggcatttccaatgcagcccaggccactgcctcagacgatgcctcacagcaccagggtggaggaggaggagaactggcatatgcactcaataactttgacaaacaaatcattgtggaccccttgagcttcagcgaggagcgctttaggccttccctggaggagcgtctggaaagcatcattagtggggctgccttgatggccgactcgtcctgcacgcgtgatgaccgtcgtgagcgaattgtggcagagtgtaatgctgtccgccaggccctgcaggacctgctttcggagtacatgggcaatgctggacgtaaagaaagaagtgatgcactcaattctgcaatagataaaatgaccaagaagaccagggacttgcgtagacagctccgcaaagctgtcatggaccacgtttcagattctttcctggaaaccaatgttccacttttggtattgattgaagctgcaaagaatggaaatgagaaagaagttaaggagtatgcccaagttttccgtgaacatgccaacaaattgattgaggttgccaacttggcctgttccatctcaaataatgaagaaggtgtaaagcttgttcgaatgtctgcaagccagttagaagccctctgtcctcaggttattaatgctgcactggctttagcagcaaaaccacagagtaaactggcccaagagaacatggatctttttaaagaacaatgggaaaaacaagtccgtgttctcacagatgctgtcgatgacattacttccattgatgacttcttggctgtctcagagaatcacattttggaagatgtgaacaaatgtgtcattgctctccaagagaaggatgtggatggcctggaccgcacagctggtgcaattcgaggccgggcagcccgggtcattcacgtagtcacctcagagatggacaactatgagccaggagtctacacagagaaggttctggaagccactaagctgctctccaacacagtcatgccacgttttactgagcaagtagaagcagccgtggaagccctcagctcggaccctgcccagcccatggatgagaatgagtttatcgatgcttcccgcctggtatatgatggcatccgggacatcaggaaagcagtgctgatgataaggacccctgaggagttggatgactctgactttgagacagaagattttgatgtcagaagcaggacgagcgtccagacagaagacgatcagctgatagctggccagagtgcccgggcgatcatggctcagcttccccaggagcaaaaagcgaagattgcggaacaggtggccagcttccaggaagaaaagagcaagctggatgctgaagtgtccaaatgggacgacagtggcaatgacatcattgtgctggccaagcagatgtgcatgattatgatggagatgacagactttacccgaggtaaaggaccactcaaaaatacatcggatgtcatcagtgctgccaagaaaattgctgaggcaggatccaggatggacaagcttggccgcaccattgcagaccattgccccgactcggcttgcaagcaggacctgctggcctacctgcaacgcatcgccctctactgccaccagctgaacatctgcagcaaggtcaaggccgaggtgcagaatctcggcggggagcttgttgtctctgggaactgtgacacctgcggggcactgcaagggctgaaaggctggcctcctcccctttgctggccactcactgggtggacagcgccatgtccctgatccaggcagccaagaacttgatgaatgctgtggtgcagacagtgaaggcatcctacgtcgcctctaccaaataccaaaagtcacagggtatggcttccctcaaccttcctgctgtgtcatggaagatgaaggcaccagagaaaaagccattggtgaagagagagaaacaggatgagacacagaccaagattaaacgggcatctcagaagaagcacgtgaacccggtgcaggccctcagcgagttcaaagctatggacagcatctaagtctgcccaggccggccgcccccacccctcggggctcctgaatatcagtcactgttcgtcactcaaatgaatttgctaaatacaacactgatactagattccacagggaaatgggcagactgaaccagtccaggtggtgaattttccaagaacatagtttaagttgattaaaaatgcttttagaatgcaggagcctacttctagctgtattttttgtatgcttaaataaaaataaaaattcataaccaaagagaatcccacattagcttgttagtaatgctctgaccaagccgagatgcccattctcttagtgatggcggcgttagggtttgagagaagggaatttggctcaacttcagttgagagggtgcagtccagacagcttgactgcttttaaatgaccaaagatgacctgtggtaagcaacctgggcatcttaggaagcagtccctggagaaggcatgttcccagaaaggtctctggagggacaaactcactcagtaaaacataatgtatcatgaagaaaactgattctctatgacatgaaatgaaaattttaatgcattgttataattactaatgtacgctgctgcaggacattaataaagttgcttttttaggctacagtgtctcgatgccataatcagaacacactttttttcctctttctcccagcttcaaatgcaaattcatcattgggctcacttctaataactgcagtgtttcccgccttgggcttgcag

SEQ ID NO: 114859 - DNA, 577 bp, Homo sapiens
  Payload ID: 2439
  Gene Symbol: CTNNA1
  Gene Name: catenin (cadherin-associated protein), alpha 1, 102kDa
  ENST ID: ENST00000523298
  CDS Start-End: 247-577
cttttgtttgggttttccagaagctttactgttataaagcaccatgctttgtaacagcatcggggtcgttgcaggaccccctgattacaataaagcgagaaagaagaactcctgacttaaaaacatgatattccttcagtgtaggaagcagcagtgaggttgtaataaaggctgcattcaagaagacccatctgaacagctggacgtaaagaaagaagtgatgcactcaattctgcaatagataaaatgaccaagaagaccagggacttgcgtagacagctccgcaaagctgtcatggaccacgtttcagattctttcctggaaaccaatgttccacttttggtattgattgaagctgcaaagaatggaaatgagaaagaagttaaggagtatgcccaagttttccgtgaacatgccaacaaattgattgaggttgccaacttggcctgttccatctcaaataatgaagaaggtgtaaagcttgttcgaatgtctgcaagccagttagaagccctctgtcctcaggttattaatgctgcactggctttagcagcaaaaccacagagtaaactggccc

SEQ ID NO: 114860 - DNA, 483 bp, Homo sapiens
  Payload ID: 2439
  Gene Symbol: CTNNA1
  Gene Name: catenin (cadherin-associated protein), alpha 1, 102kDa
  ENST ID: ENST00000524127
  CDS Start-End: 202-483
agttccaggcagagggaacagccaaggcaagagcactgaggataccccaaaccaagacagatgtctcacaaaacacaagcagagatgtcagtcttcaggcctcgcatggagaagatgaaagagaggggtggcttttccaaagcccagcgtcagcacgaagcttccacgagatgattttccctcttattttgaagtcctgaaatgactgctgtccatgcaggcaacataaacttcaagtgggatcctaaaagtctagagatcaggactctggcagttgagagactgttggagcctcttgttacacaggttacaacccttgtaaacaccaatagtaaagggccctctaataagaagagaggtcgttctaagaaggcccatgttttggctgcatctgttgaacaagcaactgagaatttcttggagaagggggataaaattgcgaaggagagccagtttctcaaggaggagcttgtggctgctgta

SEQ ID NO: 114861 - DNA, 589 bp, Homo sapiens
  Payload ID: 2439
  Gene Symbol: CTNNA1
  Gene Name: catenin (cadherin-associated protein), alpha 1, 102kDa
  ENST ID: ENST00000519634
  CDS Start-End: 438-589
ataaagcaccatgctttgtaacagcatcggggtcgttgcaggaccccctgattacaataaagcgagaaagaagaactcctgacttaaaaacatgatattccttcagtgtaggaagcagcagtgaggttgtaataaaggctgcattcaagaagacccatctgaacagttggagtgcagtggcgtaacctcccaggctccattgatctccctccttagcctcccagatagctgggactacagatggcccaaggggctatacaaagaaagctgtttgcacaggatagaattaagagcagcatgtcagcattccgtctgcagttgagatgttgattcctccttgtattgcacattgctgaaaggggcttcctgaggctggagagagcagtgaggctggacgtaaagaaagaagtgatgcactcaattctgcaatagataaaatgaccaagaagaccagggacttgcgtagacagctccgcaaagctgtcatggaccacgtttcagattctttcctggaaaccaatgttccacttttggtattgattgaagctgcaaagaatggaaatgagaaagaagttaaggagtatgccca

SEQ ID NO: 114862 - DNA, 868 bp, Homo sapiens
  Payload ID: 2439
  Gene Symbol: CTNNA1
  Gene Name: catenin (cadherin-associated protein), alpha 1, 102kDa
  ENST ID: ENST00000520339
  CDS Start-End: 566-868
ccatttcctcctcctagccggactggagggagacaaagcagcgcccgtctgcttcgggcctctggaatttagcgctcgcccagctagccgcaggaagaatgaagaatgagtgtaggagttacctatagtttctgcctaattatttaccaatctggacttttgaacaaacattttttttaaagacggggtctccgtcgcccgggctggagcgcagtgacacgatcatgactcactgcggcttctgtctcctgggctcaagtgatccccccacctcggcttccgaagtagttgggactacaggcacgcgccaccacatccgtctaatttttgtatttttggtagagatggtgtctcgctgtcttgcccaagctggtctcgaactcctgggctcaagtggtcctcctgcctcagcctcccaaagtgttgtgattacaggcctgagccagggtgcctgaccccatctggatatttattcagcgaaagaataattttttaatccacctaagagctcacagtgtaataggggagacacacaccccaggtgtagtacagagcggactgcaaaatgactgctgtccatgcaggcaacataaacttcaagtgggatcctaaaagtctagagatcaggactctggcagttgagagactgttggagcctcttgttacacaggttacaacccttgtaaacaccaatagtaaagggccctctaataagaagagaggtcgttctaagaaggcccatgttttggctgcatctgttgaacaagcaactgagaatttcttggagaagggggataaaattgcgaaggagagccagtttctcaaggaggagcttgtggctgctgtagaagatgttcgaaaacaaggt

SEQ ID NO: 114863 - DNA, 696 bp, Homo sapiens
  Payload ID: 2439
  Gene Symbol: CTNNA1
  Gene Name: catenin (cadherin-associated protein), alpha 1, 102kDa
  ENST ID: ENST00000517980
  CDS Start-End: 344-696
aggagggggttgggcagtcgctggcgctgccgctggtggtccctgtgcttgaagtgccggtggtatcggagtccatgcacccaaggcccagcacccagcaacattctctggcccagcagagggggttattgtgaagatcaaatgacacattccctttggaaactcttaaaggctttacaaaggataccccaaaccaagacagatgtctcacaaaacacaagcagagatgtcagtcttcaggcctcgcatggagaagatgaaagagaggggtggcttttccaaagcccagcgtcagcacgaagcttccacgagatgattttccctcttattttgaagtcctgaaatgactgctgtccatgcaggcaacataaacttcaagtgggatcctaaaagtctagagatcaggactctggcagttgagagactgttggagcctcttgttacacaggttacaacccttgtaaacaccaatagtaaagggccctctaataagaagagaggtcgttctaagaaggcccatgttttggctgcatctgttgaacaagcaactgagaatttcttggagaagggggataaaattgcgaaggagagccagtttctcaaggaggagcttgtggctgctgtagaagatgttcgaaaacaaggtgatttgatgaaggctgctgcaggagagttcgcagatgatccctgctcttc

SEQ ID NO: 114864 - DNA, 544 bp, Homo sapiens
  Payload ID: 2439
  Gene Symbol: CTNNA1
  Gene Name: catenin (cadherin-associated protein), alpha 1, 102kDa
  ENST ID: ENST00000521368
  CDS Start-End: 1-67
tgttcgaatgtctgcaagccagttagaagccctctgtcctcagagaatcacattttggaagatgtgaacaaatgtgtcattgctctccaagagaaggatgtggatggcctggaccgcacagctggtgcaattcgaggccgggcagcccgggtcattcacgtagtcacctcagagatggacaactatgagccaggagtctacacagagaaggttctggaagccactaagctgctctccaacacagtcatgccacgttttactgagcaagtagaagcagccgtggaagccctcagctcggaccctgcccagcccatggatgagaatgagtttatcgatgcttcccgcctggtatatgatggcatccgggacatcaggaaagcagtgctgatgataaggacccctgaggagttggatgactctgactttgagacagaagattttgatgtcagaagcaggacgagcgtccagacagaagacgatcagctgatagctggccagagtgcccgggcgatcatggctcagcttccccaggagcaaaaagcga

SEQ ID NO: 114865 - DNA, 390 bp, Homo sapiens
  Payload ID: 2439
  Gene Symbol: CTNNA1
  Gene Name: catenin (cadherin-associated protein), alpha 1, 102kDa
  ENST ID: ENST00000520522
  CDS Start-End: 239-390
gtctcactgtgttgcccaggttggagtgcagtggcgtaacctcccaggctccattgatctccctccttagcctcccagatagctgggactacagcagcatgtcagcattccgtctgcagttgagatgttgattcctccttgtattgcacattgctgaaaggggcttcctgaggctggagagagcagtgaggctggacgtaaagaaagaagtgatgcactcaattctgcaatagataaaatgaccaagaagaccagggacttgcgtagacagctccgcaaagctgtcatggaccacgtttcagattctttcctggaaaccaatgttccacttttggtattgattgaagctgcaaagaatggaaatgagaaagaagttaaggagtatgccca

SEQ ID NO: 114866 - DNA, 562 bp, Homo sapiens
  Payload ID: 2439
  Gene Symbol: CTNNA1
  Gene Name: catenin (cadherin-associated protein), alpha 1, 102kDa
  ENST ID: ENST00000519116
  CDS Start-End: 288-562
gtcgttgcaggaccccctgattacaataaagcgagaaagaagaactcctgacttaaaaacatgatattccttcagtgtaggaagcagcagtgaggttgtaataaaggctgcattcaagaagacccatctgaacagtgagttggcagcatgtcagcattccgtctgcagttgagatgttgattcctccttgtattgcacattgctgaaaggggcttcctgaggctggagagagcagtgaggctggacgtaaagaaagaagtgatgcactcaattctgcaatagataaaatgaccaagaagaccagggacttgcgtagacagctccgcaaagctgtcatggaccacgtttcagattctttcctggaaaccaatgttccacttttggtattgattgaagctgcaaagaatggaaatgagaaagaagttaaggagtatgcccaagttttccgtgaacatgccaacaaattgattgaggttgccaacttggcctgttccatctcaaataatgaagaaggtgtaaagcttgttcgaatgtctgcaagccagttagaagccctctgtcc

SEQ ID NO: 114867 - DNA, 560 bp, Homo sapiens
  Payload ID: 2439
  Gene Symbol: CTNNA1
  Gene Name: catenin (cadherin-associated protein), alpha 1, 102kDa
  ENST ID: ENST00000519768
  CDS Start-End: 500-560
agcaccatgctttgtaacagcatcggggtcgttgcaggaccccctgattacaataaagcgagaaagaagaactcctgacttaaaaacatgatattccttcagtgtaggaagcagcagtgaggttgtaataaaggctgcattcaagaagacccatctgaacagtgagttgggttagcagagtgatgatttttaatgcttgtgagagccagtgttagactgccgattctgcatagagagatcatctaaatgggcagaagcctgcacaatttatgaagtgctgatttaacaccagcctatgcaagatggcccaaggggctatacaaagaaagctgtttgcacaggatagaattaagagcagcatgtcagcattccgtctgcagttgagatgttgattcctccttgtattgcacattgctgaaaggggcttcctgaggctggagagagcagtgaggctggacgtaaagaaagaagtgatgcactcaattctgcaatagataaaatgaccaagaagaccagggacttgcgtagacagctccgcaaagctgtcatggaccacgttt

SEQ ID NO: 114868 - DNA, 536 bp, Homo sapiens
  Payload ID: 2439
  Gene Symbol: CTNNA1
  Gene Name: catenin (cadherin-associated protein), alpha 1, 102kDa
  ENST ID: ENST00000523275
  CDS Start-End: 1-390
aagcagctgcagcaggcggtcacaggcatttccaatgcagcccaggccactgcctcagacgatgcctcacagcaccagggtggaggaggaggagaactggcatatgcactcaataactttgacaaacaaatcattgtggaccccttgagcttcagcgaggagcgctttaggccttccctggaggagcgtctggaaagcatcattagtggggctgccttgatggccgactcgtcctgcacgcgtgatgaccgtcgtgagcgaattgtggcagagtgtaatgctgtccgccaggccctgcaggacctgctttcggagtacatgggcaatcagcatgtcagcattccgtctgcagttgagatgttgattcctccttgtattgcacattgctgaaaggggcttcctgaggctggagagagcagtgaggctggacgtaaagaaagaagtgatgcactcaattctgcaatagataaaatgaccaagaagaccagggacttgcgtagacagctccgcaaagctgtcatggaccacgtttcaga

SEQ ID NO: 114869 - DNA, 719 bp, Homo sapiens
  Payload ID: 2439
  Gene Symbol: CTNNA1
  Gene Name: catenin (cadherin-associated protein), alpha 1, 102kDa
  ENST ID: ENST00000520158
  CDS Start-End: 73-719
ggcggcggttggcccagttccaaggttgactccctcttacgtcctcttgcatcttggtgacatttttttgaaatgactgctgtccatgcaggcaacataaacttcaagtgggatcctaaaagtctagagatcaggactctggcagttgagagactgttggagcctcttgttacacaggttacaacccttgtaaacaccaatagtaaagggccctctaataagaagagaggtcgttctaagaaggcccatgttttggctgcatctgttgaacaagcaactgagaatttcttggagaagggggataaaattgcgaaggagagccagtttctcaaggaggagcttgtggctgctgtagaagatgttcgaaaacaaggtgatttgatgaaggctgctgcaggagagttcgcagatgatccctgctcttctgtgaagcgaggcaacatggttcgggcagctcgagctttgctctctgctgttacccggttgctgattttggctgacatggcagatgtctacaaattacttgttcagctgaaagttgtggaagatggtatcttgaagttgaggaatgctggcaatgaacaagacttaggaatccagtataaagccctaaaacctgaagtggataagctgaacattatggcagccaaaagacaacaggaattgaaagatgttggccatcgtgatcagatggctgcagctagaggaatcctgcagaa

SEQ ID NO: 114870 - DNA, 710 bp, Homo sapiens
  Payload ID: 2439
  Gene Symbol: CTNNA1
  Gene Name: catenin (cadherin-associated protein), alpha 1, 102kDa
  ENST ID: ENST00000520260
  CDS Start-End: 615-710
gcagagaagagctcctggagcagcatgagtgcatttactgaaaagcttttccgagaaacggcacaagaatggatttgcttatgtgctgcgaccacacagaactgtatataggctgacgtcaccggatgacgtgtcttttgtttgggttttccagaagctttactgttataaagcaccatgctttgtaacagcatcggggtcgttgcaggaccccctgattacaataaagcgagaaagaagaactcctgacttaaaaacatgatattccttcagtgtaggaagcagcagtgaggttgtaataaaggctgcattcaagaagacccatctgaacagtgagttgggttagcagagtgatgatttttaatgcttgtgagagccagtgttagactgccgattctgcatagagagatcatctaaatgggcagaagcctgcacaatttatgaagtgctgatttaacaccagcctatgcaagcatgtcagcattccgtctgcagttgagatgttgattcctccttgtattgcacattgctgaaaggggcttcctgaggctggagagagcagtgaggctggacgtaaagaaagaagtgatgcactcaattctgcaatagataaaatgaccaagaagaccagggacttgcgtagacagctccgcaaagctgtcatggaccacgtttcagattctttcctggaaaccaatgttccacttttg

SEQ ID NO: 114871 - DNA, 642 bp, Homo sapiens
  Payload ID: 2439
  Gene Symbol: CTNNA1
  Gene Name: catenin (cadherin-associated protein), alpha 1, 102kDa
  ENST ID: ENST00000522227
  CDS Start-End: 274-642
gggcagtcgctggcgctgccgctggtggtccctgtgcttgaagtgccggtggtatcggagtccatgcacccaaggcccagcacccagcaacattctctggcccagcagaggggataccccaaaccaagacagatgtctcacaaaacacaagcagagatgtcagtcttcaggcctcgcatggagaagatgaaagagaggggtggcttttccaaagcccagcgtcagcacgaagcttccacgagatgattttccctcttattttgaagtcctgaaatgactgctgtccatgcaggcaacataaacttcaagtgggatcctaaaagtctagagatcaggactctggcagttgagagactgttggagcctcttgttacacaggttacaacccttgtaaacaccaatagtaaagggccctctaataagaagagaggtcgttctaagaaggcccatgttttggctgcatctgttgaacaagcaactgagaatttcttggagaagggggataaaattgcgaaggagagccagtttctcaaggaggagcttgtggctgctgtagaagatgttcgaaaacaaggtgatttgatgaaggctgctgcaggagagttcgcagatgatccctgctcttctgtgaagcgaggcaac

SEQ ID NO: 114872 - DNA, 487 bp, Homo sapiens
  Payload ID: 2439
  Gene Symbol: CTNNA1
  Gene Name: catenin (cadherin-associated protein), alpha 1, 102kDa
  ENST ID: ENST00000518381
  CDS Start-End: 263-487
gtactgggatagtccgcagggagttggaacgtaaatgcaaggtctgcagcttccgaaggccatagaagagctctgggtgcagagatgacagctgattaaaagacaggtccaaattttgcagcatgtcagcattccgtctgcagttgagatgttgattcctccttgtattgcacattgctgaaaggggcttcctgaggctggagagagcagtgaggctggacgtaaagaaagaagtgatgcactcaattctgcaatagataaaatgaccaagaagaccagggacttgcgtagacagctccgcaaagctgtcatggaccacgtttcagattctttcctggaaaccaatgttccacttttggtattgattgaagctgcaaagaatggaaatgagaaagaagttaaggagtatgcccaagttttccgtgaacatgccaacaaattgattgaggttgccaacttggcctgttccatctcaaataatgaagaa

SEQ ID NO: 114873 - DNA, 484 bp, Homo sapiens
  Payload ID: 2439
  Gene Symbol: CTNNA1
  Gene Name: catenin (cadherin-associated protein), alpha 1, 102kDa
  ENST ID: ENST00000520520
  CDS Start-End: 1-411
atgacagactttacccgaggtaaaggaccactcaaaaatacatcggatgtcatcagtgctgccaagaaaattgctgaggcaggatccaggatggacaagcttggccgcaccattgcagaccatgtggacagcgccatgtccctgatccaggcagccaagaacttgatgaatgctgtggtgcagacagtgaaggcatcctacgtcgcctctaccaaataccaaaagtcacagggtatggcttccctcaaccttcctgctgtgtcatggaagatgaaggcaccagagaaaaagccattggtgaagagagagaaacaggatgagacacagaccaagattaaacgggcatctcagaagaagcacgtgaacccggtgcaggccctcagcgagttcaaagctatggacagcatctaagtctgcccaggccggccgcccccacccctcggggctcctgaatatcagtcactgttcgtcactcaaatgaatt

SEQ ID NO: 114874 - DNA, 859 bp, Homo sapiens
  Payload ID: 2439
  Gene Symbol: CTNNA1
  Gene Name: catenin (cadherin-associated protein), alpha 1, 102kDa
  ENST ID: ENST00000519113
  CDS Start-End: 441-859
ccccgggcgggcgtgggacccgcgtcgggccggcggtcccttcccccgcagggcccgagtatggggcccgggcgggcacggccggcgcttcccagcgctcgggaagtcggggggccgcctgggctggggaggagaaactataggcccagcgccgccgccgcgtttcctcttggaaaagttttctcgcggtttccaaactttgttaccgcggcctcggcgcgcgcggcagccccgcgccgggcccctcggccgccttccttccctggggcggcttgtctgggagccgctttcccgggaagtgattgtcgtccggctccgaggcgttcctgccccctcccccttcccggccgctgagacttcccgatggggcggcggggacgcgggctcggcgaaccgggaggctggagcccgggcttctcccatacagcttcgccgtagaaatgactgctgtccatgcaggcaacataaacttcaagtgggatcctaaaagtctagagatcaggactctggcagttgagagactgttggagcctcttgttacacaggttacaacccttgtaaacaccaatagtaaagggccctctaataagaagagaggtcgttctaagaaggcccatgttttggctgcatctgttgaacaagcaactgagaatttcttggagaagggggataaaattgcgaaggagagccagtttctcaaggaggagcttgtggctgctgtagaagatgttcgaaaacaaggtgatttgatgaaggctgctgcaggagagttcgcagatgatccctgctcttctgtgaagcgaggcaacatggttcgggcagctcgagctttgctctctgctgttacccggttgctgat

SEQ ID NO: 114875 - DNA, 554 bp, Homo sapiens
  Payload ID: 2439
  Gene Symbol: CTNNA1
  Gene Name: catenin (cadherin-associated protein), alpha 1, 102kDa
  ENST ID: ENST00000517656
  CDS Start-End: 437-554
accatgctttgtaacagcatcggggtcgttgcaggaccccctgattacaataaagcgagaaagaagaactcctgacttaaaaacatgatattccttcagtgtaggaagcagcagtgaggttgtaataaaggctgcattcaagaagacccatctgaacagtgagttgggttggagtgcagtggcgtaacctcccaggctccattgatctccctccttagcctcccagatagctgggactacagatggcccaaggggctatacaaagaaagctgtttgcacaggatagaattaagagcatgtcagcattccgtctgcagttgagatgttgattcctccttgtattgcacattgctgaaaggggcttcctgaggctggagagagcagtgaggctggacgtaaagaaagaagtgatgcactcaattctgcaatagataaaatgaccaagaagaccagggacttgcgtagacagctccgcaaagctgtcatggaccacgtttcagattctttcctggaaaccaatgttccacttttggtattgattgaagctgcaaaga

SEQ ID NO: 114876 - DNA, 694 bp, Homo sapiens
  Payload ID: 2439
  Gene Symbol: CTNNA1
  Gene Name: catenin (cadherin-associated protein), alpha 1, 102kDa
  ENST ID: ENST00000523685
  CDS Start-End: 310-694
ataaagcaccatgctttgtaacagcatcggggtcgttgcaggaccccctgattacaataaagcgagaaagaagaactcctgacttaaaaacatgatattccttcagtgtaggaagcagcagtgaggttgtaataaaggctgcattcaagaagacccatctgaacacagcatgtcagcattccgtctgcagttgagatgttgattcctccttgtattgcacattgctgaaaggggcttcctgaggctggagagagcagtgaggctggacgtaaagaaagaagtgatgcactcaattctgcaatagataaaatgaccaagaagaccagggacttgcgtagacagctccgcaaagctgtcatggaccacgtttcagattctttcctggaaaccaatgttccacttttggtattgattgaagctgcaaagaatggaaatgagaaagaagttaaggagtatgcccaagttttccgtgaacatgccaacaaattgattgaggttgccaacttggcctgttccatctcaaataatgaagaaggtgtaaagcttgttcgaatgtctgcaagccagttagaagccctctgtcctcaggttattaatgctgcactggctttagcagcaaaaccacagagtaaactggcccaagagaacatggatctttttaaagaacaatgggaaaaacaagtccgtgttctca

SEQ ID NO: 114877 - DNA, 545 bp, Homo sapiens
  Payload ID: 2439
  Gene Symbol: CTNNA1
  Gene Name: catenin (cadherin-associated protein), alpha 1, 102kDa
  ENST ID: ENST00000523912
  CDS Start-End: 78-545
accgctcctcctccctctcaggggtcactcccggcctaagctcccactaggggccggggaggaaggaattctgagaaatgactgctgtccatgcaggcaacataaacttcaagtgggatcctaaaagtctagagatcaggactctggcagttgagagactgttggagcctcttgttacacaggttacaacccttgtaaacaccaatagtaaagggccctctaataagaagagaggtcgttctaagaaggcccatgttttggctgcatctgttgaacaagcaactgagaatttcttggagaagggggataaaattgcgaaggagagccagtttctcaaggaggagcttgtggctgctgtagaagatgttcgaaaacaaggtgatttgatgaaggctgctgcaggagagttcgcagatgatccctgctcttctgtgaagcgaggcaacatggttcgggcagctcgagctttgctctctgctgttacccggttgctgattttggctgacatggcagatgtctacaaattacttgttcagctgaaagtt

SEQ ID NO: 114878 - DNA, 874 bp, Homo sapiens
  Payload ID: 2439
  Gene Symbol: CTNNA1
  Gene Name: catenin (cadherin-associated protein), alpha 1, 102kDa
  ENST ID: ENST00000522013
  CDS Start-End: 558-874
ggtcttaacttgttgatggcagatgggtggcttgttgcagagaagagctcctggagcagcatgagtgcatttactgaaaagcttttccgagaaacggcacaagaatggatttgcttatgtgctgcgaccacacagaactgtatataggctgacgtcaccggatgacgtgtcttttgtttgggttttccagaagctttactgttataaagcaccatgctttgtaacagcatcggggtcgttgcaggaccccctgattacaataaagcgagaaagaagaactcctgacttaaaaacatgatattccttcagtgtaggaagcagcagtgaggttgtaataaaggctgcattcaagaagacccatctgaacagtgagttgggttagcagagtgatgatttttaatgcttgtgagagccagtgttagactgccgattctgcatagagagatcatctaaatgggcagaagcctgcacaatttatgaagtgctgatttaacaccagcctatgcaaggctggacgtaaagaaagaagtgatgcactcaattctgcaatagataaaatgaccaagaagaccagggacttgcgtagacagctccgcaaagctgtcatggaccacgtttcagattctttcctggaaaccaatgttccacttttggtattgattgaagctgcaaagaatggaaatgagaaagaagttaaggagtatgcccaagttttccgtgaacatgccaacaaattgattgaggttgccaacttggcctgttccatctcaaataatgaagaaggtgtaaagcttgttcgaatgtctgcaagccagttagaagccctctgtcctcaggttattaatgctgcactggctttagcagcaaaaccaca

SEQ ID NO: 114879 - DNA, 568 bp, Homo sapiens
  Payload ID: 2439
  Gene Symbol: CTNNA1
  Gene Name: catenin (cadherin-associated protein), alpha 1, 102kDa
  ENST ID: ENST00000521640
  CDS Start-End: 447-568
atgctttgtaacagcatcggggtcgttgcaggaccccctgattacaataaagcgagaaagaagaactcctgacttaaaaacatgatattccttcagtgtaggaagcagcagtgaggttgtaataaaggctgcattcaagaagacccatctgaacagtctcactgtgttgcccaggttggagtgcagtggcgtaacctcccaggctccattgatctccctccttagcctcccagatagctgggactacagatggcccaaggggctatacaaagaaagctgtttgcacaggatagaattaagagcagcatgtcagcattccgtctgcagttgagatgttgattcctccttgtattgcacattgctgaaaggggcttcctgaggctggagagagcagtgaggctggacgtaaagaaagaagtgatgcactcaattctgcaatagataaaatgaccaagaagaccagggacttgcgtagacagctccgcaaagctgtcatggaccacgtttcagattctttcctggaaaccaatgttccacttttggtattgattgaagctgcaaagaatgg

SEQ ID NO: 114880 - DNA, 572 bp, Homo sapiens
  Payload ID: 2439
  Gene Symbol: CTNNA1
  Gene Name: catenin (cadherin-associated protein), alpha 1, 102kDa
  ENST ID: ENST00000518910
  CDS Start-End: 89-572
ctagccggactggagggagacaaagcagcgcccgtctgcttcgggcctctggaatttagcgctcgcccagctagccgcaggtgatttgatgaaggctgctgcaggagagttcgcagatgatccctgctcttctgtgaagcgaggcaacatggttcgggcagctcgagctttgctctctgctgttacccggttgctgattttggctgacatggcagatgtctacaaattacttgttcagctgaaagttgtggaagatggtatcttgaagttgaggaatgctggcaatgaacaagacttaggaatccagtataaagccctaaaacctgaagtggataagctgaacattatggcagccaaaagacaacaggaattgaaagatgttggccatcgtgatcagatggctgcagctagaggaatcctgcagaagaacgttccgatcctctatactgcatcccaggcatgcctacagcaccctgatgtcgcagcctataaggccaacagggacctgatatacaagcagctgcagcaggcggtcacaggcatttccaatgcagcccaggccactgcctcag

SEQ ID NO: 114881 - DNA, 869 bp, Homo sapiens
  Payload ID: 2439
  Gene Symbol: CTNNA1
  Gene Name: catenin (cadherin-associated protein), alpha 1, 102kDa
  ENST ID: ENST00000519309
  CDS Start-End: 68-235
ggagacaaagcagcgcccgtctgcttcgggcctctggaatttagcgctcgcccagctagccgcagaaatgactgctgtccatgcaggcaacataaacttcaagtgggatcctaaaagtctagagatcaggactctggcagttgagagactgttggagcctcttgttacacagatacttcacctttcttcagaggggaaacccaagaaaggtggagtctggatccttgattgttaaggtctctcactctgcttaacacacctttcattgtgtgggattaattagcaggttacaacccttgtaaacaccaatagtaaagggccctctaataagaagagaggtcgttctaagaaggcccatgttttggctgcatctgttgaacaagcaactgagaatttcttggagaagggggataaaattgcgaaggagagccagtttctcaaggaggagcttgtggctgctgtagaagatgttcgaaaacaaggtgatttgatgaaggctgctgcaggagagttcgcagatgatccctgctcttctgtgaagcgaggcaacatggttcgggcagctcgagctttgctctctgctgttacccggttgctgattttggctgacatggcagatgtctacaaattacttgttcagctgaaagttgtggaagatggtatcttgaagttgaggaatgctggcaatgaacaagacttaggaatccagtataaagccctaaaacctgaagtggataagctgaacattatggcagccaaaagacaacaggaattgaaagatgttggccatcgtgatcagatggctgcagctagaggaatcctgcagaagaacgttccgatcctctatactgcatcccaggcatgcctac

SEQ ID NO: 114882 - DNA, 557 bp, Homo sapiens
  Payload ID: 2439
  Gene Symbol: CTNNA1
  Gene Name: catenin (cadherin-associated protein), alpha 1, 102kDa
  ENST ID: ENST00000520865
  CDS Start-End: 448-557
tataaagcaccatgctttgtaacagcatcggggtcgttgcaggaccccctgattacaataaagcgagaaagaagaactcctgacttaaaaacatgatattccttcagtgtaggaagcagcagtgaggttgtaataaaggctgcattcaagaagacccatctgaacagtgagttgggttggagtgcagtggcgtaacctcccaggctccattgatctccctccttagcctcccagatagctgggactacagatggcccaaggggctatacaaagaaagctgtttgcacaggatagaattaagagcagcatgtcagcattccgtctgcagttgagatgttgattcctccttgtattgcacattgctgaaaggggcttcctgaggctggagagagcagtgaggctggacgtaaagaaagaagtgatgcactcaattctgcaatagataaaatgaccaagaagaccagggacttgcgtagacagctccgcaaagctgtcatggaccacgtttcagattctttcctggaaaccaatgttccacttttggtattgattgaagc

SEQ ID NO: 114883 - DNA, 565 bp, Homo sapiens
  Payload ID: 2439
  Gene Symbol: CTNNA1
  Gene Name: catenin (cadherin-associated protein), alpha 1, 102kDa
  ENST ID: ENST00000521683
  CDS Start-End: 353-565
accatgctttgtaacagcatcggggtcgttgcaggaccccctgattacaataaagcgagaaagaagaactcctgacttaaaaacatgatattccttcagtgtaggaagcagcagtgaggttgtaataaaggctgcattcaagaagacccatctgaacaatggcccaaggggctatacaaagaaagctgtttgcacaggatagaattaagagcatgtcagcattccgtctgcagttgagatgttgattcctccttgtattgcacattgctgaaaggggcttcctgaggctggagagagcagtgaggctggacgtaaagaaagaagtgatgcactcaattctgcaatagataaaatgaccaagaagaccagggacttgcgtagacagctccgcaaagctgtcatggaccacgtttcagattctttcctggaaaccaatgttccacttttggtattgattgaagctgcaaagaatggaaatgagaaagaagttaaggagtatgcccaagttttccgtgaacatgccaacaaattgattgaggttgccaacttggcctgttccatctca

SEQ ID NO: 114884 - DNA, 2741 bp, Homo sapiens
  Payload ID: 2439
  Gene Symbol: CTNNA1
  Gene Name: catenin (cadherin-associated protein), alpha 1, 102kDa
  ENST ID: ENST00000521724
  CDS Start-End: 93-206
tttcctcctcctagccggactggagggagacaaagcagcgcccgtctgcttcgggcctctggaatttagcgctcgcccagctagccgcagaaatgactgctgtccatgcaggcaacataaacttcaagtgggatcctaaaagtctagagatcaggactctggcagttgagagactgttggagcctcttgttacacaggtgatttgatgaaggctgctgcaggagagttcgcagatgatccctgctcttctgtgaagcgaggcaacatggttcgggcagctcgagctttgctctctgctgttacccggttgctgattttggctgacatggcagatgtctacaaattacttgttcagctgaaagttgtggaagatggtatcttgaagttgaggaatgctggcaatgaacaagacttaggaatccagtataaagccctaaaacctgaagtggataagctgaacattatggcagccaaaagacaacaggaattgaaagatgttggccatcgtgatcagatggctgcagctagaggaatcctgcagaagaacgttccgatcctctatactgcatcccaggcatgcctacagcaccctgatgtcgcagcctataaggccaacagggacctgatatacaagcagctgcagcaggcggtcacaggcatttccaatgcagcccaggccactgcctcagacgatgcctcacagcaccagggtggaggaggaggagaactggcatatgcactcaataactttgacaaacaaatcattgtggaccccttgagcttcagcgaggagcgctttaggccttccctggaggagcgtctggaaagcatcattagtggggctgccttgatggccgactcgtcctgcacgcgtgatgaccgtcgtgagcgaattgtggcagagtgtaatgctgtccgccaggccctgcaggacctgctttcggagtacatgggcaatgctggacgtaaagaaagaagtgatgcactcaattctgcaatagataaaatgaccaagaagaccagggacttgcgtagacagctccgcaaagctgtcatggaccacgtttcagattctttcctggaaaccaatgttccacttttggtattgattgaagctgcaaagaatggaaatgagaaagaagttaaggagtatgcccaagttttccgtgaacatgccaacaaattgattgaggttgccaacttggcctgttccatctcaaataatgaagaaggtgtaaagcttgttcgaatgtctgcaagccagttagaagccctctgtcctcaggttattaatgctgcactggctttagcagcaaaaccacagagtaaactggcccaagagaacatggatctttttaaagaacaatgggaaaaacaagtccgtgttctcacagatgctgtcgatgacattacttccattgatgacttcttggctgtctcagagaatcacattttggaagatgtgaacaaatgtgtcattgctctccaagagaaggatgtggatggcctggaccgcacagctggtgcaattcgaggccgggcagcccgggtcattcacgtagtcacctcagagatggacaactatgagccaggagtctacacagagaaggttctggaagccactaagctgctctccaacacagtcatgccacgttttactgagcaagtagaagcagccgtggaagccctcagctcggaccctgcccagcccatggatgagaatgagtttatcgatgcttcccgcctggtatatgatggcatccgggacatcaggaaagcagtgctgatgataaggacccctgaggagttggatgactctgactttgagacagaagattttgatgtcagaagcaggacgagcgtccagacagaagacgatcagctgatagctggccagagtgcccgggcgatcatggctcagcttccccaggagcaaaaagcgaagattgcggaacaggtggccagcttccaggaagaaaagagcaagctggatgctgaagtgtccaaatgggacgacagtggcaatgacatcattgtgctggccaagcagatgtgcatgattatgatggagatgacagactttacccgaggtaaaggaccactcaaaaatacatcggatgtcatcagtgctgccaagaaaattgctgaggcaggatccaggatggacaagcttggccgcaccattgcagaccattgccccgactcggcttgcaagcaggacctgctggcctacctgcaacgcatcgccctctactgccaccagctgaacatctgcagcaaggtcaaggccgaggtgcagaatctcggcggggagcttgttgtctctggggtggacagcgccatgtccctgatccaggcagccaagaacttgatgaatgctgtggtgcagacagtgaaggcatcctacgtcgcctctaccaaataccaaaagtcacagggtatggcttccctcaaccttcctgctgtgtcatggaagatgaaggcaccagagaaaaagccattggtgaagagagagaaacaggatgagacacagaccaagattaaacgggcatctcagaagaagcacgtgaacccggtgcaggccctcagcgagttcaaagctatggacagcatctaagtctgcccaggccggccgcccccacccctcggggctcctgaatatcagtcactgttcgtcactcaaatgaatttgctaaatacaacactgatactagattccacagggaaatgggcagactgaa

SEQ ID NO: 114885 - DNA, 579 bp, Homo sapiens
  Payload ID: 2439
  Gene Symbol: CTNNA1
  Gene Name: catenin (cadherin-associated protein), alpha 1, 102kDa
  ENST ID: ENST00000517533
  CDS Start-End: 223-579
ataaagcaccatgctttgtaacagcatcggggtcgttgcaggaccccctgattacaataaagcgagaaagaagaactcctgacttaaaaacatgatattccttcagtgtaggaagcagcagtgaggttgtaataaaggctgcattcaagaagacccatctgaacagtgagttgggctggacgtaaagaaagaagtgatgcactcaattctgcaatagataaaatgaccaagaagaccagggacttgcgtagacagctccgcaaagctgtcatggaccacgtttcagattctttcctggaaaccaatgttccacttttggtattgattgaagctgcaaagaatggaaatgagaaagaagttaaggagtatgcccaagttttccgtgaacatgccaacaaattgattgaggttgccaacttggcctgttccatctcaaataatgaagaaggtgtaaagcttgttcgaatgtctgcaagccagttagaagccctctgtcctcaggttattaatgctgcactggctttagcagcaaaaccacagagtaaactggcccaagagaacatggatctttttaaagaa

SEQ ID NO: 114886 - DNA, 2684 bp, Homo sapiens
  Payload ID: 2439
  Gene Symbol: CTNNA1
  Gene Name: catenin (cadherin-associated protein), alpha 1, 102kDa
  Uniprot ID: P35221
  ENST ID: ENST00000540387
  CDS Start-End: 135-1745
ctgccgattctgcatagagagatcatctaaatgggcagaagcctgcacaatttatgaagtgctgatttaacaccagcctatgcaaggctggacgtaaagaaagaagtgatgcactcaattctgcaatagataaaatgaccaagaagaccagggacttgcgtagacagctccgcaaagctgtcatggaccacgtttcagattctttcctggaaaccaatgttccacttttggtattgattgaagctgcaaagaatggaaatgagaaagaagttaaggagtatgcccaagttttccgtgaacatgccaacaaattgattgaggttgccaacttggcctgttccatctcaaataatgaagaaggtgtaaagcttgttcgaatgtctgcaagccagttagaagccctctgtcctcaggttattaatgctgcactggctttagcagcaaaaccacagagtaaactggcccaagagaacatggatctttttaaagaacaatgggaaaaacaagtccgtgttctcacagatgctgtcgatgacattacttccattgatgacttcttggctgtctcagagaatcacattttggaagatgtgaacaaatgtgtcattgctctccaagagaaggatgtggatggcctggaccgcacagctggtgcaattcgaggccgggcagcccgggtcattcacgtagtcacctcagagatggacaactatgagccaggagtctacacagagaaggttctggaagccactaagctgctctccaacacagtcatgccacgttttactgagcaagtagaagcagccgtggaagccctcagctcggaccctgcccagcccatggatgagaatgagtttatcgatgcttcccgcctggtatatgatggcatccgggacatcaggaaagcagtgctgatgataaggacccctgaggagttggatgactctgactttgagacagaagattttgatgtcagaagcaggacgagcgtccagacagaagacgatcagctgatagctggccagagtgcccgggcgatcatggctcagcttccccaggagcaaaaagcgaagattgcggaacaggtggccagcttccaggaagaaaagagcaagctggatgctgaagtgtccaaatgggacgacagtggcaatgacatcattgtgctggccaagcagatgtgcatgattatgatggagatgacagactttacccgaggtaaaggaccactcaaaaatacatcggatgtcatcagtgctgccaagaaaattgctgaggcaggatccaggatggacaagcttggccgcaccattgcagaccattgccccgactcggcttgcaagcaggacctgctggcctacctgcaacgcatcgccctctactgccaccagctgaacatctgcagcaaggtcaaggccgaggtgcagaatctcggcggggagcttgttgtctctggggtggacagcgccatgtccctgatccaggcagccaagaacttgatgaatgctgtggtgcagacagtgaaggcatcctacgtcgcctctaccaaataccaaaagtcacagggtatggcttccctcaaccttcctgctgtgtcatggaagatgaaggcaccagagaaaaagccattggtgaagagagagaaacaggatgagacacagaccaagattaaacgggcatctcagaagaagcacgtgaacccggtgcaggccctcagcgagttcaaagctatggacagcatctaagtctgcccaggccggccgcccccacccctcggggctcctgaatatcagtcactgttcgtcactcaaatgaatttgctaaatacaacactgatactagattccacagggaaatgggcagactgaaccagtccaggtggtgaattttccaagaacatagtttaagttgattaaaaatgcttttagaatgcaggagcctacttctagctgtattttttgtatgcttaaataaaaataaaaattcataaccaaagagaatcccacattagcttgttagtaatgctctgaccaagccgagatgcccattctcttagtgatggcggcgttagggtttgagagaagggaatttggctcaacttcagttgagagggtgcagtccagacagcttgactgcttttaaatgaccaaagatgacctgtggtaagcaacctgggcatcttaggaagcagtccctggagaaggcatgttcccagaaaggtctctggagggacaaactcactcagtaaaacataatgtatcatgaagaaaactgattctctatgacatgaaatgaaaattttaatgcattgttataattactaatgtacgctgctgcaggacattaataaagttgcttttttaggctacagtgtctcgatgccataatcagaacacactttttttcctctttctcccagcttcaaatgcaaattcatcattgggctcacttctaataactgcagtgtttcccgccttgggcttgcagcagaaaaacctgacaacatagtgtttgctaaggcagtaatttagactttaccttatttgtgattactgtagtgattgattgattgattactattaactacaaggtataatttactatcaccttatttaaattttatgaattaatttgaatgttttttacactaactaacttttcccaataaagtccactatgaaacc

SEQ ID NO: 114887 - DNA, 579 bp, Homo sapiens
  Payload ID: 2439
  Gene Symbol: CTNNA1
  Gene Name: catenin (cadherin-associated protein), alpha 1, 102kDa
  ENST ID: ENST00000522052
  CDS Start-End: 159-353
aataaagcgagaaagaagaactcctgacttaaaaacatgatattccttcagtgtaggaagcagcagtgaggttgtaataaaggctgcattcaagaagacccatctgaacagctggacgtaaagaaagaagtgatgcactcaattctgcaatagataaaatgaccaagaagaccagggacttgcgtagacagctccgcaaagctgtcatggaccacgtttcagattctttcctggaaaccaatgttccacttttggtattgattgaagctgcaaagaatggaaatgagaaagaagttaaggagtatgcccaagttttccgtgaacatgccaacaaattgattgagggaatctgatcccatctcttcacaccagagttgccaacttggcctgttccatctcaaataatgaagaaggtgtaaagcttgttcgaatgtctgcaagccagttagaagccctctgtcctcaggttattaatgctgcactggctttagcagcaaaaccacagagtaaactggcccaagagaacatggatctttttaaagaacaatgggaaaaacaagtccgtgttctcacagatgc

SEQ ID NO: 114888 - DNA, 3831 bp, Homo sapiens
  Payload ID: 2439
  Gene Symbol: CTNNA1
  Gene Name: catenin (cadherin-associated protein), alpha 1, 102kDa
  ENST ID: ENST00000627109
  CDS Start-End: 96-2621
ccatttcctcctcctagccggactggagggagacaaagcagcgcccgtctgcttcgggcctctggaatttagcgctcgcccagctagccgcagaaatgactgctgtccatgcaggcaacataaacttcaagtgggatcctaaaagtctagagatcaggactctggcagttgagagactgttggagcctcttgttacacaggttacaacccttgtaaacaccaatagtaaagggccctctaataagaagagaggtcgttctaagaaggcccatgttttggctgcatctgttgaacaagcaactgagaatttcttggagaagggggataaaattgcgaaggagagccagtttctcaaggaggagcttgtggctgctgtagaagatgttcgaaaacaaggtgatttgatgaaggctgctgcaggagagttcgcagatgatccctgctcttctgtgaagcgaggcaacatggttcgggcagctcgagctttgctctctgctgttacccggttgctgattttggctgacatggcagatgtctacaaattacttgttcagctgaaagttgtggaagatggtatcttgaagttgaggaatgctggcaatgaacaagacttaggaatccagtataaagccctaaaacctgaagtggataagctgaacattatggcagccaaaagacaacaggaattgaaagatgttggccatcgtgatcagatggctgcagctagaggaatcctgcagaagaacgttccgatcctctatactgcatcccaggcatgcctacagcaccctgatgtcgcagcctataaggccaacagggacctgatatacaagcagctgcagcaggcggtcacaggcatttccaatgcagcccaggccactgcctcagacgatgcctcacagcaccagggtggaggaggaggagaactggcatatgcactcaataactttgacaaacaaatcattgtggaccccttgagcttcagcgaggagcgctttaggccttccctggaggagcgtctggaaagcatcattagtggggctgccttgatggccgactcgtcctgcacgcgtgatgaccgtcgtgagcgaattgtggcagagtgtaatgctgtccgccaggccctgcaggacctgctttcggagtacatgggcaatgctggacgtaaagaaagaagtgatgcactcaattctgcaatagataaaatgaccaagaagaccagggacttgcgtagacagctccgcaaagctgtcatggaccacgtttcagattctttcctggaaaccaatgttccacttttggtattgattgaagctgcaaagaatggaaatgagaaagaagttaaggagtatgcccaagttttccgtgaacatgccaacaaattgattgaggttgccaacttggcctgttccatctcaaataatgaagaaggtgtaaagcttgttcgaatgtctgcaagccagttagaagccctctgtcctcaggttattaatgctgcactggctttagcagcaaaaccacagagtaaactggcccaagagaacatggatctttttaaagaacaatgggaaaaacaagtccgtgttctcacagatgctgtcgatgacattacttccattgatgacttcttggctgtctcagagaatcacattttggaagatgtgaacaaatgtgtcattgctctccaagagaaggatgtggatggcctggaccgcacagctggtgcaattcgaggccgggcagcccgggtcattcacgtagtcacctcagagatggacaactatgagccaggagtctacacagagaaggttctggaagccactaagctgctctccaacacagtcatgccacgttttactgagcaagtagaagcagccgtggaagccctcagctcggaccctgcccagcccatggatgagaatgagtttatcgatgcttcccgcctggtatatgatggcatccgggacatcaggaaagcagtgctgatgataaggacccctgaggagttggatgactctgactttgagacagaagattttgatgtcagaagcaggacgagcgtccagacagaagacgatcagctgatagctggccagagtgcccgggcgatcatggctcagcttccccaggagcaaaaagcgaagattgcggaacaggtggccagcttccaggaagaaaagagcaagctggatgctgaagtgtccaaatgggacgacagtggcaatgacatcattgtgctggccaagcagatgtgcatgattatgatggagatgacagactttacccgaggtaaaggaccactcaaaaatacatcggatgtcatcagtgctgccaagaaaattgctgaggcaggatccaggatggacaagcttggccgcaccattgcagaccattgccccgactcggcttgcaagcaggacctgctggcctacctgcaacgcatcgccctctactgccaccagctgaacatctgcagcaaggtcaaggccgaggtgcagaatctcggcggggagcttgttgtctctgggaactgtgacacctgcggggcactgcaagggctgaaaggctggcctcctcccctttgctggccactcactgggtggacagcgccatgtccctgatccaggcagccaagaacttgatgaatgctgtggtgcagacagtgaaggcatcctacgtcgcctctaccaaataccaaaagtcacagggtatggcttccctcaaccttcctgctgtgtcatggaagatgaaggcaccagagaaaaagccattggtgaagagagagaaacaggatgagacacagaccaagattaaacgggcatctcagaagaagcacgtgaacccggtgcaggccctcagcgagttcaaagctatggacagcatctaagtctgcccaggccggccgcccccacccctcggggctcctgaatatcagtcactgttcgtcactcaaatgaatttgctaaatacaacactgatactagattccacagggaaatgggcagactgaaccagtccaggtggtgaattttccaagaacatagtttaagttgattaaaaatgcttttagaatgcaggagcctacttctagctgtattttttgtatgcttaaataaaaataaaaattcataaccaaagagaatcccacattagcttgttagtaatgctctgaccaagccgagatgcccattctcttagtgatggcggcgttagggtttgagagaagggaatttggctcaacttcagttgagagggtgcagtccagacagcttgactgcttttaaatgaccaaagatgacctgtggtaagcaacctgggcatcttaggaagcagtccctggagaaggcatgttcccagaaaggtctctggagggacaaactcactcagtaaaacataatgtatcatgaagaaaactgattctctatgacatgaaatgaaaattttaatgcattgttataattactaatgtacgctgctgcaggacattaataaagttgcttttttaggctacagtgtctcgatgccataatcagaacacactttttttcctctttctcccagcttcaaatgcaaattcatcattgggctcacttctaataactgcagtgtttcccgccttgggcttgcagcagaaaaacctgacaacatagtgtttgctaaggcagtaatttagactttaccttatttgtgattactgtagtgattgattgattgattactattaactacaaggtataatttactatcaccttatttaaattttatgaattaatttgaatgttttttacactaactaacttttcccaataaagtccactatgaaaccacgac

SEQ ID NO: 114889 - DNA, 2927 bp, Homo sapiens
  Payload ID: 2440
  Gene Symbol: CTNNA2
  Gene Name: catenin (cadherin-associated protein), alpha 2
  Uniprot ID: P26232
  ENST ID: ENST00000343114
  CDS Start-End: 184-1938
agaagcagagttagataaaatgtggtgcctaccctgtgtgttcacagttctggagtggagatgatgagtaacaaaccaatattattcatgctatggcagagatgtaaacaagagctgtggttgaagagatttttctagctaattgagcaagaccaggtagaggaaggaagacgaattgaccagatggatggatggagaaggccactccagtcagtaggcaaagtctgtgaaaaaaatatgaagacttctgagatgcataccatgtctggagcacagactggaaggaaagaaaaaggagatcctctcaacattgcgattgataagatgactaagaaaacaagagatctaaggagacagcttcggaaagcagtgatggatcacatatctgactctttcctggaaaccaatgttcctttgctagttctcattgaggctgcaaagagcggaaatgaaaaggaagtgaaagaatatgcccaagttttccgtgagcatgccaacaaactggtagaggttgccaatttggcctgttccatctccaacaatgaagaaggggtgaaattagttcggatggcagccacccagattgacagcctgtgtccccaggtcatcaatgccgctctgacactggctgcccggccacagagcaaagttgctcaggataacatggacgtcttcaaagaccagtgggagaagcaggtccgagtgttgacagaggccgtggatgacatcacctcagtggatgacttcctctctgtctcagaaaatcacatcttggaggatgtgaacaagtgtgtgatagccctccaagagggcgatgtggacactctggaccggactgcaggggccatcaggggccgggcagctcgagtcatacacatcatcaatgctgagatggagaactatgaagctggggtttatactgagaaggtgttggaagctacaaaattgctttctgaaacagtgatgccacgcttcgctgaacaagtagaggttgccattgaagccctgagtgccaacgttcctcaaccgtttgaggagaatgagttcatcgatgcctctcgcctggtgtatgatggcgttcgggacatcagaaaggctgtgctgatgatcaggaccccagaagaactagaggatgattctgactttgagcaggaagattatgatgtgcgtagcaggacaagtgttcagactgaggatgaccagctcattgcagggcagagcgcacgggccatcatggcgcaactaccgcaggaggagaaggcaaaaatagctgagcaggtggagatattccatcaagagaaaagcaagctggatgcagaagtggccaaatgggacgacagcggcaatgatatcattgtactggccaagcagatgtgtatgatcatgatggaaatgacagacttcacaagaggcaaaggcccattgaaaaatacatctgatgtcattaatgctgccaagaaaattgccgaagcaggttctcgaatggacaaattagctcgtgctgtggctgatcagtgtcctgattcagcatgtaagcaggatttattagcctaccttcaacgaattgccttgtattgccatcagcttaatatctgcagcaaggtgaaggcagaagtgcagaatctgggaggagagctcattgtgtcagggctggacagtgccacatcgcttatccaggcagctaaaaacctgatgaatgctgttgtcctcacggtgaaagcatcctatgtggcctcaaccaaataccagaaggtctatgggacagcagctgtcaactcacctgttgtgtcttggaagatgaaggctccagagaagaagccccttgtgaagagagaaaagcctgaagaattccagacacgagttcgacgaggttctcagaagaaacacatttcgcctgtacaggctttaagtgaattcaaagcaatggattccttctaggacgataggttttaacaagaaagctttttctttcttttctttctttctttttctttttaattccatttttgtatgcatacctgccagctcgtatgcctctggcatggggaaattaagggaacagtgtctgtttgcatgtaagatgagatgagatcaatactactgatccatctgtagcctgggaaggagacaggacattcctgtactaaggtggcacagagctgtcctttgcaacattctcataaaattgggcacagagttcgcattggcgcaatatttatgggagtgggagggatggggaaaataaacttaactctacaaaagcaaactctaatgcatgcaagaatcattaggttggcaggtatatgcataagtgaaaaatctggaagtgtaatggtagaacataaaacttgtattgcttctgtttcagtgcaaaaatgtactagccaatacgcttaagtgtgtggcccatgaattgaacaatttaaccttgaagtctatatccgtgatattatgtcgatttttaactgaggggaaattaactagtccagcctaaaatgcttcttttaatctgcattctgtttcctcttctagttgtgccattactagtgatcatgtttttttcccccctttaatgaaaacaataaacatctatttgagacaattaaaatccttctgggggcactggaagcacaatacggtgaccaatcttgctttcatttttttttctttttaatttgaaccatgattttgctagaaatagaaggcccagtggtggaatattagagggaaggaaactgacaacgtgtgaaagttagaggcaaatacataggtgtagcttggagtgctggtatctaatataccattgtattcactaactaactcaaaataaacacatttaatcttgacatctcaagtatgttttcttttttaattttttaagtatgtacttaataaagattagagcatcatcttcctgaaaattcatt

SEQ ID NO: 114890 - DNA, 3071 bp, Homo sapiens
  Payload ID: 2440
  Gene Symbol: CTNNA2
  Gene Name: catenin (cadherin-associated protein), alpha 2
  ENST ID: ENST00000361291
  CDS Start-End: 373-2082
agaagcagagttagataaaatgtggtgcctaccctgtgtgttcacagttctggagtggagatgatgagtaacaaaccaatattattcatgctatggcagagatgtaaacaagagctgtggttgaagagatttttctagctaattgagcaagaccaggtagaggaaggaagacgaattgaccagatggatggatggagaaggccactccagtcagtaggcaaagtctgtgaaaaaaatatgaagacttctgagatgcataccatgtctggagcacagactggaaggaaagaaaaaggagatcctctcaacattgcgattgataagatgactaagaaaacaagagatctaaggagacagcttcggaaagcagtgatggatcacatatctgactctttcctggaaaccaatgttcctttgctagttctcattgaggctgcaaagagcggaaatgaaaaggaagtgaaagaatatgcccaagttttccgtgagcatgccaacaaactggtagaggttgccaatttggcctgttccatctccaacaatgaagaaggggtgaaattagttcggatggcagccacccagattgacagcctgtgtccccaggtcatcaatgccgctctgacactggctgcccggccacagagcaaagttgctcaggataacatggacgtcttcaaagaccagtgggagaagcaggtccgagtgttgacagaggccgtggatgacatcacctcagtggatgacttcctctctgtctcagaaaatcacatcttggaggatgtgaacaagtgtgtgatagccctccaagagggcgatgtggacactctggaccggactgcaggggccatcaggggccgggcagctcgagtcatacacatcatcaatgctgagatggagaactatgaagctggggtttatactgagaaggtgttggaagctacaaaattgctttctgaaacagtgatgccacgcttcgctgaacaagtagaggttgccattgaagccctgagtgccaacgttcctcaaccgtttgaggagaatgagttcatcgatgcctctcgcctggtgtatgatggcgttcgggacatcagaaaggctgtgctgatgatcaggaccccagaagaactagaggatgattctgactttgagcaggaagattatgatgtgcgtagcaggacaagtgttcagactgaggatgaccagctcattgcagggcagagcgcacgggccatcatggcgcaactaccgcaggaggagaaggcaaaaatagctgagcaggtggagatattccatcaagagaaaagcaagctggatgcagaagtggccaaatgggacgacagcggcaatgatatcattgtactggccaagcagatgtgtatgatcatgatggaaatgacagacttcacaagaggcaaaggcccattgaaaaatacatctgatgtcattaatgctgccaagaaaattgccgaagcaggttctcgaatggacaaattagctcgtgctgtggctgatcagtgtcctgattcagcatgtaagcaggatttattagcctaccttcaacgaattgccttgtattgccatcagcttaatatctgcagcaaggtgaaggcagaagtgcagaatctgggaggagagctcattgtgtcagggacaggagttcagagcactttcactaccttttatgaggtagattgtgatgtcatagatgggggcagggctagtcaactttctacccacctcccaacctgtgctgagggagctccgatcgggagtggaagcagtgattcctccatgctggacagtgccacatcgcttatccaggcagctaaaaacctgatgaatgctgttgtcctcacggtgaaagcatcctatgtggcctcaaccaaataccagaaggtctatgggacagcagctgtcaactcacctgttgtgtcttggaagatgaaggctccagagaagaagccccttgtgaagagagaaaagcctgaagaattccagacacgagttcgacgaggttctcagaagaaacacatttcgcctgtacaggctttaagtgaattcaaagcaatggattccttctaggacgataggttttaacaagaaagctttttctttcttttctttctttctttttctttttaattccatttttgtatgcatacctgccagctcgtatgcctctggcatggggaaattaagggaacagtgtctgtttgcatgtaagatgagatgagatcaatactactgatccatctgtagcctgggaaggagacaggacattcctgtactaaggtggcacagagctgtcctttgcaacattctcataaaattgggcacagagttcgcattggcgcaatatttatgggagtgggagggatggggaaaataaacttaactctacaaaagcaaactctaatgcatgcaagaatcattaggttggcaggtatatgcataagtgaaaaatctggaagtgtaatggtagaacataaaacttgtattgcttctgtttcagtgcaaaaatgtactagccaatacgcttaagtgtgtggcccatgaattgaacaatttaaccttgaagtctatatccgtgatattatgtcgatttttaactgaggggaaattaactagtccagcctaaaatgcttcttttaatctgcattctgtttcctcttctagttgtgccattactagtgatcatgtttttttcccccctttaatgaaaacaataaacatctatttgagacaattaaaatccttctgggggcactggaagcacaatacggtgaccaatcttgctttcatttttttttctttttaatttgaaccatgattttgctagaaatagaaggcccagtggtggaatattagagggaaggaaactgacaacgtgtgaaagttagaggcaaatacataggtgtagcttggagtgctggtatctaatataccattgtattcactaactaactcaaaataaacacatttaatcttgacatctcaagtatgttttcttttttaattttttaagtatgtacttaataaagattagagcatcatcttcctgaaaattcatt

SEQ ID NO: 114891 - DNA, 3684 bp, Homo sapiens
  Payload ID: 2440
  Gene Symbol: CTNNA2
  Gene Name: catenin (cadherin-associated protein), alpha 2
  Uniprot ID: P26232
  ENST ID: ENST00000402739
  CDS Start-End: 6-2867
ggagcatgacttcggcaacttcacctatcattctgaaatgggaccccaaaagtttggaaatccggacgctaacagtggaaaggctgttggagccacttgttacacaggtgactacacttgtcaacacaagcaacaaaggcccatctggtaaaaagaaagggaggtcaaagaaagcccatgtactagctgcctctgtagagcaagccactcagaatttcctggaaaagggtgaacagatcgctaaggagagtcaagatctcaaagaagagttggtggctgctgtagaggatgtgcgcaaacaaggtgagacgatgcggatcgcctcctccgagtttgcagatgacccttgctcgtcggtaaagcgcggcaccatggtacgggcggcaagggctttgctctccgcggtgacacgcttactcatcctggcggacatggcagatgtcatgagacttttatcccatctgaaaattgtggaagaggccctggaagctgtcaaaaatgctacaaatgagcaagaccttgcaaaccgttttaaagagtttgggaaagagatggtgaaacttaactatgtagcagcaagaagacaacaggagctgaaggatcctcactgtcgggatgagatggcagccgcccgaggggctctgaagaagaatgccacaatgctgtacacggcctctcaagcatttctccgccacccagatgtcgccgctacgagagccaaccgagattatgtgttcaaacaagtccaggaggccatcgccggcatctccaatgctgctcaagctacctcgcccactgacgaagccaagggccacacgggcatcggcgagctggctgcggctcttaatgagtttgacaataagattatcctggaccccatgacgttcagcgaggccaggttccggccgtccctggaggagaggctggagagcatcatcagcggcgcagcgctgatggccgactcctcctgcacgcgagacgaccggcgcgagaggatcgtggcggagtgcaacgccgtgcggcaggcgctccaggacctgctcagcgagtacatgaataatactggaaggaaagaaaaaggagatcctctcaacattgcgattgataagatgactaagaaaacaagagatctaaggagacagcttcggaaagcagtgatggatcacatatctgactctttcctggaaaccaatgttcctttgctagttctcattgaggctgcaaagagcggaaatgaaaaggaagtgaaagaatatgcccaagttttccgtgagcatgccaacaaactggtagaggttgccaatttggcctgttccatctccaacaatgaagaaggggtgaaattagttcggatggcagccacccagattgacagcctgtgtccccaggtcatcaatgccgctctgacactggctgcccggccacagagcaaagttgctcaggataacatggacgtcttcaaagaccagtgggagaagcaggtccgagtgttgacagaggccgtggatgacatcacctcagtggatgacttcctctctgtctcagaaaatcacatcttggaggatgtgaacaagtgtgtgatagccctccaagagggcgatgtggacactctggaccggactgcaggggccatcaggggccgggcagctcgagtcatacacatcatcaatgctgagatggagaactatgaagctggggtttatactgagaaggtgttggaagctacaaaattgctttctgaaacagtgatgccacgcttcgctgaacaagtagaggttgccattgaagccctgagtgccaacgttcctcaaccgtttgaggagaatgagttcatcgatgcctctcgcctggtgtatgatggcgttcgggacatcagaaaggctgtgctgatgatcaggaccccagaagaactagaggatgattctgactttgagcaggaagattatgatgtgcgtagcaggacaagtgttcagactgaggatgaccagctcattgcagggcagagcgcacgggccatcatggcgcaactaccgcaggaggagaaggcaaaaatagctgagcaggtggagatattccatcaagagaaaagcaagctggatgcagaagtggccaaatgggacgacagcggcaatgatatcattgtactggccaagcagatgtgtatgatcatgatggaaatgacagacttcacaagaggcaaaggcccattgaaaaatacatctgatgtcattaatgctgccaagaaaattgccgaagcaggttctcgaatggacaaattagctcgtgctgtggctgatcagtgtcctgattcagcatgtaagcaggatttattagcctaccttcaacgaattgccttgtattgccatcagcttaatatctgcagcaaggtgaaggcagaagtgcagaatctgggaggagagctcattgtgtcagggacaggagttcagagcactttcactaccttttatgaggtagattgtgatgtcatagatgggggcagggctagtcaactttctacccacctcccaacctgtgctgagggagctccgatcgggagtggaagcagtgattcctccatgctggacagtgccacatcgcttatccaggcagctaaaaacctgatgaatgctgttgtcctcacggtgaaagcatcctatgtggcctcaaccaaataccagaaggtctatgggacagcagctgtcaactcacctgttgtgtcttggaagatgaaggctccagagaagaagccccttgtgaagagagaaaagcctgaagaattccagacacgagttcgacgaggttctcagaagaaacacatttcgcctgtacaggctttaagtgaattcaaagcaatggattccttctaggacgataggttttaacaagaaagctttttctttcttttctttctttctttttctttttaattccatttttgtatgcatacctgccagctcgtatgcctctggcatggggaaattaagggaacagtgtctgtttgcatgtaagatgagatgagatcaatactactgatccatctgtagcctgggaaggagacaggacattcctgtactaaggtggcacagagctgtcctttgcaacattctcataaaattgggcacagagttcgcattggcgcaatatttatgggagtgggagggatggggaaaataaacttaactctacaaaagcaaactctaatgcatgcaagaatcattaggttggcaggtatatgcataagtgaaaaatctggaagtgtaatggtagaacataaaacttgtattgcttctgtttcagtgcaaaaatgtactagccaatacgcttaagtgtgtggcccatgaattgaacaatttaaccttgaagtctatatccgtgatattatgtcgatttttaactgaggggaaattaactagtccagcctaaaatgcttcttttaatctgcattctgtttcctcttctagttgtgccattactagtgatcatgtttttttcccccctttaatgaaaacaataaacatctatttgagacaattaaaatccttctgggggcactggaagcacaatacggtgaccaatcttgctttcatttttttttctttttaatttgaaccatgattttgctagaaatagaaggcccagtggtggaatattagagggaaggaaactgacaacgtgtgaaagtta

SEQ ID NO: 114892 - DNA, 595 bp, Homo sapiens
  Payload ID: 2440
  Gene Symbol: CTNNA2
  Gene Name: catenin (cadherin-associated protein), alpha 2
  ENST ID: ENST00000409550
  CDS Start-End: 25-595
aactccttctttgctctgtcctgaatgaggaagctgcattggaacctttcatgtggtgacttcaagttgtgtgagactggaaggaaagaaaaaggagatcctctcaacattgcgattgataagatgactaagaaaacaagagatctaaggagacagcttcggaaagcagtgatggatcacatatctgactctttcctggaaaccaatgttcctttgctagttctcattgaggctgcaaagagcggaaatgaaaaggaagtgaaagaatatgcccaagttttccgtgagcatgccaacaaactggtagaggttgccaatttggcctgttccatctccaacaatgaagaaggggtgaaattagttcggatggcagccacccagattgacagcctgtgtccccaggtcatcaatgccgctctgacactggctgcccggccacagagcaaagttgctcaggataacatggacgtcttcaaagaccagtgggagaagcaggtccgagtgttgacagaggccgtggatgacatcacctcagtggatgacttcctctctgtctcagaaaatcacatcttggaggatgtgaacaagtgtgtga

SEQ ID NO: 114893 - DNA, 541 bp, Homo sapiens
  Payload ID: 2440
  Gene Symbol: CTNNA2
  Gene Name: catenin (cadherin-associated protein), alpha 2
  ENST ID: ENST00000409971
  CDS Start-End: 190-541
tttttacatggcgggacagccatgcctcagaatgtttagcatatttatcatctcagaagggtccaacagtatttagtgtgaatgagacactgttcagattggaaatacactgtctatactgtactccagacacacctattttgcttttaaaattattctcaatatctgtcttttccatagtaacggagcatgacttcggcaacttcacctatcattctgaaatgggaccccaaaagtttggaaatccggacgctaacagtggaaaggctgttggagccacttgttacacaggtgactacacttgtcaacacaagcaacaaaggcccatctggtaaaaagaaagggaggtcaaagaaagcccatgtactagctgcctctgtagagcaagccactcagaatttcctggaaaagggtgaacagatcgctaaggagagtcaagatctcaaagaagagttggtggctgctgtagaggatgtgcgcaaacaaggtgagacgatgcggatcgcctcctccgagtttgcagatgacccttgctcgtcgg

SEQ ID NO: 114894 - DNA, 432 bp, Homo sapiens
  Payload ID: 2440
  Gene Symbol: CTNNA2
  Gene Name: catenin (cadherin-associated protein), alpha 2
  ENST ID: ENST00000409266
  CDS Start-End: 165-299
gttctaagtattctagtgtgaaagagaatgagccgaacaattaaagtagagtgagatttatggcacagtcgagggaagcattatgtcctcttaagatcgagggtgacactgaacaggtcaagaagtgatgcctgagttgagtctcaaaacataaccaaaggagcatgacttcggcaacttcacctatcattctgaaatgggaccccaaaagtttggaaatccggacgctaacagtggaaaggctgttggagccacttgttacacagtgcatttttttttccaccggatatttcaaatgaaaatcacataaatctgtattgctgactgtcatcttgaaaaaggatacctgttgaattgggtaactcttttcatgaaaataacttaaaaaactggatgaaatataaaagcatcttttgaatgtattgtgacttt

SEQ ID NO: 114895 - DNA, 521 bp, Homo sapiens
  Payload ID: 2440
  Gene Symbol: CTNNA2
  Gene Name: catenin (cadherin-associated protein), alpha 2
  ENST ID: ENST00000451966
  CDS Start-End: 323-521
gacccaggcgggcgggcagagcaggcggcaccgcacctcggccagaggcggctgcagcagctgctgcccttgtccctgccgccgcctctccagtcccttctgtgattaccactccagctgctgggaacgggcgagaaagaggaggaggcgagaaactcccaccgacccacagagctagtcaaaggaagcgtttcattccacctatctttggtcagaggagagggaggagtgtagaccagcattctacccactgacgacaggtcatctgtctctattattgaagaaccattgcagagcctatgctcaccttctgcgagggagcatgacttcggcaacttcacctatcattctgaaatgggaccccaaaagtttggaaatccggacgctaacagtggaaaggctgttggagccacttgttacacaggtgactacacttgtcaacacaagcaacaaaggcccatctggtaaaaagaaagggaggtcaaagaaagcccatgtactagctgcctctgtagagcaag

SEQ ID NO: 114896 - DNA, 4349 bp, Homo sapiens
  Payload ID: 2440
  Gene Symbol: CTNNA2
  Gene Name: catenin (cadherin-associated protein), alpha 2
  Uniprot ID: P26232
  ENST ID: ENST00000466387
  CDS Start-End: 725-3442
gctgaaggaagctacaatcatccaagtgggaagtaatgtctaccgatgttctgatttaagtgaatgaaggtcttctttccacctcgggaaatcttgagggttatgtaacagcagctttgaaaggcttgtgagatgtactttgtgctagtccatctcaaatcttcaccggctgtaccaagaacagaaaaaaaaaggaatttgagacgggatctcagcatgtttgccaggatggtctcagtctcttgacctcgtgatccgcctaccttggcctcccaaagtgttggaattacaggtgtgagccactgcgcccagccatcagaacaaaatatacagctggatgtttgtcacaattctaatgtccctgcaaagatgagatgcatgaatcacacagcaatctcatcaaaaagataagaaaattgagactcagagcatttaagcagccagcctggagtcacagagatttaagtctcagagccagcactcaggatgagtgccaatggaagcctgtccttggagtccagaatgaacgtcagaagcaacccagccacagcaggagactgtccatgaatgtcatctggctgaacctaaagcacctctggatttagatgcactccttcaaggaccatgggttctgcaacagtaccccctctccattgttccagctctgactcagatgggccctccttgatggcactcccagcagcacagccttagcactgggagcatgacttcggcaacttcacctatcattctgaaatgggaccccaaaagtttggaaatccggacgctaacagtggaaaggctgttggagccacttgttacacaggtgactacacttgtcaacacaagcaacaaaggcccatctggtaaaaagaaagggaggtcaaagaaagcccatgtactagctgcctctgtagagcaagccactcagaatttcctggaaaagggtgaacagatcgctaaggagagtcaagatctcaaagaagagttggtggctgctgtagaggatgtgcgcaaacaaggtgagacgatgcggatcgcctcctccgagtttgcagatgacccttgctcgtcggtaaagcgcggcaccatggtacgggcggcaagggctttgctctccgcggtgacacgcttactcatcctggcggacatggcagatgtcatgagacttttatcccatctgaaaattgtggaagaggccctggaagctgtcaaaaatgctacaaatgagcaagaccttgcaaaccgttttaaagagtttgggaaagagatggtgaaacttaactatgtagcagcaagaagacaacaggagctgaaggatcctcactgtcgggatgagatggcagccgcccgaggggctctgaagaagaatgccacaatgctgtacacggcctctcaagcatttctccgccacccagatgtcgccgctacgagagccaaccgagattatgtgttcaaacaagtccaggaggccatcgccggcatctccaatgctgctcaagctacctcgcccactgacgaagccaagggccacacgggcatcggcgagctggctgcggctcttaatgagtttgacaataagattatcctggaccccatgacgttcagcgaggccaggttccggccgtccctggaggagaggctggagagcatcatcagcggcgcagcgctgatggccgactcctcctgcacgcgagacgaccggcgcgagaggatcgtggcggagtgcaacgccgtgcggcaggcgctccaggacctgctcagcgagtacatgaataatactggaaggaaagaaaaaggagatcctctcaacattgcgattgataagatgactaagaaaacaagagatctaaggagacagcttcggaaagcagtgatggatcacatatctgactctttcctggaaaccaatgttcctttgctagttctcattgaggctgcaaagagcggaaatgaaaaggaagtgaaagaatatgcccaagttttccgtgagcatgccaacaaactggtagaggttgccaatttggcctgttccatctccaacaatgaagaaggggtgaaattagttcggatggcagccacccagattgacagcctgtgtccccaggtcatcaatgccgctctgacactggctgcccggccacagagcaaagttgctcaggataacatggacgtcttcaaagaccagtgggagaagcaggtccgagtgttgacagaggccgtggatgacatcacctcagtggatgacttcctctctgtctcagaaaatcacatcttggaggatgtgaacaagtgtgtgatagccctccaagagggcgatgtggacactctggaccggactgcaggggccatcaggggccgggcagctcgagtcatacacatcatcaatgctgagatggagaactatgaagctggggtttatactgagaaggtgttggaagctacaaaattgctttctgaaacagtgatgccacgcttcgctgaacaagtagaggttgccattgaagccctgagtgccaacgttcctcaaccgtttgaggagaatgagttcatcgatgcctctcgcctggtgtatgatggcgttcgggacatcagaaaggctgtgctgatgatcaggaccccagaagaactagaggatgattctgactttgagcaggaagattatgatgtgcgtagcaggacaagtgttcagactgaggatgaccagctcattgcagggcagagcgcacgggccatcatggcgcaactaccgcaggaggagaaggcaaaaatagctgagcaggtggagatattccatcaagagaaaagcaagctggatgcagaagtggccaaatgggacgacagcggcaatgatatcattgtactggccaagcagatgtgtatgatcatgatggaaatgacagacttcacaagaggcaaaggcccattgaaaaatacatctgatgtcattaatgctgccaagaaaattgccgaagcaggttctcgaatggacaaattagctcgtgctgtggctgatcagtgtcctgattcagcatgtaagcaggatttattagcctaccttcaacgaattgccttgtattgccatcagcttaatatctgcagcaaggtgaaggcagaagtgcagaatctgggaggagagctcattgtgtcagggctggacagtgccacatcgcttatccaggcagctaaaaacctgatgaatgctgttgtcctcacggtgaaagcatcctatgtggcctcaaccaaataccagaaggtctatgggacagcagctgtcaactcacctgttgtgtcttggaagatgaaggctccagagaagaagccccttgtgaagagagaaaagcctgaagaattccagacacgagttcgacgaggttctcagaagaaacacatttcgcctgtacaggctttaagtgaattcaaagcaatggattccttctaggacgataggttttaacaagaaagctttttctttcttttctttctttctttttctttttaattccatttttgtatgcatacctgccagctcgtatgcctctggcatggggaaattaagggaacagtgtctgtttgcatgtaagatgagatgagatcaatactactgatccatctgtagcctgggaaggagacaggacattcctgtactaaggtggcacagagctgtcctttgcaacattctcataaaattgggcacagagttcgcattggcgcaatatttatgggagtgggagggatggggaaaataaacttaactctacaaaagcaaactctaatgcatgcaagaatcattaggttggcaggtatatgcataagtgaaaaatctggaagtgtaatggtagaacataaaacttgtattgcttctgtttcagtgcaaaaatgtactagccaatacgcttaagtgtgtggcccatgaattgaacaatttaaccttgaagtctatatccgtgatattatgtcgatttttaactgaggggaaattaactagtccagcctaaaatgcttcttttaatctgcattctgtttcctcttctagttgtgccattactagtgatcatgtttttttcccccctttaatgaaaacaataaacatctatttgagacaattaaaatccttctgggggcactggaagcacaatacggtgaccaatcttgctttcatttttttttctttttaatttgaaccatgattttgctagaaatagaaggcccagtggtggaatattagagggaaggaaactgacaacgtgtgaaagttagaggcaaatacataggtgtagcttggagtgctggtatctaatataccattgtattcactaactaactcaaaataaacacatttaatcttg

SEQ ID NO: 114897 - DNA, 3839 bp, Homo sapiens
  Payload ID: 2440
  Gene Symbol: CTNNA2
  Gene Name: catenin (cadherin-associated protein), alpha 2
  Uniprot ID: P26232
  ENST ID: ENST00000496558
  CDS Start-End: 214-2931
gagcggcttcgcttccagccccgagtgaggcggagacccaggcgggcgggcagagcaggcggcaccgcacctcggccagaggcggctgcagcagctgctgcccttgtccctgccgccgcctctccagtcccttctgtgattaccactccagctgctgggaacgggcgagaaagaggaggaggcgagaaactcccaccgacccacagagggagcatgacttcggcaacttcacctatcattctgaaatgggaccccaaaagtttggaaatccggacgctaacagtggaaaggctgttggagccacttgttacacaggtgactacacttgtcaacacaagcaacaaaggcccatctggtaaaaagaaagggaggtcaaagaaagcccatgtactagctgcctctgtagagcaagccactcagaatttcctggaaaagggtgaacagatcgctaaggagagtcaagatctcaaagaagagttggtggctgctgtagaggatgtgcgcaaacaaggtgagacgatgcggatcgcctcctccgagtttgcagatgacccttgctcgtcggtaaagcgcggcaccatggtacgggcggcaagggctttgctctccgcggtgacacgcttactcatcctggcggacatggcagatgtcatgagacttttatcccatctgaaaattgtggaagaggccctggaagctgtcaaaaatgctacaaatgagcaagaccttgcaaaccgttttaaagagtttgggaaagagatggtgaaacttaactatgtagcagcaagaagacaacaggagctgaaggatcctcactgtcgggatgagatggcagccgcccgaggggctctgaagaagaatgccacaatgctgtacacggcctctcaagcatttctccgccacccagatgtcgccgctacgagagccaaccgagattatgtgttcaaacaagtccaggaggccatcgccggcatctccaatgctgctcaagctacctcgcccactgacgaagccaagggccacacgggcatcggcgagctggctgcggctcttaatgagtttgacaataagattatcctggaccccatgacgttcagcgaggccaggttccggccgtccctggaggagaggctggagagcatcatcagcggcgcagcgctgatggccgactcctcctgcacgcgagacgaccggcgcgagaggatcgtggcggagtgcaacgccgtgcggcaggcgctccaggacctgctcagcgagtacatgaataatactggaaggaaagaaaaaggagatcctctcaacattgcgattgataagatgactaagaaaacaagagatctaaggagacagcttcggaaagcagtgatggatcacatatctgactctttcctggaaaccaatgttcctttgctagttctcattgaggctgcaaagagcggaaatgaaaaggaagtgaaagaatatgcccaagttttccgtgagcatgccaacaaactggtagaggttgccaatttggcctgttccatctccaacaatgaagaaggggtgaaattagttcggatggcagccacccagattgacagcctgtgtccccaggtcatcaatgccgctctgacactggctgcccggccacagagcaaagttgctcaggataacatggacgtcttcaaagaccagtgggagaagcaggtccgagtgttgacagaggccgtggatgacatcacctcagtggatgacttcctctctgtctcagaaaatcacatcttggaggatgtgaacaagtgtgtgatagccctccaagagggcgatgtggacactctggaccggactgcaggggccatcaggggccgggcagctcgagtcatacacatcatcaatgctgagatggagaactatgaagctggggtttatactgagaaggtgttggaagctacaaaattgctttctgaaacagtgatgccacgcttcgctgaacaagtagaggttgccattgaagccctgagtgccaacgttcctcaaccgtttgaggagaatgagttcatcgatgcctctcgcctggtgtatgatggcgttcgggacatcagaaaggctgtgctgatgatcaggaccccagaagaactagaggatgattctgactttgagcaggaagattatgatgtgcgtagcaggacaagtgttcagactgaggatgaccagctcattgcagggcagagcgcacgggccatcatggcgcaactaccgcaggaggagaaggcaaaaatagctgagcaggtggagatattccatcaagagaaaagcaagctggatgcagaagtggccaaatgggacgacagcggcaatgatatcattgtactggccaagcagatgtgtatgatcatgatggaaatgacagacttcacaagaggcaaaggcccattgaaaaatacatctgatgtcattaatgctgccaagaaaattgccgaagcaggttctcgaatggacaaattagctcgtgctgtggctgatcagtgtcctgattcagcatgtaagcaggatttattagcctaccttcaacgaattgccttgtattgccatcagcttaatatctgcagcaaggtgaaggcagaagtgcagaatctgggaggagagctcattgtgtcagggctggacagtgccacatcgcttatccaggcagctaaaaacctgatgaatgctgttgtcctcacggtgaaagcatcctatgtggcctcaaccaaataccagaaggtctatgggacagcagctgtcaactcacctgttgtgtcttggaagatgaaggctccagagaagaagccccttgtgaagagagaaaagcctgaagaattccagacacgagttcgacgaggttctcagaagaaacacatttcgcctgtacaggctttaagtgaattcaaagcaatggattccttctaggacgataggttttaacaagaaagctttttctttcttttctttctttctttttctttttaattccatttttgtatgcatacctgccagctcgtatgcctctggcatggggaaattaagggaacagtgtctgtttgcatgtaagatgagatgagatcaatactactgatccatctgtagcctgggaaggagacaggacattcctgtactaaggtggcacagagctgtcctttgcaacattctcataaaattgggcacagagttcgcattggcgcaatatttatgggagtgggagggatggggaaaataaacttaactctacaaaagcaaactctaatgcatgcaagaatcattaggttggcaggtatatgcataagtgaaaaatctggaagtgtaatggtagaacataaaacttgtattgcttctgtttcagtgcaaaaatgtactagccaatacgcttaagtgtgtggcccatgaattgaacaatttaaccttgaagtctatatccgtgatattatgtcgatttttaactgaggggaaattaactagtccagcctaaaatgcttcttttaatctgcattctgtttcctcttctagttgtgccattactagtgatcatgtttttttcccccctttaatgaaaacaataaacatctatttgagacaattaaaatccttctgggggcactggaagcacaatacggtgaccaatcttgctttcatttttttttctttttaatttgaaccatgattttgctagaaatagaaggcccagtggtggaatattagagggaaggaaactgacaacgtgtgaaagttagaggcaaatacataggtgtagcttggagtgctggtatctaatataccattgtattcactaactaactcaaaataaacacatttaatcttga

SEQ ID NO: 114898 - DNA, 2792 bp, Homo sapiens
  Payload ID: 2440
  Gene Symbol: CTNNA2
  Gene Name: catenin (cadherin-associated protein), alpha 2
  ENST ID: ENST00000540488
  CDS Start-End: 373-1803
agaagcagagttagataaaatgtggtgcctaccctgtgtgttcacagttctggagtggagatgatgagtaacaaaccaatattattcatgctatggcagagatgtaaacaagagctgtggttgaagagatttttctagctaattgagcaagaccaggtagaggaaggaagacgaattgaccagatggatggatggagaaggccactccagtcagtaggcaaagtctgtgaaaaaaatatgaagacttctgagatgcataccatgtctggagcacagactggaaggaaagaaaaaggagatcctctcaacattgcgattgataagatgactaagaaaacaagagatctaaggagacagcttcggaaagcagtgatggatcacatatctgactctttcctggaaaccaatgttcctttgctagttctcattgaggctgcaaagagcggaaatgaaaaggaagtgaaagaatatgcccaagttttccgtgagcatgccaacaaactggtagaggttgccaatttggcctgttccatctccaacaatgaagaaggggtgaaattagttcggatggcagccacccagattgacagcctgtgtccccaggtcatcaatgccgctctgacactggctgcccggccacagagcaaagttgctcaggataacatggacgtcttcaaagaccagtgggagaagcaggtccgagtgttgacagaggccgtggatgacatcacctcagtggatgacttcctctctgtctcagaaaatcacatcttggaggatgtgaacaagtgtgtgatagccctccaagagggcgatgtggacactctggaccggactgcaggggccatcaggggccgggcagctcgagtcatacacatcatcaatgctgagatggagaactatgaagctggggtttatactgagaaggtgttggaagctacaaaattgctttctgaaacagtgatgccacgcttcgctgaacaagtagaggttgccattgaagccctgagtgccaacgttcctcaaccgtttgaggagaatgagttcatcgatgcctctcgcctggtgtatgatggcgttcgggacatcagaaaggctgtgctgatgatcaggaccccagaagaactagaggatgattctgactttgagcaggaagattatgatgtgcgtagcaggacaagtgttcagactgaggatgaccagctcattgcagggcagagcgcacgggccatcatggcgcaactaccgcaggaggagaaggcaaaaatagctgagcaggtggagatattccatcaagagaaaagcaagctggatgcagaagtggccaaatgggacgacagcggcaatgatatcattgtactggccaagcagatgtgtatgatcatgatggaaatgacagacttcacaagaggcaaaggcccattgaaaaatacatctgatgtcattaatgctgccaagaaaattgccgaagcaggttctcgaatggacaaattagctcgtgctgtggctgatcagctggacagtgccacatcgcttatccaggcagctaaaaacctgatgaatgctgttgtcctcacggtgaaagcatcctatgtggcctcaaccaaataccagaaggtctatgggacagcagctgtcaactcacctgttgtgtcttggaagatgaaggctccagagaagaagccccttgtgaagagagaaaagcctgaagaattccagacacgagttcgacgaggttctcagaagaaacacatttcgcctgtacaggctttaagtgaattcaaagcaatggattccttctaggacgataggttttaacaagaaagctttttctttcttttctttctttctttttctttttaattccatttttgtatgcatacctgccagctcgtatgcctctggcatggggaaattaagggaacagtgtctgtttgcatgtaagatgagatgagatcaatactactgatccatctgtagcctgggaaggagacaggacattcctgtactaaggtggcacagagctgtcctttgcaacattctcataaaattgggcacagagttcgcattggcgcaatatttatgggagtgggagggatggggaaaataaacttaactctacaaaagcaaactctaatgcatgcaagaatcattaggttggcaggtatatgcataagtgaaaaatctggaagtgtaatggtagaacataaaacttgtattgcttctgtttcagtgcaaaaatgtactagccaatacgcttaagtgtgtggcccatgaattgaacaatttaaccttgaagtctatatccgtgatattatgtcgatttttaactgaggggaaattaactagtccagcctaaaatgcttcttttaatctgcattctgtttcctcttctagttgtgccattactagtgatcatgtttttttcccccctttaatgaaaacaataaacatctatttgagacaattaaaatccttctgggggcactggaagcacaatacggtgaccaatcttgctttcatttttttttctttttaatttgaaccatgattttgctagaaatagaaggcccagtggtggaatattagagggaaggaaactgacaacgtgtgaaagttagaggcaaatacataggtgtagcttggagtgctggtatctaatataccattgtattcactaactaactcaaaataaacacatttaatcttgacatctcaagtatgttttcttttttaattttttaagtatgtacttaataaagattagagcatcatcttcctgaaaattcatt

SEQ ID NO: 114899 - DNA, 2870 bp, Homo sapiens
  Payload ID: 2440
  Gene Symbol: CTNNA2
  Gene Name: catenin (cadherin-associated protein), alpha 2
  Uniprot ID: P26232
  ENST ID: ENST00000541047
  CDS Start-End: 268-1881
ggacctttgctttagaaaagcaacttgagagaagacacaggaaggcaatgatttggggcttggctaagatttttggggttttttccccctcttgcgggtactggaattctgcagtcagccagcccttttttgaggtggagaggggaaatgctttccaaacccacctagtttgggaagccatccaagtcccggtggtgtgagatccagtgtggcaaaaagactggaaggaaagaaaaaggagatcctctcaacattgcgattgataagatgactaagaaaacaagagatctaaggagacagcttcggaaagcagtgatggatcacatatctgactctttcctggaaaccaatgttcctttgctagttctcattgaggctgcaaagagcggaaatgaaaaggaagtgaaagaatatgcccaagttttccgtgagcatgccaacaaactggtagaggttgccaatttggcctgttccatctccaacaatgaagaaggggtgaaattagttcggatggcagccacccagattgacagcctgtgtccccaggtcatcaatgccgctctgacactggctgcccggccacagagcaaagttgctcaggataacatggacgtcttcaaagaccagtgggagaagcaggtccgagtgttgacagaggccgtggatgacatcacctcagtggatgacttcctctctgtctcagaaaatcacatcttggaggatgtgaacaagtgtgtgatagccctccaagagggcgatgtggacactctggaccggactgcaggggccatcaggggccgggcagctcgagtcatacacatcatcaatgctgagatggagaactatgaagctggggtttatactgagaaggtgttggaagctacaaaattgctttctgaaacagtgatgccacgcttcgctgaacaagtagaggttgccattgaagccctgagtgccaacgttcctcaaccgtttgaggagaatgagttcatcgatgcctctcgcctggtgtatgatggcgttcgggacatcagaaaggctgtgctgatgatcaggaccccagaagaactagaggatgattctgactttgagcaggaagattatgatgtgcgtagcaggacaagtgttcagactgaggatgaccagctcattgcagggcagagcgcacgggccatcatggcgcaactaccgcaggaggagaaggcaaaaatagctgagcaggtggagatattccatcaagagaaaagcaagctggatgcagaagtggccaaatgggacgacagcggcaatgatatcattgtactggccaagcagatgtgtatgatcatgatggaaatgacagacttcacaagaggcaaaggcccattgaaaaatacatctgatgtcattaatgctgccaagaaaattgccgaagcaggttctcgaatggacaaattagctcgtgctgtggctgatcagtgtcctgattcagcatgtaagcaggatttattagcctaccttcaacgaattgccttgtattgccatcagcttaatatctgcagcaaggtgaaggcagaagtgcagaatctgggaggagagctcattgtgtcagggctggacagtgccacatcgcttatccaggcagctaaaaacctgatgaatgctgttgtcctcacggtgaaagcatcctatgtggcctcaaccaaataccagaaggtctatgggacagcagctgtcaactcacctgttgtgtcttggaagatgaaggctccagagaagaagccccttgtgaagagagaaaagcctgaagaattccagacacgagttcgacgaggttctcagaagaaacacatttcgcctgtacaggctttaagtgaattcaaagcaatggattccttctaggacgataggttttaacaagaaagctttttctttcttttctttctttctttttctttttaattccatttttgtatgcatacctgccagctcgtatgcctctggcatggggaaattaagggaacagtgtctgtttgcatgtaagatgagatgagatcaatactactgatccatctgtagcctgggaaggagacaggacattcctgtactaaggtggcacagagctgtcctttgcaacattctcataaaattgggcacagagttcgcattggcgcaatatttatgggagtgggagggatggggaaaataaacttaactctacaaaagcaaactctaatgcatgcaagaatcattaggttggcaggtatatgcataagtgaaaaatctggaagtgtaatggtagaacataaaacttgtattgcttctgtttcagtgcaaaaatgtactagccaatacgcttaagtgtgtggcccatgaattgaacaatttaaccttgaagtctatatccgtgatattatgtcgatttttaactgaggggaaattaactagtccagcctaaaatgcttcttttaatctgcattctgtttcctcttctagttgtgccattactagtgatcatgtttttttcccccctttaatgaaaacaataaacatctatttgagacaattaaaatccttctgggggcactggaagcacaatacggtgaccaatcttgctttcatttttttttctttttaatttgaaccatgattttgctagaaatagaaggcccagtggtggaatattagagggaaggaaactgacaacgtgtgaaagttagaggcaaatacataggtgtagcttggagtgctggtatctaatataccattgtattcactaactaactcaaaataaacacatttaatcttgacatctcaagtatgttttcttttttaattttttaagtatgtacttaataaagattagagcatcatcttcctgaaaattcatt

SEQ ID NO: 114900 - DNA, 3167 bp, Homo sapiens
  Payload ID: 2440
  Gene Symbol: CTNNA2
  Gene Name: catenin (cadherin-associated protein), alpha 2
  Uniprot ID: P26232
  ENST ID: ENST00000629316
  CDS Start-End: 79-2661
gtgattaccactccagctgctgggaacgggcgagaaagaggaggaggcgagaaactcccaccgacccacagagggagcatgacttcggcaacttcacctatcattctgaaatgggaccccaaaagtttggaaatccggacgctaacagtggaaaggctgttggagccacttgttacacaggtgactacacttgtcaacacaagcaacaaaggcccatctggtaaaaagaaagggaggtcaaagaaagcccatgtactagctgcctctgtagagcaagccactcagaatttcctggaaaagggtgaacagatcgctaaggagagtcaagatctcaaagaagagttggtggctgctgtagaggatgtgcgcaaacaaggtgagacgatgcggatcgcctcctccgagtttgcagatgacccttgctcgtcggtaaagcgcggcaccatggtacgggcggcaagggctttgctctccgcggtgacacgcttactcatcctggcggacatggcagatgtcatgagacttttatcccatctgaaaattgtggaagaggccctggaagctgtcaaaaatgctacaaatgagcaagaccttgcaaaccgttttaaagagtttgggaaagagatggtgaaacttaactatgtagcagcaagaagacaacaggagctgaaggatcctcactgtcgggatgagatggcagccgcccgaggggctctgaagaagaatgccacaatgctgtacacggcctctcaagcatttctccgccacccagatgtcgccgctacgagagccaaccgagattatgtgttcaaacaagtccaggaggccatcgccggcatctccaatgctgctcaagctacctcgcccactgacgaagccaagggccacacgggcatcggcgagctggctgcggctcttaatgagtttgacaataagattatcctggaccccatgacgttcagcgaggccaggttccggccgtccctggaggagaggctggagagcatcatcagcggcgcagcgctgatggccgactcctcctgcacgcgagacgaccggcgcgagaggatcgtggcggagtgcaacgccgtgcggcaggcgctccaggacctgctcagcgagtacatgaataatactggaaggaaagaaaaaggagatcctctcaacattgcgattgataagatgactaagaaaacaagagatctaaggagacagcttcggaaagcagtgatggatcacatatctgactctttcctggaaaccaatgttcctttgctagttctcattgaggctgcaaagagcggaaatgaaaaggaagtgaaagaatatgcccaagttttccgtgagcatgccaacaaactggtagaggttgccaatttggcctgttccatctccaacaatgaagaaggggtgaaattagttcggatggcagccacccagattgacagcctgtgtccccaggtcatcaatgccgctctgacactggctgcccggccacagagcaaagttgctcaggataacatggacgtcttcaaagaccagtgggagaagcaggtccgagtgttgacagaggccgtggatgacatcacctcagtggatgacttcctctctgtctcagaaaatcacatcttggaggatgtgaacaagtgtgtgatagccctccaagagggcgatgtggacactctggaccggactgcaggggccatcaggggccgggcagctcgagtcatacacatcatcaatgctgagatggagaactatgaagctggggtttatactgagaaggtgttggaagctacaaaattgctttctgaaacagtgatgccacgcttcgctgaacaagtagaggttgccattgaagccctgagtgccaacgttcctcaaccgtttgaggagaatgagttcatcgatgcctctcgcctggtgtatgatggcgttcgggacatcagaaaggctgtgctgatgatcaggaccccagaagaactagaggatgattctgactttgagcaggaagattatgatgtgcgtagcaggacaagtgttcagactgaggatgaccagctcattgcagggcagagcgcacgggccatcatggcgcaactaccgcaggaggagaaggcaaaaatagctgagcaggtggagatattccatcaagagaaaagcaagctggatgcagaagtggccaaatgggacgacagcggcaatgatatcattgtactggccaagcagatgtgtatgatcatgatggaaatgacagacttcacaagaggcaaaggcccattgaaaaatacatctgatgtcattaatgctgccaagaaaattgccgaagcaggttctcgaatggacaaattagctcgtgctgtggctgatcagctggacagtgccacatcgcttatccaggcagctaaaaacctgatgaatgctgttgtcctcacggtgaaagcatcctatgtggcctcaaccaaataccagaaggtctatgggacagcagctgtcaactcacctgttgtgtcttggaagatgaaggctccagagaagaagccccttgtgaagagagaaaagcctgaagaattccagacacgagttcgacgaggttctcagaagaaacacatttcgcctgtacaggctttaagtgaattcaaagcaatggattccttctaggacgataggttttaacaagaaagctttttctttcttttctttctttctttttctttttaattccatttttgtatgcatacctgccagctcgtatgcctctggcatggggaaattaagggaacagtgtctgtttgcatgtaagatgagatgagatcaatactactgatccatctgtagcctgggaaggagacaggacattcctgtactaaggtggcacagagctgtcctttgcaacattctcataaaattgggcacagagttcgcattggcgcaatatttatgggagtgggagggatggggaaaataaacttaactctacaaaagcaaactctaatgcatgcaagaatcattaggttggcaggtatatgcataagtgaaaaatctggaagtgtaatggtagaacataaaacttgtattgcttctgtttcagtgcaaaaatgtactagccaatacgcttaagtgtgtggcccatgaattgaacaatttaaccttgaagtctatatccg

SEQ ID NO: 114901 - DNA, 696 bp, Homo sapiens
  Payload ID: 2441
  Gene Symbol: CTNNA3
  Gene Name: catenin (cadherin-associated protein), alpha 3
  ENST ID: ENST00000330298
  CDS Start-End: 118-696
atcataagccaaattgtgagccatgatagtggcactgaatttctaaatacaagaaattgcttagacaattggtttagtatctgtatatgggcaatactctgtcctgcagtaggcagcatgtcagctgaaacaccaatcacattgaatatcgatcctcaggatctgcaggtccaaacattcaccgtggagaagctactggagcctctcataatccaggttaccacacttgtaaactgtccccagaacccttccagcaggaaaaaaggacgttcgaaaagagccagtgtccttctagcttctgtggaggaagcaacttggaatttattagacaagggagagaagattgcccaggaagctacagttttaaaggatgagcttacggcttcacttgaggaagttcgcaaagaaagtgaagctctgaaagtatcagctgagagatttacagatgacccctgttttctcccaaaaagggaggctgtggttcaagctgcccgtgccttgctggctgcggtgacgagactccttatccttgcggacatgattgatgtcatgtgcctcttgcaacatgtgtcagcttttcaaaggacatttgagtctctcaaaaatgttgccaacaaatctgacctccagaaaacctaccagaagcttgggaaggagctggaaaatttggattatttagccttcaaacgtcagcag

SEQ ID NO: 114902 - DNA, 10675 bp, Homo sapiens
  Payload ID: 2441
  Gene Symbol: CTNNA3
  Gene Name: catenin (cadherin-associated protein), alpha 3
  Uniprot ID: Q9UI47
  ENST ID: ENST00000433211
  CDS Start-End: 176-2863
caacgctcagcgaaattgactgccccactgtcatctgcctctcaatttggtactctgtaactctgtgaccaccaagaagcctttttccgtcccccacaaagctctttttggaaaattccctacgggagctgaattttaagcccatttactttataggaagaaacagaaaggcagcatgtcagctgaaacaccaatcacattgaatatcgatcctcaggatctgcaggtccaaacattcaccgtggagaagctactggagcctctcataatccaggttaccacacttgtaaactgtccccagaacccttccagcaggaaaaaaggacgttcgaaaagagccagtgtccttctagcttctgtggaggaagcaacttggaatttattagacaagggagagaagattgcccaggaagctacagttttaaaggatgagcttacggcttcacttgaggaagttcgcaaagaaagtgaagctctgaaagtatcagctgagagatttacagatgacccctgttttctcccaaaaagggaggctgtggttcaagctgcccgtgccttgctggctgcggtgacgagactccttatccttgcggacatgattgatgtcatgtgcctcttgcaacatgtgtcagcttttcaaaggacatttgagtctctcaaaaatgttgccaacaaatctgacctccagaaaacctaccagaagcttgggaaggagctggaaaatttggattatttagccttcaaacgtcagcaggacttaaaatctccaaatcagagagatgaaattgcaggagcccgagcttcactgaaggagaactctcccctcttgcattcaatttgttcagcttgtttggagcattctgatgttgcttccctcaaagcaagcaaggacacagtttgtgaagaaattcagaatgctctcaatgtaatttcaaatgcttcacaagggatccagaatatgacaaccccaccagaacctcaggcagcaaccctgggaagtgcccttgatgagctggagaatttaattgtcctgaatccactcacagtaactgaggaggaaatacgaccatcactagagaaacgccttgaagccattatcagtggggctgctctgctggcggattcttcatgtacgagggacttacaccgagagcggattatcgcagaatgcaacgccattcgccaggctcttcaggatctgctttcagagtacatgaacaacgctggaaaaaaagaaaggagtaataccctgaatattgctttagacaacatgtgtaagaagacaagagaccttcgcagacagctccgcaaggctattatagatcatgtgtcagactctttcctggatacgacagtccctcttttggttctcattgaagctgctaagaatggccgggaaaaggaaataaaagaatatgctgcgatatttcatgaacacaccagcaggcttgtagaggtggcaaatcttgcttgttccatgtcaacaaatgaagatggaattaaaattgtcaaaattgcagccaatcatttggaaaccttgtgtccacagattattaatgctgcacttgctttggctgcaagacccaaaagtcaagcggtcaaaaacaccatggaaatgtacaagcgtacatgggagaatcatatacatgtcctcactgaagccgtagatgacattacaagcattgatgacttccttgctgtatctgaaagccatatcttggaagatgtcaacaagtgtatcatagccttaagagaccaggatgctgataatttagaccgtgctgcgggtgctatcagaggccgggcagcaagagttgctcacatcgtcacgggtgaaatggacagttacgagccaggggcttacacggaaggtgtaatgagaaatgttaacttccttacaagtactgtaattcctgaatttgtaacacaagtgaatgttgccttggaagccttaagcaaaagctcattgaatgtgttggatgataatcaatttgtggacatctcaaagaagatctatgatacaattcatgatatcagatgttcagtcatgatgattcggaccccagaggaactggaggatgtttctgaccttgaagaggaacacgaggtccgcagtcacaccagcattcagaccgaagggaaaactgatagggctaagatgactcaactgcctgaggcagaaaaagaaaagattgctgagcaagttgctgatttcaagaaagtaaagagtaagctggatgctgagattgagatatgggatgatacaagcaacgacatcattgttctggccaagaacatgtgtatgatcatgatggagatgacagacttcactaggggcaaaggaccactaaagcatacaactgatgtgatctatgcagcgaaaatgatatcagaatcaggatcaaggatggatgtccttgctcggcagattgctaatcagtgcccagatccatcttgtaaacaggacttgttggcctacctggaacagattaagttctactcccaccaactgaaaatctgcagtcaagttaaagctgagatccagaacctgggaggagagctcatcatgtcagctttggacagtgtcacatccctgatccaagcagccaaaaatttaatgaatgctgtagtgcaaacagtgaaaatgtcttacattgcctcaaccaagatcatccgaatccagagtcctgctgggccccggcacccagttgtgatgtggagaatgaaggctcctgcaaaaaaacccttgattaaaagagagaagccagaggaaacgtgtgcagctgtcagacgaggctcagcaaagaaaaaaatccatccattgcaagtcatgagtgaatttagaggaagacaaatctactgaaaccactattctacatatagtgcctatatgacaaaatcctgcctaaccacactgctttattttacacttaagaagttctgtaatttcactaagttttggtgtttaactcacaaataacataaaatattgggcgctaaatcaacaaaagcaatatatatttgggatcatatcactgtcatttctgtatggtcagcacctaatagttaaggaatatttgcttgttgaatgaatgaaattatcacgtgtcattcagcgtttcccatcatagagattatctactattcgttaccaaataaacacaggagaggccagagagtcctgtttatctgtaatacttcatgtacacttatcatccttatcttgaattaaaacactaacatgagctcctaacttggttttttaatagaaacaaaagacttttataaaatattttcccatttaatctccatgctttctttatctgatctaacctggcacctaaccaggcagaaatgtatgattcctgccatagcaaaaaaaccaccttttaatctctagatagctgtactcattgtcaacttattaggctaatatccattataaactaatcaaatttgaatagttaggctacttgctggattttgaaggtcaaccttgtttattaataaaatgctttcttaacattataaaggttacaatgagttctgatgccacatactcaccttttgggtttccaatgtgttagagagttctgtacttttgagtgttaggcctatccgaatacatatgtgaaagaagagttatcacccattgggaaaatgagacaacaaactatatcccaaagtgagttatattaataataacagaagtgtaagttctgtatgaccctatttttacaaacataaaaatacatttttatcagcttgcaattgtaattaaaaggaaaatggcagtttgaaaaatcttttgacgttgagtaaaatataactgcatgaactgtaccattgaactatgaagcagttaatggcaatgaagctggagtgattttaataacgttcttttaaataaaagtcactggggtcattttacaactccagtcactgtgttcattcctagttgagttcataatggacttcataatagtcttagagtctagtgtacctctctctgtcattctctctctctttttctctcccctgatgacctgcctctctctgtctttcaaaaatgtccttaacagaaactctttggaggccataagttttgttttcattttttctcattcatagagttctgattcacagactttaaaaaacattttctattctacattatcataatagtattatattgtacctttttacttctaaaacattgccattgatgagaggcgtctcagcaacgatgtaaccttagattgatgagaaaaaaatttacacatacaataccagttgatattaggagaaccagtttgggtaaaaggatgcatgaaacatagaaaagcataaagattgacagtacgatatgtgtggaatcttaagcataatggtatgggaaaagaaggatctatttaataggtcattattaattatgcaggaaatgttaaatttcttgtaatgaattatttcaatcttccaagtagctggattgcctgagctcagtgtaaaacttcctaggaggtgaaggcaataaactcctccctgttttgcaccatagactggcctacaataactattctgaacagaatgcactgcccagaagaaaaggcagtgaagaagggaattagggaattcagatgactctgtttttcagaattatctagatgattgaggcaaatagagattttcttttattgaaatgctgccatcattttctgctctaagtgtagatgttgcacgagtgacatctgtggtatatccttcttccagatagaagtataaatttataatttagtggggagaggaattttcttttaatcaccaaactaccagctgtatagaaaatttttttgaaatcaccaaactagcagttgtgtatcttagctcctaaagccacattcacaagaatcataagcatctcatttagaaaatctaatgtccaccggacccaacatcatctttccacatgttggagtttagaacatgcagtattggacaccaaaagaacagaaataacttgaaattatacaattaccaaataacctccatctctttgataaaaatgactttttacccaaagtgagatgtgaacaagttctcctctttaacccaggcagattttcagcttagctcaaagcaaactataattaaataaaacaataaaaattttaactcaatgaatatcctaggagttaatctgctgtggtaatcgatagtgacataaaaacaagatgcatagagctgaaaaaggcatctgtccacctgagtgaattcctgtagtaggcagcatttcaagatttagtttgattcaaacctgctgataaaacaaatgcttatatgcaagaaaaactagcagcaagatatgaataaatctccccattatgttaaaaactaatcagcatgacacatttatatttaggtatttcttctgcagaggattgccagaaatttcttaatgagagtgataatttggtgatccacctatgtaccttttgatgtctcatcacagagattagtgcttcctctgataatacatttgcttgatcctgctaataagaactcacctttctttttaacgaaatcaatttgtgttaatttacatagggaaaaacgttccttgagagggaggagaggggtgtttaccacccacaggagcagttccatccctggttacccaccagtatccctgccagatgttagactggaattagaatgaaaatttaaaaaaaaacgaaataataatccactaaatggccttctaattagagaaatttgaagatttctatcaaatataaaaagtgagaaatagaaatcattccctttaatttatgacaaattaaaattattgaagtaaaatgtttctaagtcagtttctggatagttcttgaatgagtcaagaaaaaactcaaacactaaatttctaagctaatttgttcattattcctttctgtttattatttattatatgagtgcaaattgcaaatgtattagaaaagacaatatagccttcacattcacaagtgtgccttctggcctttgaaatcttttaacataagatcaatataacatatttgttccccataaaaatctcttatgtacagggaataaggtcctccatagctacacagagacacccattcttgcagtctggcattcttaacacctttagcttcaaaggcagtcggtttcaatttcaagctaaaattgtgaatatacaattaagtgcgcaacttgggccttcagaccaaataattaatgctcctcaaattaaataatgagtggctgaaaagcctaatgtgtaacaacagagtaagtgacttcaacggcttcctgaaccttcattttgagggtgttctcatctcacccacctctgggctaggtatcctctgttaattgctaacaatttcctaccaaaatagtgcaatcaggactgcccatcacagcaaattactccaattaatgccctttcctcttctgtgaaccaaaaatatctctctcctgtctctcatctctatcccaggtataaattgactaataaattttacagagttttagtcaaaattatgaattttaatttccagcaacattattcctttagtctttctattccccaaaacattcttaaattttggtatcaaatgttcatttctgtcctagagattgtggttcccatggctacagatttttgtatagtggtagtatgagtggaataagatctgagacttttcctggtgatatccaccattctcttgtgaactcattgcagaataaacagcctctttcactttcattgtaagtagttctttaggttggcaaagcaggcaccagaatctgaatttgaatgaaatctgtactttcttttgttggcctattttttgccaagacagcctgcctattgtatatttaggaatcaaatattcattttttctgtttgtaaagccagaaatatttcagttaaaaagaatataattttatattattttaataattctttttaagtaaagtaggaaaatttctgccacctgagatgttactgtttttatttatatgaaaattccatttttttctttatgactcttttcccataccattatgatatgttcagcattagtattttccattttaccactaaacaaataagccaggactaataacaatagcagtttgagagtttttattttggcattttggttttaattaggaaagaaaacatggatgctattaaaactagttgtagttaaaaatgttttgaatgaggctactaacgctatcttagtcatctcaaagagaaagagaagaagtaaaattttaaatacctttttggcatttttaaccaattcatatgaacaaaaacatatattctattaaagcaaaataaagaatagtttaaaacactagtcttcttgcatgtgaatattttccccctaacagacaagatagaatccatttctggacactctaaaagaaagtaatgttaattgagagagctgtctccaaatggaactcaacctgaccagaatcccatccgcaggcaagagatgggctgtggggccgaccataagttttattctgagacgagatgctttatggctgctggctgcattatggcatctagcagtccccactggtttgtgggaacaaaacacatggattgatattcaatatgagtttggtaagttggagaaaaatggagacgatacggagtagtctaaaggcacaacaaataagaaggtgccagaggtagggaagggtctgagaggggtagttgcagaagcatttagctttcatagatgaggggagagttttttggttttatgaagattaggcagccctcctgaggaaagtattaaggatagaatgagacacttgtcttggtggtttggtgaagtcgtgtcgaaggcaaaaggatgaactacacatattttgagcatgatttagtaatattgtttgcaagttgagaaacagaaattcagccattctcctgactgatggtaggtgaaattcttcccaatattagagccaatctgggttaccatacgttcatatatttaacagctatttgttaaacaactgtgatgttccaggcactgttctaggttcttaggatacaccatataacaaaacaaatagtgatccttgccctcatgtgccagctctgtgttaaatgctaactattatcttattcaatcctccaaataaccctataggatatatatcattccacagacaaggaagctgagggttaaatgggataagaatcttgctcaaagtctcactggctttaaaatattaatatatattttacatcattcaagacagatatataattagctgaatattctcacctctattaactgaatgtagagtgtcaggtacatgggaagtaagttatttacgtgatctgaaataagaggacaacctttgccaaattacttttattaccatggagaagaaagcttcaatgaaatgcctgtttcagcccatcttcagtattggttggttaataccatttgttaacaccaatcctttcctcttttactgctaacatgtgactgtgtttaaaattatagattgcagcagagtgttggccaaggattattgtagtaggataaagtttccctgtatttgaaatttacccaaactgtagcaaatacatctttccttctttatggaggtcacacgtgtgcatagtatgtgcctgaatacaggtaaactttgtgttttaaaattacatggccttttttagagtcgactgaaggctagactcttcttgcccatgttgctggataggctttcaaatctcaggccttggagagttaaatgactttctgatatttcttacggtggagccacataagaaatacacacattcctagtttgagcaatggatgtgtatattggggatcttcacttttatgtatctggtagtcatgatggtgcctattcccaactgtaggaaaggaaagccctcaaggagaaaattctctttcaaaaaggctcagatttctaacaattatgtctaaatgtttcttcaatttagaacatgtacaaaagctacttaatattagcagagtagttcttgtgttttcatttcaaatgaaatattcccagttccaaagtttatttccttggcattttcaagaaggatggttatttttagttctggttatttggtgttggaggtctgtgacacttccttatacatttaaagccccctttgaatagttgtatcaatagttcaaaagcctgtagatatcttgcttttctattctgacagcccagcttctgcagactcaggccaaccttaggtatgtcacatcagttccccatctgtgtaaattacctgaacctctctgtggtattcactgagagttgagcttctactaagggatttccttgacctgggcttttaacaccagatttgtagtggagtgtttattagtaaagcaaaggagtaagtcagagatgctagcccctgctctcagttaaacagaactatcctccttcctgaatatttaaacataaaattaattttaaactactataaaaatcatgttccattgcttgccaaatcttataccattataatgctgtatttttacatgttagtatacattgtgtccatagggatataaatatgagaatttcagcaactgtcttgcagggttaagatgtgctatttgttgattttgcaaatttttctcatgtggtacagtccctccaaagaaaatttccttagacctaaatggtagcataataatttctcctccatatccgtgactaacaagttcctgaaaacagaagtagacatattttatgcccaatttagtacctaataattgaggcttaaaacaaaattttcttgggcaagttgggtgattaaatatgaattaaaacttctagagaaagatttccagatgcccctgttttccattttgattatggttttagtttcatagcaacttgggggaaaaaaatcatttactttatgtcgtattacaacaacaactttgacagcttaaatgtagtgacctctctgaaggtaatatgcacattataatttaggatgaaagcagatttaaactaagactttctgagatgaaataaaagtaaccaattcataatagtcatgtttattgcagcaatatcttgggaacttaagtttagtggcgtttgaggtgtttctgactatcttgcttgttcatttcaccctgctctgcagagacagaatatgattgaatgaactgcccattatattaatgaccagttcaaagcagttttgtgctttggctatagataaaatttggcaaaaatactgtaggcctttctggtccatatttatccttaaagtatttttgccaatcaataaaaatgaaatatttatccagaaatagaaaaagctctttcctatgacattgacatagaagcccaaatactccttgtttgagaccctgcatgtcttttgtgtttaactgaatcaatgattttttttagttgtgctcttaattgcattatttcacatatgtaacactgggtttgttttggttatatagtattattttactttattctaatttcaactcatgtcactctgtagctcattaagaatttgttcaactgaaaattaaaatgtgtgttaaagcaataaaaatgaaaagattggctatgcatttta

SEQ ID NO: 114903 - DNA, 555 bp, Homo sapiens
  Payload ID: 2441
  Gene Symbol: CTNNA3
  Gene Name: catenin (cadherin-associated protein), alpha 3
  ENST ID: ENST00000545309
  CDS Start-End: 1-555
caggacttaaaatctccaaatcagagagatgaaattgcaggagcccgagcttcactgaaggagaactctcccctcttgcattcaatttgttcagcttgtttggagcattctgatgttgcttccctcaaagcaagcaaggacacagtttgtgaagaaattcagaatgctctcaatgtaatttcaaatgcttcacaagggatccagaatatgacaaccccaccagaacctcaggcagcaaccctgggaagtgcccttgatgagctggagaatttaattgtcctgaatccactcacagtaactgaggaggaaatacgaccatcactagagaaacgccttgaagccattatcagtggggctgctctgctggcggattcttcatgtacgagggacttacaccgagagcggattatcgcagaatgcaacgccattcgccaggctcttcaggatctgctttcagagtacatgaacaacctctgtaatcaaaagtctgacctgggcctcactggagtaaaaatcaaattgttggaggaatgcattattttctggagtctctag

SEQ ID NO: 114904 - DNA, 470 bp, Homo sapiens
  Payload ID: 2441
  Gene Symbol: CTNNA3
  Gene Name: catenin (cadherin-associated protein), alpha 3
  ENST ID: ENST00000494580
  CDS Start-End: 1-382
tatcagtggggctgctctgctggcggattcttcatgtacgagggacttacaccgagagcggattatcgcagaatgcaacgccattcgccaggctcttcaggatctgctttcagagtacatgaacaacgctggaaaaaaagaaaggagtaataccctgaatattgctttagacaacatgtgtaagaagacaagagaccttcgcagacagctccgcaaggctattatagatcatgtgtcagactctttcctggatacgacagtccctcttttggttctcattgaagctgctaagaatggccgggaaaaggaaataaaagaatatgctgcgatatttcatgaacacaccagcaggcttgtagaggtaagcatgctagaactgtaactcactaaagtccaggagaatgaggctcccattctccatttatggttgaattgtacctaaataaaaacttttgacaccgtgttacaaa

SEQ ID NO: 114905 - DNA, 2490 bp, Homo sapiens
  Payload ID: 2442
  Gene Symbol: CTNNAL1
  Gene Name: catenin (cadherin-associated protein), alpha-like 1
  Uniprot ID: Q9UBT7
  ENST ID: ENST00000325551
  CDS Start-End: 88-2292
cctgtcgccgccgcctcgggcgggtgggctgactggcggcaggctcgccgcggcgcggagtcccggctgcgggatagaccgagggccatggccgcctctcccggacccgccggcgttggcggcgccggagcagtctacggctccggctcttcgggcttcgccctcgactcgggactggagatcaaaactcgctcggtggagcagacgctactcccgctggtttctcagatcaccacgcttattaatcataaagataataccaaaaagtctgataaaactctgcaagcaattcagcgtgtaggacaagctgtcaacttggcagttggaagatttgttaaagtaggagaagctatagccaatgaaaactgggatttgaaagaagaaataaatattgcttgtattgaagctaaacaagcaggagaaacaattgcagcacttacagacataaccaacttgaaccatctggaatctgatgggcagatcacaatttttacagacaaaacaggagtgataaaggctgcaagattacttctttcttcagtgacaaaagtgttgttgctggcagaccgagtagtcattaaacagataataacatcaagaaataaggttctcgcaactatggaaagactagagaaagtgaatagctttcaagagtttgtccaaatattcagtcaatttggaaatgaaatggtggagtttgcacatctgagtggagatagacaaaatgatttgaaagatgaaaagaaaaaggcaaaaatggcagcagctagggcagttcttgaaaagtgtacaatgatgcttctcacagcttcaaagacatgtctgaggcatcctaactgcgaatcagcccataaaaacaaagaaggagtatttgaccgtatgaaagtggcattggataaggtcattgaaattgtgactgactgtaaaccgaatggagagactgacatttcatctatcagtatttttactggaattaaggaattcaagatgaatattgaagctcttcgggagaatctttattttcagtccaaagagaacctttctgtgacattggaagtcatcttggagcgtatggaggactttactgattctgcctacaccagccatgagcacagagaacgcatcttggaactgtcaactcaggcgagaatggaactgcagcagttaatttctgtgtggattcaagctcaaagcaagaaaacaaaaagcatcgctgaagaactggaactcagtattttgaaaatcagtcacagtcttaatgaacttaagaaagaacttcatagtacagcgacacagctggcagcagatctattaaaataccatgctgatcatgtggttctaaaagcattaaaacttactggagtagaaggaaatttagaagctttggctgaatatgcctgtaaactctctgaacagaaagagcagcttgttgagacctgtcgattgttacgacacatatctgggacagaacctctggaaataacctgtatacatgcagaggagacatttcaggtgactggccaacagataatttctgctgctgaaacattgacattgcatccatctagtaaaattgctaaagaaaacctagatgtattttgtgaagcttgggaatcccaaattagtgacatgtcaacactgctgagagaaatcaatgacgtgtttgaaggaagacgaggagagaagtatggctacctttcacttccaaagccaatgaagaataatgcaaacctgaaatcattaaagccagacaagcctgactctgaggagcaagccaagatagcaaagcttggacttaagctgggtttgctcacctctgacgctgactgcgaaattgagaagtgggaagatcaggagaatgagattgttcaatatggacggaacatgtccagtatggcctattctctgtatttatttactagaggagaggggccactgaaaacttcccaggatttaattcatcaactagaggtttttgctgcagagggtttaaagcttacttccagtgttcaagctttttcaaaacagctgaaagacgatgacaagcttatgcttctcctggaaataaacaagctaattcctctatgccaccagctccagacagtaactaagacttctttgcagaataaagtatttctaaaggttgacaagtgtattacgaagacaagatccatgatggctctcttagtccaacttctttcactttgttataaactgctgaagaagcttcagatggaaaataacggatgggtctcagttacaaataaggacactatggatagtaaaacttgagaagcttttggggtcagatctctggaacatcatgtgatgaagctgacatttttaaaaatcaaatgatcctttatcttttcagaaattcatcaattttataaagaaaacaatattgaaattttgctctattttctgatcatgaaactgattgtaaagctttttgacaactaataaatgtcttggtaattgctagattct

SEQ ID NO: 114906 - DNA, 761 bp, Homo sapiens
  Payload ID: 2442
  Gene Symbol: CTNNAL1
  Gene Name: catenin (cadherin-associated protein), alpha-like 1
  ENST ID: ENST00000374593
  CDS Start-End: 71-622
gggcgggtgggctgactggcggcaggctcgccgcggcgcggagtcccggctgcgggatagaccgagggccatggccgcctctcccggacccgccggcgttggcggcgccggagcagtctacggctccggctcttcgggcttcgccctcgactcgggactggagatcaaaactcgctcggtggagcagacgctactcccgctggtttctcagatcaccacgcttattaatcataaagataataccaaaaagtctgataaaactctgcaagcaattcagcgtgtaggacaagctgtcaacttggcagttggaagatttgttaaagtaggagaagctatagccaatgaaaactgggatttgaaagaagaaataaatattgcttgtattgaagctaaacaagcaggagaaacaattgcagcacttacagacataaccaacttgaaccatctggaatctgatgggcagatcacaatttttacagacaaaacaggagtgataaaggctgcaagattacttctttcttcagtgacaaaagtgttgttgctggcagaccgagtagtcattaaacagataataacatcaagaaataagagactaacaatatataacttaagacacagttaaatcagtggaaatgataattatccacaactacaaaatttctgtactcagagtccctaaatgttactgaataatctcaaaacttacagaacagatttaaactcttccagtccagaagttaatctctcagatgatggtcatg

SEQ ID NO: 114907 - DNA, 824 bp, Homo sapiens
  Payload ID: 2442
  Gene Symbol: CTNNAL1
  Gene Name: catenin (cadherin-associated protein), alpha-like 1
  ENST ID: ENST00000374594
  CDS Start-End: 227-634
catcaatcctggccagctgattctcctctttaccagaacaccattgagcttagtacagaagaataatgcaaacctgaaatcattaaagccagacaagcctgactctgaggagcaagccaagatagcaaagcttggacttaagctgggtttgctcacctctgacgctgactgcgaaattgagaagtgggaagatcaggagaatgagattgttcaatatggacggaacatgtccagtatggcctattctctgtatttatttactagaggagaggggccactgaaaacttcccaggatttaattcatcaactagaggtttttgctgcagagggtttaaagcttacttccagtgttcaagctttttcaaaacagctgaaagacgatgacaagcttatgcttctcctggaaataaacaagctaattcctctatgccaccagctccagacagtaactaagacttctttgcagaataaagtatttctaaaggttgacaagtgtattacgaagacaagatccatgatggctctcttagtccaacttctttcactttgttataaactgctgaagaagcttcagatggaaaataacggatgggtctcagttacaaataaggacactatggatagtaaaacttgagaagcttttggggtcagatctctggaacatcatgtgatgaagctgacatttttaaaaatcaaatgatcctttatcttttcagaaattcatcaattttataaagaaaacaatattgaaattttgctctattttctgatcatgaaactgattgtaaagctttttgacaactaataaatgtcttggtaattgc

SEQ ID NO: 114908 - DNA, 2522 bp, Homo sapiens
  Payload ID: 2442
  Gene Symbol: CTNNAL1
  Gene Name: catenin (cadherin-associated protein), alpha-like 1
  Uniprot ID: Q9UBT7
  ENST ID: ENST00000374595
  CDS Start-End: 81-2237
ccgccgcctcgggcgggtgggctgactggcggcaggctcgccgcggcgcggagtcccggctgcgggatagaccgagggccatggccgcctctcccggacccgccggcgttggcggcgccggagcagtctacggctccggctcttcgggcttcgccctcgactcgggactggagatcaaaactcgctcggtggagcagacgctactcccgctggtttctcagatcaccacgcttattaatcataaagataataccaaaaagtctgataaaactctgcaagcaattcagcgtgtaggacaagctgtcaacttggcagttggaagatttgttaaagtaggagaagctatagccaatgaaaactgggatttgaaagaagaaataaatattgcttgtattgaagctaaacaagcaggagaaacaattgcagcacttacagacataaccaacttgaaccatctggaatctgatgggcagatcacaatttttacagacaaaacaggagtgataaaggctgcaagattacttctttcttcagtgacaaaagtgttgttgctggcagaccgagtagtcattaaacagataataacatcaagaaataaggttctcgcaactatggaaagactagagaaagtgaatagctttcaagagtttgtccaaatattcagtcaatttggaaatgaaatggtggagtttgcacatctgagtggagatagacaaaatgatttgaaagatgaaaagaaaaaggcaaaaatggcagcagctagggcagttcttgaaaagtgtacaatgatgcttctcacagcttcaaagacatgtctgaggcatcctaactgcgaatcagcccataaaaacaaagaaggagtatttgaccgtatgaaagtggcattggataaggtcattgaaattgtgactgactgtaaaccgaatggagagactgacatttcatctatcagtatttttactggaattaaggaattcaagatgaatattgaagctcttcgggagaatctttattttcagtccaaagagaacctttctgtgacattggaagtcatcttggagcgtatggaggactttactgattctgcctacaccagccatgagcacagagaacgcatcttggaactgtcaactcaggcgagaatggaactgcagcagttaatttctgtgtggattcaagctcaaagcaagaaaacaaaaagcatcgctgaagaactggaactcagtattttgaaaatcagtcacagtcttaatgaacttaagaaagaacttcatagtacagcgacacagctggcagcagatctattaaaataccatgctgatcatgtggttctaaaagcattaaaacttactggagtagaaggaaatttagaagctttggctgaatatgcctgtaaactctctgaacagaaagagcagcttgttgagacctgtcgattgttacgacacatatctgggacagaacctctggaaataacctgtatacatgcagaggagacatttcaggtgactggccaacagataatttctgctgctgaaacattgacattgcatccatctagtaaaattgctaaagaaaacctagatgtattttgtgaagcttgggaatcccaaattagtgacatgtcaacactgctgagagaaatcaatgacgtgtttgaaggaagacgaggagagaagtatggctacctttcacttccaaagccaatgaagaataatgcaaacctgaaatcattaaagccagacaagcctgactctgaggagcaagccaagatagcaaagcttggacttaagctgggtttgctcacctctgacgctgactgcgaaattgagaagtgggaagatcaggagaatgagattgttcaatatggacggaacatgtccagtatggcctattctctgtatttatttactagaggagaggggccactgaaaacttcccaggatttaattcatcaactagaggtttttgctgcagagggtttaaagcttacttccagtgttcaagctttttcaaaacagctgaaagacgatgacaagcttatgcttctcctggaaataaacaagctaattcctctatgccaccagctccagacagtaactaagacttctttgcagaataaagtatttctaaaggttgacaagtgtattacgaagacaagatccatgatggctctcttagtccaacttctttcactttgttataaactgctgaagaagagtgaaaccagatactaattgtcttaactctttccagcttcagatggaaaataacggatgggtctcagttacaaataaggacactatggatagtaaaacttgagaagcttttggggtcagatctctggaacatcatgtgatgaagctgacatttttaaaaatcaaatgatcctttatcttttcagaaattcatcaattttataaagaaaacaatattgaaattttgctctattttctgatcatgaaactgattgtaaagctttttgacaactaataaatgtcttggtaattgctagattctaa

SEQ ID NO: 114909 - DNA, 3737 bp, Homo sapiens
  Payload ID: 2443
  Gene Symbol: CTNNB1
  Gene Name: catenin (cadherin-associated protein), beta 1, 88kDa
  Uniprot ID: P35222
  ENST ID: ENST00000349496
  CDS Start-End: 281-2626
gccggtggcggcaggatacagcggcttctgcgcgacttataagagctccttgtgcggcgccattttaagcctctcggtctgtggcagcagcgttggcccggccccgggagcggagagcgaggggaggcggagacggaggaaggtctgaggagcagcttcagtccccgccgagccgccaccgcaggtcgaggacggtcggactcccgcggcgggaggagcctgttcccctgagggtatttgaagtataccatacaactgttttgaaaatccagcgtggacaatggctactcaagctgatttgatggagttggacatggccatggaaccagacagaaaagcggctgttagtcactggcagcaacagtcttacctggactctggaatccattctggtgccactaccacagctccttctctgagtggtaaaggcaatcctgaggaagaggatgtggatacctcccaagtcctgtatgagtgggaacagggattttctcagtccttcactcaagaacaagtagctgatattgatggacagtatgcaatgactcgagctcagagggtacgagctgctatgttccctgagacattagatgagggcatgcagatcccatctacacagtttgatgctgctcatcccactaatgtccagcgtttggctgaaccatcacagatgctgaaacatgcagttgtaaacttgattaactatcaagatgatgcagaacttgccacacgtgcaatccctgaactgacaaaactgctaaatgacgaggaccaggtggtggttaataaggctgcagttatggtccatcagctttctaaaaaggaagcttccagacacgctatcatgcgttctcctcagatggtgtctgctattgtacgtaccatgcagaatacaaatgatgtagaaacagctcgttgtaccgctgggaccttgcataacctttcccatcatcgtgagggcttactggccatctttaagtctggaggcattcctgccctggtgaaaatgcttggttcaccagtggattctgtgttgttttatgccattacaactctccacaaccttttattacatcaagaaggagctaaaatggcagtgcgtttagctggtgggctgcagaaaatggttgccttgctcaacaaaacaaatgttaaattcttggctattacgacagactgccttcaaattttagcttatggcaaccaagaaagcaagctcatcatactggctagtggtggaccccaagctttagtaaatataatgaggacctatacttacgaaaaactactgtggaccacaagcagagtgctgaaggtgctatctgtctgctctagtaataagccggctattgtagaagctggtggaatgcaagctttaggacttcacctgacagatccaagtcaacgtcttgttcagaactgtctttggactctcaggaatctttcagatgctgcaactaaacaggaagggatggaaggtctccttgggactcttgttcagcttctgggttcagatgatataaatgtggtcacctgtgcagctggaattctttctaacctcacttgcaataattataagaacaagatgatggtctgccaagtgggtggtatagaggctcttgtgcgtactgtccttcgggctggtgacagggaagacatcactgagcctgccatctgtgctcttcgtcatctgaccagccgacaccaagaagcagagatggcccagaatgcagttcgccttcactatggactaccagttgtggttaagctcttacacccaccatcccactggcctctgataaaggctactgttggattgattcgaaatcttgccctttgtcccgcaaatcatgcacctttgcgtgagcagggtgccattccacgactagttcagttgcttgttcgtgcacatcaggatacccagcgccgtacgtccatgggtgggacacagcagcaatttgtggagggggtccgcatggaagaaatagttgaaggttgtaccggagcccttcacatcctagctcgggatgttcacaaccgaattgttatcagaggactaaataccattccattgtttgtgcagctgctttattctcccattgaaaacatccaaagagtagctgcaggggtcctctgtgaacttgctcaggacaaggaagctgcagaagctattgaagctgagggagccacagctcctctgacagagttacttcactctaggaatgaaggtgtggcgacatatgcagctgctgttttgttccgaatgtctgaggacaagccacaagattacaagaaacggctttcagttgagctgaccagctctctcttcagaacagagccaatggcttggaatgagactgctgatcttggacttgatattggtgcccagggagaaccccttggatatcgccaggatgatcctagctatcgttcttttcactctggtggatatggccaggatgccttgggtatggaccccatgatggaacatgagatgggtggccaccaccctggtgctgactatccagttgatgggctgccagatctggggcatgcccaggacctcatggatgggctgcctccaggtgacagcaatcagctggcctggtttgatactgacctgtaaatcatcctttaggtaagaagttttaaaaagccagtttgggtaaaatacttttactctgcctacagaacttcagaaagacttggttggtagggtgggagtggtttaggctatttgtaaatctgccacaaaaacaggtatatactttgaaaggagatgtcttggaacattggaatgttctcagatttctggttgttatgtgatcatgtgtggaagttattaactttaatgttttttgccacagcttttgcaacttaatactcaaatgagtaacatttgctgttttaaacattaatagcagcctttctctctttatacagctgtattgtctgaacttgcattgtgattggcctgtagagttgctgagagggctcgaggggtgggctggtatctcagaaagtgcctgacacactaaccaagctgagtttcctatgggaacaattgaagtaaactttttgttctggtcctttttggtcgaggagtaacaatacaaatggattttgggagtgactcaagaagtgaagaatgcacaagaatggatcacaagatggaatttatcaaaccctagccttgcttgttaaatttttttttttttttttttaagaatatctgtaatggtactgactttgcttgctttgaagtagctctttttttttttttttttttttttttgcagtaactgttttttaagtctctcgtagtgttaagttatagtgaatactgctacagcaatttctaatttttaagaattgagtaatggtgtagaacactaattcataatcactctaattaattgtaatctgaataaagtgtaacaattgtgtagcctttttgtataaaatagacaaatagaaaatggtccaattagtttcctttttaatatgcttaaaataagcaggtggatctatttcatgtttttgatcaaaaactatttgggatatgtatgggtagggtaaatcagtaagaggtgttatttggaaccttgttttggacagtttaccagttgccttttatcccaaagttgttgtaacctgctgtgatacgatgcttcaagagaaaatgcggttataaaaaatggttcagaattaaacttttaattcattcgattgtgtca

SEQ ID NO: 114910 - DNA, 3268 bp, Homo sapiens
  Payload ID: 2443
  Gene Symbol: CTNNB1
  Gene Name: catenin (cadherin-associated protein), beta 1, 88kDa
  Uniprot ID: P35222
  ENST ID: ENST00000396183
  CDS Start-End: 286-2631
gctgcgccggtggcggcaggatacagcggcttctgcgcgacttataagagctccttgtgcggcgccattttaagcctctcggtctgtggcagcagcgttggcccggccccgggagcggagagcgaggggaggcggagacggaggaaggtctgaggagcagcttcagtccccgccgagccgccaccgcaggtcgaggacggtcggactcccgcggcgggaggagcctgttcccctgagggtatttgaagtataccatacaactgttttgaaaatccagcgtggacaatggctactcaagctgatttgatggagttggacatggccatggaaccagacagaaaagcggctgttagtcactggcagcaacagtcttacctggactctggaatccattctggtgccactaccacagctccttctctgagtggtaaaggcaatcctgaggaagaggatgtggatacctcccaagtcctgtatgagtgggaacagggattttctcagtccttcactcaagaacaagtagctgatattgatggacagtatgcaatgactcgagctcagagggtacgagctgctatgttccctgagacattagatgagggcatgcagatcccatctacacagtttgatgctgctcatcccactaatgtccagcgtttggctgaaccatcacagatgctgaaacatgcagttgtaaacttgattaactatcaagatgatgcagaacttgccacacgtgcaatccctgaactgacaaaactgctaaatgacgaggaccaggtggtggttaataaggctgcagttatggtccatcagctttctaaaaaggaagcttccagacacgctatcatgcgttctcctcagatggtgtctgctattgtacgtaccatgcagaatacaaatgatgtagaaacagctcgttgtaccgctgggaccttgcataacctttcccatcatcgtgagggcttactggccatctttaagtctggaggcattcctgccctggtgaaaatgcttggttcaccagtggattctgtgttgttttatgccattacaactctccacaaccttttattacatcaagaaggagctaaaatggcagtgcgtttagctggtgggctgcagaaaatggttgccttgctcaacaaaacaaatgttaaattcttggctattacgacagactgccttcaaattttagcttatggcaaccaagaaagcaagctcatcatactggctagtggtggaccccaagctttagtaaatataatgaggacctatacttacgaaaaactactgtggaccacaagcagagtgctgaaggtgctatctgtctgctctagtaataagccggctattgtagaagctggtggaatgcaagctttaggacttcacctgacagatccaagtcaacgtcttgttcagaactgtctttggactctcaggaatctttcagatgctgcaactaaacaggaagggatggaaggtctccttgggactcttgttcagcttctgggttcagatgatataaatgtggtcacctgtgcagctggaattctttctaacctcacttgcaataattataagaacaagatgatggtctgccaagtgggtggtatagaggctcttgtgcgtactgtccttcgggctggtgacagggaagacatcactgagcctgccatctgtgctcttcgtcatctgaccagccgacaccaagaagcagagatggcccagaatgcagttcgccttcactatggactaccagttgtggttaagctcttacacccaccatcccactggcctctgataaaggctactgttggattgattcgaaatcttgccctttgtcccgcaaatcatgcacctttgcgtgagcagggtgccattccacgactagttcagttgcttgttcgtgcacatcaggatacccagcgccgtacgtccatgggtgggacacagcagcaatttgtggagggggtccgcatggaagaaatagttgaaggttgtaccggagcccttcacatcctagctcgggatgttcacaaccgaattgttatcagaggactaaataccattccattgtttgtgcagctgctttattctcccattgaaaacatccaaagagtagctgcaggggtcctctgtgaacttgctcaggacaaggaagctgcagaagctattgaagctgagggagccacagctcctctgacagagttacttcactctaggaatgaaggtgtggcgacatatgcagctgctgttttgttccgaatgtctgaggacaagccacaagattacaagaaacggctttcagttgagctgaccagctctctcttcagaacagagccaatggcttggaatgagactgctgatcttggacttgatattggtgcccagggagaaccccttggatatcgccaggatgatcctagctatcgttcttttcactctggtggatatggccaggatgccttgggtatggaccccatgatggaacatgagatgggtggccaccaccctggtgctgactatccagttgatgggctgccagatctggggcatgcccaggacctcatggatgggctgcctccaggtgacagcaatcagctggcctggtttgatactgacctgtaaatcatcctttaggagtaacaatacaaatggattttgggagtgactcaagaagtgaagaatgcacaagaatggatcacaagatggaatttatcaaaccctagccttgcttgttaaatttttttttttttttttttaagaatatctgtaatggtactgactttgcttgctttgaagtagctctttttttttttttttttttttttttgcagtaactgttttttaagtctctcgtagtgttaagttatagtgaatactgctacagcaatttctaatttttaagaattgagtaatggtgtagaacactaattcataatcactctaattaattgtaatctgaataaagtgtaacaattgtgtagcctttttgtataaaatagacaaatagaaaatggtccaattagtttcctttttaatatgcttaaaataagcaggtggatctatttcatgtttttgatcaaaaactatttgggatatgtatgggtagggtaaatcagtaagaggtgttatttggaaccttgttttggacagtttaccagttgccttttatcccaaagttgttgtaacctgctgtgatacgatgcttcaagagaaaatgcggttataaaaaatggttcagaattaaacttttaattcattc

SEQ ID NO: 114911 - DNA, 3356 bp, Homo sapiens
  Payload ID: 2443
  Gene Symbol: CTNNB1
  Gene Name: catenin (cadherin-associated protein), beta 1, 88kDa
  Uniprot ID: P35222
  ENST ID: ENST00000396185
  CDS Start-End: 215-2560
aagcctctcggtctgtggcagcagcgttggcccggccccgggagcggagagcgaggggaggcggagacggaggaaggtctgaggagcagcttcagtccccgccgagccgccaccgcaggtcgaggacggtcggactcccgcggcgggaggagcctgttcccctgagggtatttgaagtataccatacaactgttttgaaaatccagcgtggacaatggctactcaagctgatttgatggagttggacatggccatggaaccagacagaaaagcggctgttagtcactggcagcaacagtcttacctggactctggaatccattctggtgccactaccacagctccttctctgagtggtaaaggcaatcctgaggaagaggatgtggatacctcccaagtcctgtatgagtgggaacagggattttctcagtccttcactcaagaacaagtagctgatattgatggacagtatgcaatgactcgagctcagagggtacgagctgctatgttccctgagacattagatgagggcatgcagatcccatctacacagtttgatgctgctcatcccactaatgtccagcgtttggctgaaccatcacagatgctgaaacatgcagttgtaaacttgattaactatcaagatgatgcagaacttgccacacgtgcaatccctgaactgacaaaactgctaaatgacgaggaccaggtggtggttaataaggctgcagttatggtccatcagctttctaaaaaggaagcttccagacacgctatcatgcgttctcctcagatggtgtctgctattgtacgtaccatgcagaatacaaatgatgtagaaacagctcgttgtaccgctgggaccttgcataacctttcccatcatcgtgagggcttactggccatctttaagtctggaggcattcctgccctggtgaaaatgcttggttcaccagtggattctgtgttgttttatgccattacaactctccacaaccttttattacatcaagaaggagctaaaatggcagtgcgtttagctggtgggctgcagaaaatggttgccttgctcaacaaaacaaatgttaaattcttggctattacgacagactgccttcaaattttagcttatggcaaccaagaaagcaagctcatcatactggctagtggtggaccccaagctttagtaaatataatgaggacctatacttacgaaaaactactgtggaccacaagcagagtgctgaaggtgctatctgtctgctctagtaataagccggctattgtagaagctggtggaatgcaagctttaggacttcacctgacagatccaagtcaacgtcttgttcagaactgtctttggactctcaggaatctttcagatgctgcaactaaacaggaagggatggaaggtctccttgggactcttgttcagcttctgggttcagatgatataaatgtggtcacctgtgcagctggaattctttctaacctcacttgcaataattataagaacaagatgatggtctgccaagtgggtggtatagaggctcttgtgcgtactgtccttcgggctggtgacagggaagacatcactgagcctgccatctgtgctcttcgtcatctgaccagccgacaccaagaagcagagatggcccagaatgcagttcgccttcactatggactaccagttgtggttaagctcttacacccaccatcccactggcctctgataaaggctactgttggattgattcgaaatcttgccctttgtcccgcaaatcatgcacctttgcgtgagcagggtgccattccacgactagttcagttgcttgttcgtgcacatcaggatacccagcgccgtacgtccatgggtgggacacagcagcaatttgtggagggggtccgcatggaagaaatagttgaaggttgtaccggagcccttcacatcctagctcgggatgttcacaaccgaattgttatcagaggactaaataccattccattgtttgtgcagctgctttattctcccattgaaaacatccaaagagtagctgcaggggtcctctgtgaacttgctcaggacaaggaagctgcagaagctattgaagctgagggagccacagctcctctgacagagttacttcactctaggaatgaaggtgtggcgacatatgcagctgctgttttgttccgaatgtctgaggacaagccacaagattacaagaaacggctttcagttgagctgaccagctctctcttcagaacagagccaatggcttggaatgagactgctgatcttggacttgatattggtgcccagggagaaccccttggatatcgccaggatgatcctagctatcgttcttttcactctggtggatatggccaggatgccttgggtatggaccccatgatggaacatgagatgggtggccaccaccctggtgctgactatccagttgatgggctgccagatctggggcatgcccaggacctcatggatgggctgcctccaggtgacagcaatcagctggcctggtttgatactgacctgtaaatcatcctttagctgtattgtctgaacttgcattgtgattggcctgtagagttgctgagagggctcgaggggtgggctggtatctcagaaagtgcctgacacactaaccaagctgagtttcctatgggaacaattgaagtaaactttttgttctggtcctttttggtcgaggagtaacaatacaaatggattttgggagtgactcaagaagtgaagaatgcacaagaatggatcacaagatggaatttatcaaaccctagccttgcttgttaaatttttttttttttttttttaagaatatctgtaatggtactgactttgcttgctttgaagtagctctttttttttttttttttttttttttgcagtaactgttttttaagtctctcgtagtgttaagttatagtgaatactgctacagcaatttctaatttttaagaattgagtaatggtgtagaacactaattcataatcactctaattaattgtaatctgaataaagtgtaacaattgtgtagcctttttgtataaaatagacaaatagaaaatggtccaattagtttcctttttaatatgcttaaaataagcaggtggatctatttcatgtttttgatcaaaaactatttgggatatgtatgggtagggtaaatcagtaagaggtgttatttggaaccttgttttggacagtttaccagttgccttttatcccaaagttgttgtaacctgctgtgatacgatgcttcaagagaaaatgcggttataaaaaatggttcagaattaaacttttaattcattc

SEQ ID NO: 114912 - DNA, 2513 bp, Homo sapiens
  Payload ID: 2443
  Gene Symbol: CTNNB1
  Gene Name: catenin (cadherin-associated protein), beta 1, 88kDa
  Uniprot ID: P35222
  ENST ID: ENST00000405570
  CDS Start-End: 157-2502
aaagagggacggaatactgcagtgctagggtgctggagtccagaaatgattttttcgatgaatttaggattttgccgcagtatacatctgcagtcccagaatcctccgggtatttgaagtataccatacaactgttttgaaaatccagcgtggacaatggctactcaagctgatttgatggagttggacatggccatggaaccagacagaaaagcggctgttagtcactggcagcaacagtcttacctggactctggaatccattctggtgccactaccacagctccttctctgagtggtaaaggcaatcctgaggaagaggatgtggatacctcccaagtcctgtatgagtgggaacagggattttctcagtccttcactcaagaacaagtagctgatattgatggacagtatgcaatgactcgagctcagagggtacgagctgctatgttccctgagacattagatgagggcatgcagatcccatctacacagtttgatgctgctcatcccactaatgtccagcgtttggctgaaccatcacagatgctgaaacatgcagttgtaaacttgattaactatcaagatgatgcagaacttgccacacgtgcaatccctgaactgacaaaactgctaaatgacgaggaccaggtggtggttaataaggctgcagttatggtccatcagctttctaaaaaggaagcttccagacacgctatcatgcgttctcctcagatggtgtctgctattgtacgtaccatgcagaatacaaatgatgtagaaacagctcgttgtaccgctgggaccttgcataacctttcccatcatcgtgagggcttactggccatctttaagtctggaggcattcctgccctggtgaaaatgcttggttcaccagtggattctgtgttgttttatgccattacaactctccacaaccttttattacatcaagaaggagctaaaatggcagtgcgtttagctggtgggctgcagaaaatggttgccttgctcaacaaaacaaatgttaaattcttggctattacgacagactgccttcaaattttagcttatggcaaccaagaaagcaagctcatcatactggctagtggtggaccccaagctttagtaaatataatgaggacctatacttacgaaaaactactgtggaccacaagcagagtgctgaaggtgctatctgtctgctctagtaataagccggctattgtagaagctggtggaatgcaagctttaggacttcacctgacagatccaagtcaacgtcttgttcagaactgtctttggactctcaggaatctttcagatgctgcaactaaacaggaagggatggaaggtctccttgggactcttgttcagcttctgggttcagatgatataaatgtggtcacctgtgcagctggaattctttctaacctcacttgcaataattataagaacaagatgatggtctgccaagtgggtggtatagaggctcttgtgcgtactgtccttcgggctggtgacagggaagacatcactgagcctgccatctgtgctcttcgtcatctgaccagccgacaccaagaagcagagatggcccagaatgcagttcgccttcactatggactaccagttgtggttaagctcttacacccaccatcccactggcctctgataaaggctactgttggattgattcgaaatcttgccctttgtcccgcaaatcatgcacctttgcgtgagcagggtgccattccacgactagttcagttgcttgttcgtgcacatcaggatacccagcgccgtacgtccatgggtgggacacagcagcaatttgtggagggggtccgcatggaagaaatagttgaaggttgtaccggagcccttcacatcctagctcgggatgttcacaaccgaattgttatcagaggactaaataccattccattgtttgtgcagctgctttattctcccattgaaaacatccaaagagtagctgcaggggtcctctgtgaacttgctcaggacaaggaagctgcagaagctattgaagctgagggagccacagctcctctgacagagttacttcactctaggaatgaaggtgtggcgacatatgcagctgctgttttgttccgaatgtctgaggacaagccacaagattacaagaaacggctttcagttgagctgaccagctctctcttcagaacagagccaatggcttggaatgagactgctgatcttggacttgatattggtgcccagggagaaccccttggatatcgccaggatgatcctagctatcgttcttttcactctggtggatatggccaggatgccttgggtatggaccccatgatggaacatgagatgggtggccaccaccctggtgctgactatccagttgatgggctgccagatctggggcatgcccaggacctcatggatgggctgcctccaggtgacagcaatcagctggcctggtttgatactgacctgtaaatcatccttta

SEQ ID NO: 114913 - DNA, 596 bp, Homo sapiens
  Payload ID: 2443
  Gene Symbol: CTNNB1
  Gene Name: catenin (cadherin-associated protein), beta 1, 88kDa
  ENST ID: ENST00000433400
  CDS Start-End: 558-596
acataattttttgtttaagatccagtaagactccctgtttttaatacatataaagcaacagacatgtatatgtcgataaactgagggtttgcgtccctattgcctggtgcaagctacagcaaaaaaccggtgatatcacatctacaaatctcaatggattcaaaaacaatatgaaaatttttagctgacaagaacatgtctgctgcctgcagtccctgcaatagctcaccatgttgcctactaaccaaaagatcaaaaattatcgatttcatggcgctgcgaggtctggaaagaaaagctactttaaaatttgcattgtttaagaaatgacttaaaagaaaagaatcatttttttttctgaatactttggaaggtgaaaatggcttgttttaatcttatccatgatttactataattctattatttttagcagctggagtccagaaatgattttttcgatgaatttaggattttgccgcagtatacatctgcagtcccagaatcctccgggtatttgaagtataccatacaactgttttgaaaatccagcgtggacaatggctactcaagctgatttgatggagttggacatggcc

SEQ ID NO: 114914 - DNA, 563 bp, Homo sapiens
  Payload ID: 2443
  Gene Symbol: CTNNB1
  Gene Name: catenin (cadherin-associated protein), beta 1, 88kDa
  ENST ID: ENST00000426215
  CDS Start-End: 386-563
agcaaagaatcaccccacacaaagatggcgcgtgcagaatttgtgaaagcgaaaaagaagacgaaggagaagcaaagagggacggaatactgcagtgctagggtgcagctggagtccagaaatgattttttcgatgaatttaggattttgccgcagtatacatctgcagtcccagaatcctccgggtatttgaagtataccatacaactgttttgaaaatccagcgtggacaatggctactcaaggctaccttttgctccattttctgctcactcctcctaatggcttggtgaaatagcaaacaagccaccagcaggaatctagtctggatgactgcttctggagcctggatgcagtaccattcttccactgattcactgatttgatggagttggacatggccatggaaccagacagaaaagcggctgttagtcactggcagcaacagtcttacctggactctggaatccattctggtgccactaccacagctccttctctgagtggtaaaggcaatcctgaggaagaggatgtggatacctcccaagtcctgtatgagtggg

SEQ ID NO: 114915 - DNA, 608 bp, Homo sapiens
  Payload ID: 2443
  Gene Symbol: CTNNB1
  Gene Name: catenin (cadherin-associated protein), beta 1, 88kDa
  ENST ID: ENST00000441708
  CDS Start-End: 309-608
aaaattttcctgaagtgattggtaagttttggctaattgggagcactagaattgggcccttaatggttggcagggtgtggtggaggagagacagcccttagtccaaaggctcaggccagaaaaagaaagaggaaggctttccttttcctttccggagcagggttctgccctaggtcttgcttggcagtctatttgatttctttagcagttaatgctcagttttttggcatatgtggatctgcctccagagcaggtacaagggtatttgaagtataccatacaactgttttgaaaatccagcgtggacaatggctactcaagctgatttgatggagttggacatggccatggaaccagacagaaaagcggctgttagtcactggcagcaacagtcttacctggactctggaatccattctggtgccactaccacagctccttctctgagtggtaaaggcaatcctgaggaagaggatgtggatacctcccaagtcctgtatgagtgggaacagggattttctcagtccttcactcaagaacaagtagctgatattgatggacagtatgcaatgactcgagctcagagggtacgagctgctatgttccct

SEQ ID NO: 114916 - DNA, 645 bp, Homo sapiens
  Payload ID: 2443
  Gene Symbol: CTNNB1
  Gene Name: catenin (cadherin-associated protein), beta 1, 88kDa
  ENST ID: ENST00000450969
  CDS Start-End: 320-645
agttggggttcgggcgctgaggcagagacgccaccctaagtcccatcagtcctggggatcggaccagtggactttctcttaagatttcctctttcattcttaagaatagaagtgttattattttttttaatgccctggctatgtgagtttgaatcgaagcaactttaaaccttagagcaactaaactctaagtgcagcgggtgcgatgcgtcagtagggtgagcacataaaaaatccatgtcttgcacctgtattttagcgtactatgcagggtatttgaagtataccatacaactgttttgaaaatccagcgtggacaatggctactcaagctgatttgatggagttggacatggccatggaaccagacagaaaagcggctgttagtcactggcagcaacagtcttacctggactctggaatccattctggtgccactaccacagctccttctctgagtggtaaaggcaatcctgaggaagaggatgtggatacctcccaagtcctgtatgagtgggaacagggattttctcagtccttcactcaagaacaagtagctgatattgatggacagtatgcaatgactcgagctcagagggtacgagctgctatgttccctgagacattagatgagggcatgcagat

SEQ ID NO: 114917 - DNA, 2841 bp, Homo sapiens
  Payload ID: 2443
  Gene Symbol: CTNNB1
  Gene Name: catenin (cadherin-associated protein), beta 1, 88kDa
  ENST ID: ENST00000453024
  CDS Start-End: 428-2752
ggcggcaggatacagcggcttctgcgcgacttataagagctccttgtgcggcgccattttaagcctctcggtctgtggcagcagcgttggcccggccccgggagcggagagcgaggggaggcggagacggaggaaggtctgaggagcagcttcagtccccgccgagccgccaccgcaggtcgaggacggtcggactcccgcggcgggaggagcctgttcccctgagggtatttgaagtataccatacaactgttttgaaaatccagcgtggacaatggctactcaaggctaccttttgctccattttctgctcactcctcctaatggcttggtgaaatagcaaacaagccaccagcaggaatctagtctggatgactgcttctggagcctggatgcagtaccattcttccactgattcactgatttgatggagttggacatggccatggaaccagacagaaaagcggctgttagtcactggcagcaacagtcttacctggactctggaatccattctggtgccactaccacagctccttctctgagtggtaaaggcaatcctgaggaagaggatgtggatacctcccaagtcctgtatgagtgggaacagggattttctcagtccttcactcaagaacaagtagctgatattgatggacagtatgcaatgactcgagctcagagggtacgagctgctatgttccctgagacattagatgagggcatgcagatcccatctacacagtttgatgctgctcatcccactaatgtccagcgtttggctgaaccatcacagatgctgaaacatgcagttgtaaacttgattaactatcaagatgatgcagaacttgccacacgtgcaatccctgaactgacaaaactgctaaatgacgaggaccaggtggtggttaataaggctgcagttatggtccatcagctttctaaaaaggaagcttccagacacgctatcatgcgttctcctcagatggtgtctgctattgtacgtaccatgcagaatacaaatgatgtagaaacagctcgttgtaccgctgggaccttgcataacctttcccatcatcgtgagggcttactggccatctttaagtctggaggcattcctgccctggtgaaaatgcttggttcaccagtggattctgtgttgttttatgccattacaactctccacaaccttttattacatcaagaaggagctaaaatggcagtgcgtttagctggtgggctgcagaaaatggttgccttgctcaacaaaacaaatgttaaattcttggctattacgacagactgccttcaaattttagcttatggcaaccaagaaagcaagctcatcatactggctagtggtggaccccaagctttagtaaatataatgaggacctatacttacgaaaaactactgtggaccacaagcagagtgctgaaggtgctatctgtctgctctagtaataagccggctattgtagaagctggtggaatgcaagctttaggacttcacctgacagatccaagtcaacgtcttgttcagaactgtctttggactctcaggaatctttcagatgctgcaactaaacaggaagggatggaaggtctccttgggactcttgttcagcttctgggttcagatgatataaatgtggtcacctgtgcagctggaattctttctaacctcacttgcaataattataagaacaagatgatggtctgccaagtgggtggtatagaggctcttgtgcgtactgtccttcgggctggtgacagggaagacatcactgagcctgccatctgtgctcttcgtcatctgaccagccgacaccaagaagcagagatggcccagaatgcagttcgccttcactatggactaccagttgtggttaagctcttacacccaccatcccactggcctctgataaaggctactgttggattgattcgaaatcttgccctttgtcccgcaaatcatgcacctttgcgtgagcagggtgccattccacgactagttcagttgcttgttcgtgcacatcaggatacccagcgccgtacgtccatgggtgggacacagcagcaatttgtggagggggtccgcatggaagaaatagttgaaggttgtaccggagcccttcacatcctagctcgggatgttcacaaccgaattgttatcagaggactaaataccattccattgtttgtgcagctgctttattctcccattgaaaacatccaaagagtagctgcaggggtcctctgtgaacttgctcaggacaaggaagctgcagaagctattgaagctgagggagccacagctcctctgacagagttacttcactctaggaatgaaggtgtggcgacatatgcagctgctgttttgttccgaatgtctgaggacaagccacaagattacaagaaacggctttcagttgagctgaccagctctctcttcagaacagagccaatggcttggaatgagactgctgatcttggacttgatattggtgcccagggagaaccccttggatatcgccaggatgatcctagctatcgttcttttcactctggtggatatggccaggatgccttgggtatggaccccatgatggaacatgagatgggtggccaccaccctggtgctgactatccagttgatgggctgccagatctggggcatgcccaggacctcatggatgggctgcctccaggtgacagcaatcagctggcctggtttgatactgacctgtaaatcatcctttagctgtattgtctgaacttgcattgtgattggcctgtagagttgctgagagggctcgaggggtgggctggtatctcaga

SEQ ID NO: 114918 - DNA, 634 bp, Homo sapiens
  Payload ID: 2443
  Gene Symbol: CTNNB1
  Gene Name: catenin (cadherin-associated protein), beta 1, 88kDa
  ENST ID: ENST00000431914
  CDS Start-End: 186-634
aggtactcctaaggacttgttgaattgcgggcttggcgcccgttctacggagagttcacagccttcgtgagtggggacagaaggcggctcggcccggtgattcaggtcgaaattcaagctgaacagcctgctgagagggtatttgaagtataccatacaactgttttgaaaatccagcgtggacaatggctactcaagctgatttgatggagttggacatggccatggaaccagacagaaaagcggctgttagtcactggcagcaacagtcttacctggactctggaatccattctggtgccactaccacagctccttctctgagtggtaaaggcaatcctgaggaagaggatgtggatacctcccaagtcctgtatgagtgggaacagggattttctcagtccttcactcaagaacaagtagctgatattgatggacagtatgcaatgactcgagctcagagggtacgagctgctatgttccctgagacattagatgagggcatgcagatcccatctacacagtttgatgctgctcatcccactaatgtccagcgtttggctgaaccatcacagatgctgaaacatgcagttgtaaacttgattaactatcaagatgatgcagaacttgccac

SEQ ID NO: 114919 - DNA, 6135 bp, Homo sapiens
  Payload ID: 2444
  Gene Symbol: CTNND1
  Gene Name: catenin (cadherin-associated protein), delta 1
  Uniprot ID: O60716
  ENST ID: ENST00000358694
  CDS Start-End: 464-3265
ctgccagatcagtttgtcaccacccaggctcccttgcctttggctgggtgcaacttccattttaggtgttggatctgagggggaaaaaaaagagagagggagagagagagaaagaagagcaggaaagatcccgaaaggaggaagaggtggcgaaaaatcaactgccctgctggatttgtctttctcagcaccttggcgaagccttgggtttctttcttaaaggactgatttttagaactccacatttgagctctctccttcctgcttcctccttgctgtggtggctgggatgcttcttccatgattttttgaatctagactgggctgttctctgtgttaaaccaatcagttgcgaccttctcttaacagtgtgaagtgagggggtctctctccctccttctccttcctctgtgattcaccttcctttttaccctgccctgcggcggctccgccccttaccttcatggacgactcagaggtggagtcgaccgccagcatcttggcctctgtgaaggaacaagaggcccagtttgagaagctgacccgggcgctggaggaggaacggcgccacgtctcggcgcagctggaacgcgtccgggtctcaccacaagatgccaacccactcatggccaacggcacactcacccgccggcatcagaacggccggtttgtgggcgatgctgaccttgaaagacagaaattttcagatttgaaactcaacggaccccaggatcacagtcaccttctatatagcaccatccccaggatgcaggagccggggcagattgtggagacctacacggaggaggatcctgagggagccatgtctgtagtctctgtggagacctcagatgatgggaccactcggcgcacagagaccacggtcaagaaagtagtgaagactgtgacaacacggacagtacagccagtcgctatgggaccagacgggttgcctgtggatgcttcatcagtttctaacaactatatccagactttgggtcgtgatttccgcaagaatggcaatgggggacctggtccctatgtggggcaagctggcactgctacccttcctaggaacttccactaccctcctgatggttatagtcgccactatgaagatggttatccaggtggcagtgataactatggcagtctgtcccgggtgacccgcattgaggagcggtataggcccagcatggaaggctaccgggcacctagtagacaggatgtgtatgggccccaaccccaggttcgggtaggtgggagcagcgtggatctgcatcgctttcatccagagccttatgggctagaggatgaccagcgtagtatgggctatgatgacctggattatggtatgatgtctgattatggcactgcccgtcggactgggacaccctctgaccctcgtcggcgcctcaggagctatgaagacatgattggtgaggaggtgccatcggatcaatactactgggctcctttggcccagcatgagcgaggaagtttagcaagcttggatagcctgcgcaaaggagggcctccacctcctaattggagacagccagagctgccagaggtgatcgccatgcttggattccgcttggatgctgtcaagtccaatgcagctgcatacctgcaacacttatgctaccgcaatgacaaggtgaagactgacgtgcggaagctcaagggcatcccagtactggtgggattgttagaccatcccaaaaaggaagtgcaccttggagcctgtggagctctcaagaatatctcttttggacgtgaccaggataacaagattgccataaaaaactgtgatggtgtgcctgcccttgtgcgattgcttcgaaaggctcgtgatatggaccttactgaagttattaccggaaccctgtggaatctttcatcccatgactcaatcaaaatggagattgtggaccatgcactgcatgccttgacagatgaagtgatcattcctcattctggttgggagcgggaacctaatgaagactgtaagccacgccacattgagtgggaatcggtgctcaccaacacagctggctgccttaggaatgtaagctcagagaggagtgaagctcgccggaaacttcgggaatgtgatggtttagttgatgccctcattttcattgttcaggctgagattgggcagaaggattcagacagcaagcttgtagagaactgtgtttgccttcttcggaacttatcatatcaagttcaccgggagatcccacaggcagagcgttaccaagaggcagctcccaatgttgccaacaatactgggccacatgctgccagttgctttggggccaagaagggcaaagggaaaaaacctatagaggatccagcaaacgatacagtggatttccctaaaagaacgagtccagctcgaggctatgagctcttatttcagccagaggtggttcggatatacatctcacttcttaaggagagcaagactcctgccatcctagaagcctcagctggagctatccagaacttgtgtgctgggcgctggacgtatggtcgatacatccgctctgctctgcgtcaagagaaggctctttctgccatagctgacctcctgactaatgaacatgaacgggtggtgaaagctgcatctggagcactgagaaacctggctgtggatgctcgcaacaaagaattaattggtaaacatgctattcctaacttggtaaagaatctgccaggaggacagcagaactcctcttggaatttctctgaggacactgtcatctctattttgaacactatcaacgaggttatcgctgagaacttggaggctgccaaaaagcttcgagagacacagggtattgagaagctggtgttgatcaacaaatcagggaaccgctcagaaaaagaagttcgagcagcagcacttgtattacagacaatctggggatataaggaactgcggaagccactggaaaaagaaggatggaagaaatcagactttcaggtgaatctaaacaatgcttcccgaagccagagcagtcattcatatgatgatagtactctccctctcattgaccggaaccaaaaatcagataagaaacctgatcgggaagaaattcagatgagcaatatgggatcaaacacaaaatcactagataacaactattccacaccaaatgagagaggagaccacaatagaacactggatcgatcgggggatctaggcgacatggagccattgaagggaacaacacccttgatgcagaagatttagcaccactatctccgttccatctgggcttatatgtacttttattttttggtggtgaaattgactgatgattttcctttttcttcgctggactattgtgccaactgccaggctgcctcctgcccttacagccctaagtggctgccttctttccatcaactcccaacttcttcctgtgaagtttaattgtctcaacgcctccccctcccccattccctccatttttctcccaagaaacctgactcaattatttgcatattttgagaaactgctgcagattagttctttttgccagttttccctggaactcctggccttttgtggaggggagggatggagagaataggaatcttcactagaagccgtgggaagaattggaagttacatgctgtatatgcaatgtccagcagtctgataaactgacgattcttaatcaagatttttttcctgatggggaagggacttttattttcttttagagaggggaaagtgtgagctcttcccttattcctaatggctatttttgaagcaaagaaggccagcaacattggcacatgccacctggcaaaggacccttgagtaagtgaaggtctcctaaaactgggattaagaaaccttgctctcctcatctccaaggcagggaccatcaagaacctacagactccatctcttctgcaagcctcatgccaaccctgggctattgctgctgccccttaaacacaggctgtccttaacccacctctcctgccctgtgatatgtctgctgagttggcctggccatttccaagaggctgtagaaaggggagaatgtcaaggaagacttttggtagagaaggagcagaaagatgtgtttttgggaagaagaagacctctaggaggagctagtaggaatgtacatgaagcaattagtctgaaactggcttccccactcccccgtttctccttttcctatccttataggcctgtcccttgcctctgccctggattggttggcaaactaaaggacttgatgtacataactcctgtcccttttcccttacaaggtggggattgcccctggctttgcctcttctttgtgcctttggcctggggtgcatctcctcccgcccttccatgtgcctttctttgcctctgcagtctcatttctcataattttgcaaattatattttgttgctttcttacctactattggccctaaatagcagaaagaagagaagtgaccgagagaacctcagattcttcattgaggattggtatagccatgatttcagtcatagcaagcttttgctcaacagcatatgggtgggattttgcaaaaatcctattctgatgaatctcaaagtaaggctggtaagagaagtgagtggtgtgactcttactccttaggtgcccagaatttaccatcatctctgaaggagttacagggaagtggtctccccaattctcccctccctccagtattgccccctctcactttagcatatattaattagcaggttgggctagagaaatcagctgctatgcgggttgattattattattatttctaatccttttccttatttgccttctactccccttaatctaatctaaaagctctgttccatgcaactggagttccttatccctctcttccccttcccttatatattgaggctatggggtaggagaaaagtgcacaacccaccaccccctttactcgtgcattaaaatttcttatttacccttttcccccttcccatttcttcccactttcatctaccttttctggcaaaaaggagccttttgctctctgtgaccctaagagcacactgcacagggaaaattgccccatccagacctggctccactcttgatctctcttgtcctcttctgctcttttcctggtgctcttttttctcggtggggtgtgggtaatagaacagccgtgggcttttggggacctttaacttttttttctctcttttgtttataaaaaacactaaacattcaattccagagaaccaaaaatcccaccttcccaccgaacactactaaggggcttgtgttctgctccataccttttctcttttctttctgtcttgttaatgcttttaaaaacaaatgagttttttatataaataaagtttttaaagtgtgtatgtggggggtctgtgtcatttcttcacttcaagctgttatttcttccctgctttgcatctttgttacttccttatgtatcagtgtcctttccagagcaaccagaaggaggttataccaggatttattttgagctcagccccaactctttatcaagcaacattcttgttaactatatgtgaaacattttttcttctgaagattcttaaaaattgaatgtggctgaagttgaacatgggagcttattgctaatttagagataggaaactgaagcataaagaattaatgacttactttaattactggaattcttctgcaacatttgacaaaactaaccttgaataaggcccactgtaatacgtagctctcttaaatataacacttaggactagaagattagaaactaccaatcccaactacgtaataggaaaatgtaggatcaaaaggcccatgtatataagtactgaccactgggccataatgttgcttctcaggctatatgcagtcctttagtcagaagtcaataggcctatttattaatattttacagaccatattacctggattaccagggactatctttgctgcagagatcaagggttaagatctatgggaagatacttatttttctgaggtccttatgtcctgtcatataattaaagactcaagagaatttatgtgaaatgctttctgtatgcccaaatctttagattaaaattatatagctgctcct

SEQ ID NO: 114920 - DNA, 6232 bp, Homo sapiens
  Payload ID: 2444
  Gene Symbol: CTNND1
  Gene Name: catenin (cadherin-associated protein), delta 1
  Uniprot ID: O60716
  ENST ID: ENST00000361391
  CDS Start-End: 537-3362
ctgccagatcagtttgtcaccacccaggctcccttgcctttggctgggtgcaacttccattttaggtgttggatctgagggggaaaaaaaagagagagggagagagagagaaagaagagcaggaaagatcccgaaaggaggaagaggtggcgaaaaatcaactgccctgctggatttgtctttctcagcaccttggcgaagccttgggtttctttcttaaaggactgatttttagaactccacatttgaggtgtgtggcttttgaagaaaatgtatgtactgacgggaaaaggaggataagcaagtcgaatttttgtcttacgctctctccttcctgcttcctccttgctgtggtggctgggatgcttcttccatgattttttgaatctagactgggctgttctctgtgttaaaccaatcagttgcgaccttctcttaacagtgtgaagtgagggggtctctctccctccttctccttcctctgtgattcaccttcctttttaccctgccctgcggcggctccgccccttaccttcatggacgactcagaggtggagtcgaccgccagcatcttggcctctgtgaaggaacaagaggcccagtttgagaagctgacccgggcgctggaggaggaacggcgccacgtctcggcgcagctggaacgcgtccgggtctcaccacaagatgccaacccactcatggccaacggcacactcacccgccggcatcagaacggccggtttgtgggcgatgctgaccttgaaagacagaaattttcagatttgaaactcaacggaccccaggatcacagtcaccttctatatagcaccatccccaggatgcaggagccggggcagattgtggagacctacacggaggaggatcctgagggagccatgtctgtagtctctgtggagacctcagatgatgggaccactcggcgcacagagaccacggtcaagaaagtagtgaagactgtgacaacacggacagtacagccagtcgctatgggaccagacgggttgcctgtggatgcttcatcagtttctaacaactatatccagactttgggtcgtgatttccgcaagaatggcaatgggggacctggtccctatgtggggcaagctggcactgctacccttcctaggaacttccactaccctcctgatggttatagtcgccactatgaagatggttatccaggtggcagtgataactatggcagtctgtcccgggtgacccgcattgaggagcggtataggcccagcatggaaggctaccgggcacctagtagacaggatgtgtatgggccccaaccccaggttcgggtaggtgggagcagcgtggatctgcatcgctttcatccagagccttatgggctagaggatgaccagcgtagtatgggctatgatgacctggattatggtatgatgtctgattatggcactgcccgtcggactgggacaccctctgaccctcgtcggcgcctcaggagctatgaagacatgattggtgaggaggtgccatcggatcaatactactgggctcctttggcccagcatgagcgaggaagtttagcaagcttggatagcctgcgcaaaggagggcctccacctcctaattggagacagccagagctgccagaggtgatcgccatgcttggattccgcttggatgctgtcaagtccaatgcagctgcatacctgcaacacttatgctaccgcaatgacaaggtgaagactgacgtgcggaagctcaagggcatcccagtactggtgggattgttagaccatcccaaaaaggaagtgcaccttggagcctgtggagctctcaagaatatctcttttggacgtgaccaggataacaagattgccataaaaaactgtgatggtgtgcctgcccttgtgcgattgcttcgaaaggctcgtgatatggaccttactgaagttattaccggaaccctgtggaatctttcatcccatgactcaatcaaaatggagattgtggaccatgcactgcatgccttgacagatgaagtgatcattcctcattctggttgggagcgggaacctaatgaagactgtaagccacgccacattgagtgggaatcggtgctcaccaacacagctggctgccttaggaatgtaagctcagagaggagtgaagctcgccggaaacttcgggaatgtgatggtttagttgatgccctcattttcattgttcaggctgagattgggcagaaggattcagacagcaagcttgtagagaactgtgtttgccttcttcggaacttatcatatcaagttcaccgggagatcccacaggcagagcgttaccaagaggcagctcccaatgttgccaacaatactgggccacatgctgccagttgctttggggccaagaagggcaaagggaaaaaacctatagaggatccagcaaacgatacagtggatttccctaaaagaacgagtccagctcgaggctatgagctcttatttcagccagaggtggttcggatatacatctcacttcttaaggagagcaagactcctgccatcctagaagcctcagctggagctatccagaacttgtgtgctgggcgctggacgtatggtcgatacatccgctctgctctgcgtcaagagaaggctctttctgccatagctgacctcctgactaatgaacatgaacgggtggtgaaagctgcatctggagcactgagaaacctggctgtggatgctcgcaacaaagaattaattggtaaacatgctattcctaacttggtaaagaatctgccaggaggacagcagaactcctcttggaatttctctgaggacactgtcatctctattttgaacactatcaacgaggttatcgctgagaacttggaggctgccaaaaagcttcgagagacacagggtattgagaagctggtgttgatcaacaaatcagggaaccgctcagaaaaagaagttcgagcagcagcacttgtattacagacaatctggggatataaggaactgcggaagccactggaaaaagaaggatggaagaaatcagactttcaggtgaatctaaacaatgcttcccgaagccagagcagtcattcatatgatgatagtactctccctctcattgaccggaaccaaaaatcagataacaactattccacaccaaatgagagaggagaccacaatagaacactggatcgatcgggggatctaggcgacatggagccattgaagggaacaacacccttgatgcaggacgaggggcaggaatctctggaggaagagttggatgtgttggttttggatgatgaggggggccaagtgtcttacccctccatgcagaagatttagcaccactatctccgttccatctgggcttatatgtacttttattttttggtggtgaaattgactgatgattttcctttttcttcgctggactattgtgccaactgccaggctgcctcctgcccttacagccctaagtggctgccttctttccatcaactcccaacttcttcctgtgaagtttaattgtctcaacgcctccccctcccccattccctccatttttctcccaagaaacctgactcaattatttgcatattttgagaaactgctgcagattagttctttttgccagttttccctggaactcctggccttttgtggaggggagggatggagagaataggaatcttcactagaagccgtgggaagaattggaagttacatgctgtatatgcaatgtccagcagtctgataaactgacgattcttaatcaagatttttttcctgatggggaagggacttttattttcttttagagaggggaaagtgtgagctcttcccttattcctaatggctatttttgaagcaaagaaggccagcaacattggcacatgccacctggcaaaggacccttgagtaagtgaaggtctcctaaaactgggattaagaaaccttgctctcctcatctccaaggcagggaccatcaagaacctacagactccatctcttctgcaagcctcatgccaaccctgggctattgctgctgccccttaaacacaggctgtccttaacccacctctcctgccctgtgatatgtctgctgagttggcctggccatttccaagaggctgtagaaaggggagaatgtcaaggaagacttttggtagagaaggagcagaaagatgtgtttttgggaagaagaagacctctaggaggagctagtaggaatgtacatgaagcaattagtctgaaactggcttccccactcccccgtttctccttttcctatccttataggcctgtcccttgcctctgccctggattggttggcaaactaaaggacttgatgtacataactcctgtcccttttcccttacaaggtggggattgcccctggctttgcctcttctttgtgcctttggcctggggtgcatctcctcccgcccttccatgtgcctttctttgcctctgcagtctcatttctcataattttgcaaattatattttgttgctttcttacctactattggccctaaatagcagaaagaagagaagtgaccgagagaacctcagattcttcattgaggattggtatagccatgatttcagtcatagcaagcttttgctcaacagcatatgggtgggattttgcaaaaatcctattctgatgaatctcaaagtaaggctggtaagagaagtgagtggtgtgactcttactccttaggtgcccagaatttaccatcatctctgaaggagttacagggaagtggtctccccaattctcccctccctccagtattgccccctctcactttagcatatattaattagcaggttgggctagagaaatcagctgctatgcgggttgattattattattatttctaatccttttccttatttgccttctactccccttaatctaatctaaaagctctgttccatgcaactggagttccttatccctctcttccccttcccttatatattgaggctatggggtaggagaaaagtgcacaacccaccaccccctttactcgtgcattaaaatttcttatttacccttttcccccttcccatttcttcccactttcatctaccttttctggcaaaaaggagccttttgctctctgtgaccctaagagcacactgcacagggaaaattgccccatccagacctggctccactcttgatctctcttgtcctcttctgctcttttcctggtgctcttttttctcggtggggtgtgggtaatagaacagccgtgggcttttggggacctttaacttttttttctctcttttgtttataaaaaacactaaacattcaattccagagaaccaaaaatcccaccttcccaccgaacactactaaggggcttgtgttctgctccataccttttctcttttctttctgtcttgttaatgcttttaaaaacaaatgagttttttatataaataaagtttttaaagtgtgtatgtggggggtctgtgtcatttcttcacttcaagctgttatttcttccctgctttgcatctttgttacttccttatgtatcagtgtcctttccagagcaaccagaaggaggttataccaggatttattttgagctcagccccaactctttatcaagcaacattcttgttaactatatgtgaaacattttttcttctgaagattcttaaaaattgaatgtggctgaagttgaacatgggagcttattgctaatttagagataggaaactgaagcataaagaattaatgacttactttaattactggaattcttctgcaacatttgacaaaactaaccttgaataaggcccactgtaatacgtagctctcttaaatataacacttaggactagaagattagaaactaccaatcccaactacgtaataggaaaatgtaggatcaaaaggcccatgtatataagtactgaccactgggccataatgttgcttctcaggctatatgcagtcctttagtcagaagtcaataggcctatttattaatattttacagaccatattacctggattaccagggactatctttgctgcagagatcaagggttaagatctatgggaagatacttatttttctgaggtccttatgtcctgtcatataattaaagactcaagagaatttatgtgaaatgctttctgtatgcccaaatctttagattaaaattatatagctgctcct

SEQ ID NO: 114921 - DNA, 6295 bp, Homo sapiens
  Payload ID: 2444
  Gene Symbol: CTNND1
  Gene Name: catenin (cadherin-associated protein), delta 1
  Uniprot ID: O60716
  ENST ID: ENST00000361332
  CDS Start-End: 537-3425
ctgccagatcagtttgtcaccacccaggctcccttgcctttggctgggtgcaacttccattttaggtgttggatctgagggggaaaaaaaagagagagggagagagagagaaagaagagcaggaaagatcccgaaaggaggaagaggtggcgaaaaatcaactgccctgctggatttgtctttctcagcaccttggcgaagccttgggtttctttcttaaaggactgatttttagaactccacatttgaggtgtgtggcttttgaagaaaatgtatgtactgacgggaaaaggaggataagcaagtcgaatttttgtcttacgctctctccttcctgcttcctccttgctgtggtggctgggatgcttcttccatgattttttgaatctagactgggctgttctctgtgttaaaccaatcagttgcgaccttctcttaacagtgtgaagtgagggggtctctctccctccttctccttcctctgtgattcaccttcctttttaccctgccctgcggcggctccgccccttaccttcatggacgactcagaggtggagtcgaccgccagcatcttggcctctgtgaaggaacaagaggcccagtttgagaagctgacccgggcgctggaggaggaacggcgccacgtctcggcgcagctggaacgcgtccgggtctcaccacaagatgccaacccactcatggccaacggcacactcacccgccggcatcagaacggccggtttgtgggcgatgctgaccttgaaagacagaaattttcagatttgaaactcaacggaccccaggatcacagtcaccttctatatagcaccatccccaggatgcaggagccggggcagattgtggagacctacacggaggaggatcctgagggagccatgtctgtagtctctgtggagacctcagatgatgggaccactcggcgcacagagaccacggtcaagaaagtagtgaagactgtgacaacacggacagtacagccagtcgctatgggaccagacgggttgcctgtggatgcttcatcagtttctaacaactatatccagactttgggtcgtgatttccgcaagaatggcaatgggggacctggtccctatgtggggcaagctggcactgctacccttcctaggaacttccactaccctcctgatggttatagtcgccactatgaagatggttatccaggtggcagtgataactatggcagtctgtcccgggtgacccgcattgaggagcggtataggcccagcatggaaggctaccgggcacctagtagacaggatgtgtatgggccccaaccccaggttcgggtaggtgggagcagcgtggatctgcatcgctttcatccagagccttatgggctagaggatgaccagcgtagtatgggctatgatgacctggattatggtatgatgtctgattatggcactgcccgtcggactgggacaccctctgaccctcgtcggcgcctcaggagctatgaagacatgattggtgaggaggtgccatcggatcaatactactgggctcctttggcccagcatgagcgaggaagtttagcaagcttggatagcctgcgcaaaggagggcctccacctcctaattggagacagccagagctgccagaggtgatcgccatgcttggattccgcttggatgctgtcaagtccaatgcagctgcatacctgcaacacttatgctaccgcaatgacaaggtgaagactgacgtgcggaagctcaagggcatcccagtactggtgggattgttagaccatcccaaaaaggaagtgcaccttggagcctgtggagctctcaagaatatctcttttggacgtgaccaggataacaagattgccataaaaaactgtgatggtgtgcctgcccttgtgcgattgcttcgaaaggctcgtgatatggaccttactgaagttattaccggaaccctgtggaatctttcatcccatgactcaatcaaaatggagattgtggaccatgcactgcatgccttgacagatgaagtgatcattcctcattctggttgggagcgggaacctaatgaagactgtaagccacgccacattgagtgggaatcggtgctcaccaacacagctggctgccttaggaatgtaagctcagagaggagtgaagctcgccggaaacttcgggaatgtgatggtttagttgatgccctcattttcattgttcaggctgagattgggcagaaggattcagacagcaagcttgtagagaactgtgtttgccttcttcggaacttatcatatcaagttcaccgggagatcccacaggcagagcgttaccaagaggcagctcccaatgttgccaacaatactgggccacatgctgccagttgctttggggccaagaagggcaaagggaaaaaacctatagaggatccagcaaacgatacagtggatttccctaaaagaacgagtccagctcgaggctatgagctcttatttcagccagaggtggttcggatatacatctcacttcttaaggagagcaagactcctgccatcctagaagcctcagctggagctatccagaacttgtgtgctgggcgctggacgtatggtcgatacatccgctctgctctgcgtcaagagaaggctctttctgccatagctgacctcctgactaatgaacatgaacgggtggtgaaagctgcatctggagcactgagaaacctggctgtggatgctcgcaacaaagaattaattggtaaacatgctattcctaacttggtaaagaatctgccaggaggacagcagaactcctcttggaatttctctgaggacactgtcatctctattttgaacactatcaacgaggttatcgctgagaacttggaggctgccaaaaagcttcgagagacacagggtattgagaagctggtgttgatcaacaaatcagggaaccgctcagaaaaagaagttcgagcagcagcacttgtattacagacaatctggggatataaggaactgcggaagccactggaaaaagaaggatggaagaaatcagactttcaggtgaatctaaacaatgcttcccgaagccagagcagtcattcatatgatgatagtactctccctctcattgaccggaaccaaaaatcagataagaaacctgatcgggaagaaattcagatgagcaatatgggatcaaacacaaaatcactagataacaactattccacaccaaatgagagaggagaccacaatagaacactggatcgatcgggggatctaggcgacatggagccattgaagggaacaacacccttgatgcaggacgaggggcaggaatctctggaggaagagttggatgtgttggttttggatgatgaggggggccaagtgtcttacccctccatgcagaagatttagcaccactatctccgttccatctgggcttatatgtacttttattttttggtggtgaaattgactgatgattttcctttttcttcgctggactattgtgccaactgccaggctgcctcctgcccttacagccctaagtggctgccttctttccatcaactcccaacttcttcctgtgaagtttaattgtctcaacgcctccccctcccccattccctccatttttctcccaagaaacctgactcaattatttgcatattttgagaaactgctgcagattagttctttttgccagttttccctggaactcctggccttttgtggaggggagggatggagagaataggaatcttcactagaagccgtgggaagaattggaagttacatgctgtatatgcaatgtccagcagtctgataaactgacgattcttaatcaagatttttttcctgatggggaagggacttttattttcttttagagaggggaaagtgtgagctcttcccttattcctaatggctatttttgaagcaaagaaggccagcaacattggcacatgccacctggcaaaggacccttgagtaagtgaaggtctcctaaaactgggattaagaaaccttgctctcctcatctccaaggcagggaccatcaagaacctacagactccatctcttctgcaagcctcatgccaaccctgggctattgctgctgccccttaaacacaggctgtccttaacccacctctcctgccctgtgatatgtctgctgagttggcctggccatttccaagaggctgtagaaaggggagaatgtcaaggaagacttttggtagagaaggagcagaaagatgtgtttttgggaagaagaagacctctaggaggagctagtaggaatgtacatgaagcaattagtctgaaactggcttccccactcccccgtttctccttttcctatccttataggcctgtcccttgcctctgccctggattggttggcaaactaaaggacttgatgtacataactcctgtcccttttcccttacaaggtggggattgcccctggctttgcctcttctttgtgcctttggcctggggtgcatctcctcccgcccttccatgtgcctttctttgcctctgcagtctcatttctcataattttgcaaattatattttgttgctttcttacctactattggccctaaatagcagaaagaagagaagtgaccgagagaacctcagattcttcattgaggattggtatagccatgatttcagtcatagcaagcttttgctcaacagcatatgggtgggattttgcaaaaatcctattctgatgaatctcaaagtaaggctggtaagagaagtgagtggtgtgactcttactccttaggtgcccagaatttaccatcatctctgaaggagttacagggaagtggtctccccaattctcccctccctccagtattgccccctctcactttagcatatattaattagcaggttgggctagagaaatcagctgctatgcgggttgattattattattatttctaatccttttccttatttgccttctactccccttaatctaatctaaaagctctgttccatgcaactggagttccttatccctctcttccccttcccttatatattgaggctatggggtaggagaaaagtgcacaacccaccaccccctttactcgtgcattaaaatttcttatttacccttttcccccttcccatttcttcccactttcatctaccttttctggcaaaaaggagccttttgctctctgtgaccctaagagcacactgcacagggaaaattgccccatccagacctggctccactcttgatctctcttgtcctcttctgctcttttcctggtgctcttttttctcggtggggtgtgggtaatagaacagccgtgggcttttggggacctttaacttttttttctctcttttgtttataaaaaacactaaacattcaattccagagaaccaaaaatcccaccttcccaccgaacactactaaggggcttgtgttctgctccataccttttctcttttctttctgtcttgttaatgcttttaaaaacaaatgagttttttatataaataaagtttttaaagtgtgtatgtggggggtctgtgtcatttcttcacttcaagctgttatttcttccctgctttgcatctttgttacttccttatgtatcagtgtcctttccagagcaaccagaaggaggttataccaggatttattttgagctcagccccaactctttatcaagcaacattcttgttaactatatgtgaaacattttttcttctgaagattcttaaaaattgaatgtggctgaagttgaacatgggagcttattgctaatttagagataggaaactgaagcataaagaattaatgacttactttaattactggaattcttctgcaacatttgacaaaactaaccttgaataaggcccactgtaatacgtagctctcttaaatataacacttaggactagaagattagaaactaccaatcccaactacgtaataggaaaatgtaggatcaaaaggcccatgtatataagtactgaccactgggccataatgttgcttctcaggctatatgcagtcctttagtcagaagtcaataggcctatttattaatattttacagaccatattacctggattaccagggactatctttgctgcagagatcaagggttaagatctatgggaagatacttatttttctgaggtccttatgtcctgtcatataattaaagactcaagagaatttatgtgaaatgctttctgtatgcccaaatctttagattaaaattatatagctgctcct

SEQ ID NO: 114922 - DNA, 6226 bp, Homo sapiens
  Payload ID: 2444
  Gene Symbol: CTNND1
  Gene Name: catenin (cadherin-associated protein), delta 1
  Uniprot ID: O60716
  ENST ID: ENST00000361796
  CDS Start-End: 537-3356
ctgccagatcagtttgtcaccacccaggctcccttgcctttggctgggtgcaacttccattttaggtgttggatctgagggggaaaaaaaagagagagggagagagagagaaagaagagcaggaaagatcccgaaaggaggaagaggtggcgaaaaatcaactgccctgctggatttgtctttctcagcaccttggcgaagccttgggtttctttcttaaaggactgatttttagaactccacatttgaggtgtgtggcttttgaagaaaatgtatgtactgacgggaaaaggaggataagcaagtcgaatttttgtcttacgctctctccttcctgcttcctccttgctgtggtggctgggatgcttcttccatgattttttgaatctagactgggctgttctctgtgttaaaccaatcagttgcgaccttctcttaacagtgtgaagtgagggggtctctctccctccttctccttcctctgtgattcaccttcctttttaccctgccctgcggcggctccgccccttaccttcatggacgactcagaggtggagtcgaccgccagcatcttggcctctgtgaaggaacaagaggcccagtttgagaagctgacccgggcgctggaggaggaacggcgccacgtctcggcgcagctggaacgcgtccgggtctcaccacaagatgccaacccactcatggccaacggcacactcacccgccggcatcagaacggccggtttgtgggcgatgctgaccttgaaagacagaaattttcagatttgaaactcaacggaccccaggatcacagtcaccttctatatagcaccatccccaggatgcaggagccggggcagattgtggagacctacacggaggaggatcctgagggagccatgtctgtagtctctgtggagacctcagatgatgggaccactcggcgcacagagaccacggtcaagaaagtagtgaagactgtgacaacacggacagtacagccagtcgctatgggaccagacgggttgcctgtggatgcttcatcagtttctaacaactatatccagactttgggtcgtgatttccgcaagaatggcaatgggggacctggtccctatgtggggcaagctggcactgctacccttcctaggaacttccactaccctcctgatggttatagtcgccactatgaagatggttatccaggtggcagtgataactatggcagtctgtcccgggtgacccgcattgaggagcggtataggcccagcatggaaggctaccgggcacctagtagacaggatgtgtatgggccccaaccccaggttcgggtaggtgggagcagcgtggatctgcatcgctttcatccagagccttatgggctagaggatgaccagcgtagtatgggctatgatgacctggattatggtatgatgtctgattatggcactgcccgtcggactgggacaccctctgaccctcgtcggcgcctcaggagctatgaagacatgattggtgaggaggtgccatcggatcaatactactgggctcctttggcccagcatgagcgaggaagtttagcaagcttggatagcctgcgcaaaggagggcctccacctcctaattggagacagccagagctgccagaggtgatcgccatgcttggattccgcttggatgctgtcaagtccaatgcagctgcatacctgcaacacttatgctaccgcaatgacaaggtgaagactgacgtgcggaagctcaagggcatcccagtactggtgggattgttagaccatcccaaaaaggaagtgcaccttggagcctgtggagctctcaagaatatctcttttggacgtgaccaggataacaagattgccataaaaaactgtgatggtgtgcctgcccttgtgcgattgcttcgaaaggctcgtgatatggaccttactgaagttattaccggaaccctgtggaatctttcatcccatgactcaatcaaaatggagattgtggaccatgcactgcatgccttgacagatgaagtgatcattcctcattctggttgggagcgggaacctaatgaagactgtaagccacgccacattgagtgggaatcggtgctcaccaacacagctggctgccttaggaatgtaagctcagagaggagtgaagctcgccggaaacttcgggaatgtgatggtttagttgatgccctcattttcattgttcaggctgagattgggcagaaggattcagacagcaagcttgtagagaactgtgtttgccttcttcggaacttatcatatcaagttcaccgggagatcccacaggcagagcgttaccaagaggcagctcccaatgttgccaacaatactgggccacatgctgccagttgctttggggccaagaagggcaaagatgagtggttctccagagggaaaaaacctatagaggatccagcaaacgatacagtggatttccctaaaagaacgagtccagctcgaggctatgagctcttatttcagccagaggtggttcggatatacatctcacttcttaaggagagcaagactcctgccatcctagaagcctcagctggagctatccagaacttgtgtgctgggcgctggacgtatggtcgatacatccgctctgctctgcgtcaagagaaggctctttctgccatagctgacctcctgactaatgaacatgaacgggtggtgaaagctgcatctggagcactgagaaacctggctgtggatgctcgcaacaaagaattaattggtaaacatgctattcctaacttggtaaagaatctgccaggaggacagcagaactcctcttggaatttctctgaggacactgtcatctctattttgaacactatcaacgaggttatcgctgagaacttggaggctgccaaaaagcttcgagagacacagggtattgagaagctggtgttgatcaacaaatcagggaaccgctcagaaaaagaagttcgagcagcagcacttgtattacagacaatctggggatataaggaactgcggaagccactggaaaaagaaggatggaagaaatcagactttcaggtgaatctaaacaatgcttcccgaagccagagcagtcattcatatgatgatagtactctccctctcattgaccggaaccaaaaatcagataagaaacctgatcgggaagaaattcagatgagcaatatgggatcaaacacaaaatcactagataacaactattccacaccaaatgagagaggagaccacaatagaacactggatcgatcgggggatctaggcgacatggagccattgaagggaacaacacccttgatgcagaagatttagcaccactatctccgttccatctgggcttatatgtacttttattttttggtggtgaaattgactgatgattttcctttttcttcgctggactattgtgccaactgccaggctgcctcctgcccttacagccctaagtggctgccttctttccatcaactcccaacttcttcctgtgaagtttaattgtctcaacgcctccccctcccccattccctccatttttctcccaagaaacctgactcaattatttgcatattttgagaaactgctgcagattagttctttttgccagttttccctggaactcctggccttttgtggaggggagggatggagagaataggaatcttcactagaagccgtgggaagaattggaagttacatgctgtatatgcaatgtccagcagtctgataaactgacgattcttaatcaagatttttttcctgatggggaagggacttttattttcttttagagaggggaaagtgtgagctcttcccttattcctaatggctatttttgaagcaaagaaggccagcaacattggcacatgccacctggcaaaggacccttgagtaagtgaaggtctcctaaaactgggattaagaaaccttgctctcctcatctccaaggcagggaccatcaagaacctacagactccatctcttctgcaagcctcatgccaaccctgggctattgctgctgccccttaaacacaggctgtccttaacccacctctcctgccctgtgatatgtctgctgagttggcctggccatttccaagaggctgtagaaaggggagaatgtcaaggaagacttttggtagagaaggagcagaaagatgtgtttttgggaagaagaagacctctaggaggagctagtaggaatgtacatgaagcaattagtctgaaactggcttccccactcccccgtttctccttttcctatccttataggcctgtcccttgcctctgccctggattggttggcaaactaaaggacttgatgtacataactcctgtcccttttcccttacaaggtggggattgcccctggctttgcctcttctttgtgcctttggcctggggtgcatctcctcccgcccttccatgtgcctttctttgcctctgcagtctcatttctcataattttgcaaattatattttgttgctttcttacctactattggccctaaatagcagaaagaagagaagtgaccgagagaacctcagattcttcattgaggattggtatagccatgatttcagtcatagcaagcttttgctcaacagcatatgggtgggattttgcaaaaatcctattctgatgaatctcaaagtaaggctggtaagagaagtgagtggtgtgactcttactccttaggtgcccagaatttaccatcatctctgaaggagttacagggaagtggtctccccaattctcccctccctccagtattgccccctctcactttagcatatattaattagcaggttgggctagagaaatcagctgctatgcgggttgattattattattatttctaatccttttccttatttgccttctactccccttaatctaatctaaaagctctgttccatgcaactggagttccttatccctctcttccccttcccttatatattgaggctatggggtaggagaaaagtgcacaacccaccaccccctttactcgtgcattaaaatttcttatttacccttttcccccttcccatttcttcccactttcatctaccttttctggcaaaaaggagccttttgctctctgtgaccctaagagcacactgcacagggaaaattgccccatccagacctggctccactcttgatctctcttgtcctcttctgctcttttcctggtgctcttttttctcggtggggtgtgggtaatagaacagccgtgggcttttggggacctttaacttttttttctctcttttgtttataaaaaacactaaacattcaattccagagaaccaaaaatcccaccttcccaccgaacactactaaggggcttgtgttctgctccataccttttctcttttctttctgtcttgttaatgcttttaaaaacaaatgagttttttatataaataaagtttttaaagtgtgtatgtggggggtctgtgtcatttcttcacttcaagctgttatttcttccctgctttgcatctttgttacttccttatgtatcagtgtcctttccagagcaaccagaaggaggttataccaggatttattttgagctcagccccaactctttatcaagcaacattcttgttaactatatgtgaaacattttttcttctgaagattcttaaaaattgaatgtggctgaagttgaacatgggagcttattgctaatttagagataggaaactgaagcataaagaattaatgacttactttaattactggaattcttctgcaacatttgacaaaactaaccttgaataaggcccactgtaatacgtagctctcttaaatataacacttaggactagaagattagaaactaccaatcccaactacgtaataggaaaatgtaggatcaaaaggcccatgtatataagtactgaccactgggccataatgttgcttctcaggctatatgcagtcctttagtcagaagtcaataggcctatttattaatattttacagaccatattacctggattaccagggactatctttgctgcagagatcaagggttaagatctatgggaagatacttatttttctgaggtccttatgtcctgtcatataattaaagactcaagagaatttatgtgaaatgctttctgtatgcccaaatctttagattaaaattatatagctgctcct

SEQ ID NO: 114923 - DNA, 6313 bp, Homo sapiens
  Payload ID: 2444
  Gene Symbol: CTNND1
  Gene Name: catenin (cadherin-associated protein), delta 1
  Uniprot ID: O60716
  ENST ID: ENST00000399050
  CDS Start-End: 537-3443
ctgccagatcagtttgtcaccacccaggctcccttgcctttggctgggtgcaacttccattttaggtgttggatctgagggggaaaaaaaagagagagggagagagagagaaagaagagcaggaaagatcccgaaaggaggaagaggtggcgaaaaatcaactgccctgctggatttgtctttctcagcaccttggcgaagccttgggtttctttcttaaaggactgatttttagaactccacatttgaggtgtgtggcttttgaagaaaatgtatgtactgacgggaaaaggaggataagcaagtcgaatttttgtcttacgctctctccttcctgcttcctccttgctgtggtggctgggatgcttcttccatgattttttgaatctagactgggctgttctctgtgttaaaccaatcagttgcgaccttctcttaacagtgtgaagtgagggggtctctctccctccttctccttcctctgtgattcaccttcctttttaccctgccctgcggcggctccgccccttaccttcatggacgactcagaggtggagtcgaccgccagcatcttggcctctgtgaaggaacaagaggcccagtttgagaagctgacccgggcgctggaggaggaacggcgccacgtctcggcgcagctggaacgcgtccgggtctcaccacaagatgccaacccactcatggccaacggcacactcacccgccggcatcagaacggccggtttgtgggcgatgctgaccttgaaagacagaaattttcagatttgaaactcaacggaccccaggatcacagtcaccttctatatagcaccatccccaggatgcaggagccggggcagattgtggagacctacacggaggaggatcctgagggagccatgtctgtagtctctgtggagacctcagatgatgggaccactcggcgcacagagaccacggtcaagaaagtagtgaagactgtgacaacacggacagtacagccagtcgctatgggaccagacgggttgcctgtggatgcttcatcagtttctaacaactatatccagactttgggtcgtgatttccgcaagaatggcaatgggggacctggtccctatgtggggcaagctggcactgctacccttcctaggaacttccactaccctcctgatggttatagtcgccactatgaagatggttatccaggtggcagtgataactatggcagtctgtcccgggtgacccgcattgaggagcggtataggcccagcatggaaggctaccgggcacctagtagacaggatgtgtatgggccccaaccccaggttcgggtaggtgggagcagcgtggatctgcatcgctttcatccagagccttatgggctagaggatgaccagcgtagtatgggctatgatgacctggattatggtatgatgtctgattatggcactgcccgtcggactgggacaccctctgaccctcgtcggcgcctcaggagctatgaagacatgattggtgaggaggtgccatcggatcaatactactgggctcctttggcccagcatgagcgaggaagtttagcaagcttggatagcctgcgcaaaggagggcctccacctcctaattggagacagccagagctgccagaggtgatcgccatgcttggattccgcttggatgctgtcaagtccaatgcagctgcatacctgcaacacttatgctaccgcaatgacaaggtgaagactgacgtgcggaagctcaagggcatcccagtactggtgggattgttagaccatcccaaaaaggaagtgcaccttggagcctgtggagctctcaagaatatctcttttggacgtgaccaggataacaagattgccataaaaaactgtgatggtgtgcctgcccttgtgcgattgcttcgaaaggctcgtgatatggaccttactgaagttattaccggaaccctgtggaatctttcatcccatgactcaatcaaaatggagattgtggaccatgcactgcatgccttgacagatgaagtgatcattcctcattctggttgggagcgggaacctaatgaagactgtaagccacgccacattgagtgggaatcggtgctcaccaacacagctggctgccttaggaatgtaagctcagagaggagtgaagctcgccggaaacttcgggaatgtgatggtttagttgatgccctcattttcattgttcaggctgagattgggcagaaggattcagacagcaagcttgtagagaactgtgtttgccttcttcggaacttatcatatcaagttcaccgggagatcccacaggcagagcgttaccaagaggcagctcccaatgttgccaacaatactgggccacatgctgccagttgctttggggccaagaagggcaaagatgagtggttctccagagggaaaaaacctatagaggatccagcaaacgatacagtggatttccctaaaagaacgagtccagctcgaggctatgagctcttatttcagccagaggtggttcggatatacatctcacttcttaaggagagcaagactcctgccatcctagaagcctcagctggagctatccagaacttgtgtgctgggcgctggacgtatggtcgatacatccgctctgctctgcgtcaagagaaggctctttctgccatagctgacctcctgactaatgaacatgaacgggtggtgaaagctgcatctggagcactgagaaacctggctgtggatgctcgcaacaaagaattaattggtaaacatgctattcctaacttggtaaagaatctgccaggaggacagcagaactcctcttggaatttctctgaggacactgtcatctctattttgaacactatcaacgaggttatcgctgagaacttggaggctgccaaaaagcttcgagagacacagggtattgagaagctggtgttgatcaacaaatcagggaaccgctcagaaaaagaagttcgagcagcagcacttgtattacagacaatctggggatataaggaactgcggaagccactggaaaaagaaggatggaagaaatcagactttcaggtgaatctaaacaatgcttcccgaagccagagcagtcattcatatgatgatagtactctccctctcattgaccggaaccaaaaatcagataagaaacctgatcgggaagaaattcagatgagcaatatgggatcaaacacaaaatcactagataacaactattccacaccaaatgagagaggagaccacaatagaacactggatcgatcgggggatctaggcgacatggagccattgaagggaacaacacccttgatgcaggacgaggggcaggaatctctggaggaagagttggatgtgttggttttggatgatgaggggggccaagtgtcttacccctccatgcagaagatttagcaccactatctccgttccatctgggcttatatgtacttttattttttggtggtgaaattgactgatgattttcctttttcttcgctggactattgtgccaactgccaggctgcctcctgcccttacagccctaagtggctgccttctttccatcaactcccaacttcttcctgtgaagtttaattgtctcaacgcctccccctcccccattccctccatttttctcccaagaaacctgactcaattatttgcatattttgagaaactgctgcagattagttctttttgccagttttccctggaactcctggccttttgtggaggggagggatggagagaataggaatcttcactagaagccgtgggaagaattggaagttacatgctgtatatgcaatgtccagcagtctgataaactgacgattcttaatcaagatttttttcctgatggggaagggacttttattttcttttagagaggggaaagtgtgagctcttcccttattcctaatggctatttttgaagcaaagaaggccagcaacattggcacatgccacctggcaaaggacccttgagtaagtgaaggtctcctaaaactgggattaagaaaccttgctctcctcatctccaaggcagggaccatcaagaacctacagactccatctcttctgcaagcctcatgccaaccctgggctattgctgctgccccttaaacacaggctgtccttaacccacctctcctgccctgtgatatgtctgctgagttggcctggccatttccaagaggctgtagaaaggggagaatgtcaaggaagacttttggtagagaaggagcagaaagatgtgtttttgggaagaagaagacctctaggaggagctagtaggaatgtacatgaagcaattagtctgaaactggcttccccactcccccgtttctccttttcctatccttataggcctgtcccttgcctctgccctggattggttggcaaactaaaggacttgatgtacataactcctgtcccttttcccttacaaggtggggattgcccctggctttgcctcttctttgtgcctttggcctggggtgcatctcctcccgcccttccatgtgcctttctttgcctctgcagtctcatttctcataattttgcaaattatattttgttgctttcttacctactattggccctaaatagcagaaagaagagaagtgaccgagagaacctcagattcttcattgaggattggtatagccatgatttcagtcatagcaagcttttgctcaacagcatatgggtgggattttgcaaaaatcctattctgatgaatctcaaagtaaggctggtaagagaagtgagtggtgtgactcttactccttaggtgcccagaatttaccatcatctctgaaggagttacagggaagtggtctccccaattctcccctccctccagtattgccccctctcactttagcatatattaattagcaggttgggctagagaaatcagctgctatgcgggttgattattattattatttctaatccttttccttatttgccttctactccccttaatctaatctaaaagctctgttccatgcaactggagttccttatccctctcttccccttcccttatatattgaggctatggggtaggagaaaagtgcacaacccaccaccccctttactcgtgcattaaaatttcttatttacccttttcccccttcccatttcttcccactttcatctaccttttctggcaaaaaggagccttttgctctctgtgaccctaagagcacactgcacagggaaaattgccccatccagacctggctccactcttgatctctcttgtcctcttctgctcttttcctggtgctcttttttctcggtggggtgtgggtaatagaacagccgtgggcttttggggacctttaacttttttttctctcttttgtttataaaaaacactaaacattcaattccagagaaccaaaaatcccaccttcccaccgaacactactaaggggcttgtgttctgctccataccttttctcttttctttctgtcttgttaatgcttttaaaaacaaatgagttttttatataaataaagtttttaaagtgtgtatgtggggggtctgtgtcatttcttcacttcaagctgttatttcttccctgctttgcatctttgttacttccttatgtatcagtgtcctttccagagcaaccagaaggaggttataccaggatttattttgagctcagccccaactctttatcaagcaacattcttgttaactatatgtgaaacattttttcttctgaagattcttaaaaattgaatgtggctgaagttgaacatgggagcttattgctaatttagagataggaaactgaagcataaagaattaatgacttactttaattactggaattcttctgcaacatttgacaaaactaaccttgaataaggcccactgtaatacgtagctctcttaaatataacacttaggactagaagattagaaactaccaatcccaactacgtaataggaaaatgtaggatcaaaaggcccatgtatataagtactgaccactgggccataatgttgcttctcaggctatatgcagtcctttagtcagaagtcaataggcctatttattaatattttacagaccatattacctggattaccagggactatctttgctgcagagatcaagggttaagatctatgggaagatacttatttttctgaggtccttatgtcctgtcatataattaaagactcaagagaatttatgtgaaatgctttctgtatgcccaaatctttagattaaaattatatagctgctcct

SEQ ID NO: 114924 - DNA, 5832 bp, Homo sapiens
  Payload ID: 2444
  Gene Symbol: CTNND1
  Gene Name: catenin (cadherin-associated protein), delta 1
  Uniprot ID: O60716
  ENST ID: ENST00000415361
  CDS Start-End: 359-2962
ctgccagatcagtttgtcaccacccaggctcccttgcctttggctgggtgcaacttccattttaggtgttggatctgagggggaaaaaaaagagagagggagagagagagaaagaagagcaggaaagatcccgaaaggaggaagaggtggcgaaaaatcaactgccctgctggatttgtctttctcagcaccttggcgaagccttgggtttctttcttaaaggactgatttttagaactccacatttgagaacggccggtttgtgggcgatgctgaccttgaaagacagaaattttcagatttgaaactcaacggaccccaggatcacagtcaccttctatatagcaccatccccaggatgcaggagccggggcagattgtggagacctacacggaggaggatcctgagggagccatgtctgtagtctctgtggagacctcagatgatgggaccactcggcgcacagagaccacggtcaagaaagtagtgaagactgtgacaacacggacagtacagccagtcgctatgggaccagacgggttgcctgtggatgcttcatcagtttctaacaactatatccagactttgggtcgtgatttccgcaagaatggcaatgggggacctggtccctatgtggggcaagctggcactgctacccttcctaggaacttccactaccctcctgatggttatagtcgccactatgaagatggttatccaggtggcagtgataactatggcagtctgtcccgggtgacccgcattgaggagcggtataggcccagcatggaaggctaccgggcacctagtagacaggatgtgtatgggccccaaccccaggttcgggtaggtgggagcagcgtggatctgcatcgctttcatccagagccttatgggctagaggatgaccagcgtagtatgggctatgatgacctggattatggtatgatgtctgattatggcactgcccgtcggactgggacaccctctgaccctcgtcggcgcctcaggagctatgaagacatgattggtgaggaggtgccatcggatcaatactactgggctcctttggcccagcatgagcgaggaagtttagcaagcttggatagcctgcgcaaaggagggcctccacctcctaattggagacagccagagctgccagaggtgatcgccatgcttggattccgcttggatgctgtcaagtccaatgcagctgcatacctgcaacacttatgctaccgcaatgacaaggtgaagactgacgtgcggaagctcaagggcatcccagtactggtgggattgttagaccatcccaaaaaggaagtgcaccttggagcctgtggagctctcaagaatatctcttttggacgtgaccaggataacaagattgccataaaaaactgtgatggtgtgcctgcccttgtgcgattgcttcgaaaggctcgtgatatggaccttactgaagttattaccggaaccctgtggaatctttcatcccatgactcaatcaaaatggagattgtggaccatgcactgcatgccttgacagatgaagtgatcattcctcattctggttgggagcgggaacctaatgaagactgtaagccacgccacattgagtgggaatcggtgctcaccaacacagctggctgccttaggaatgtaagctcagagaggagtgaagctcgccggaaacttcgggaatgtgatggtttagttgatgccctcattttcattgttcaggctgagattgggcagaaggattcagacagcaagcttgtagagaactgtgtttgccttcttcggaacttatcatatcaagttcaccgggagatcccacaggcagagcgttaccaagaggcagctcccaatgttgccaacaatactgggccacatgctgccagttgctttggggccaagaagggcaaagatgagtggttctccagagggaaaaaacctatagaggatccagcaaacgatacagtggatttccctaaaagaacgagtccagctcgaggctatgagctcttatttcagccagaggtggttcggatatacatctcacttcttaaggagagcaagactcctgccatcctagaagcctcagctggagctatccagaacttgtgtgctgggcgctggacgtatggtcgatacatccgctctgctctgcgtcaagagaaggctctttctgccatagctgacctcctgactaatgaacatgaacgggtggtgaaagctgcatctggagcactgagaaacctggctgtggatgctcgcaacaaagaattaattggtaaacatgctattcctaacttggtaaagaatctgccaggaggacagcagaactcctcttggaatttctctgaggacactgtcatctctattttgaacactatcaacgaggttatcgctgagaacttggaggctgccaaaaagcttcgagagacacagggtattgagaagctggtgttgatcaacaaatcagggaaccgctcagaaaaagaagttcgagcagcagcacttgtattacagacaatctggggatataaggaactgcggaagccactggaaaaagaaggatggaagaaatcagactttcaggtgaatctaaacaatgcttcccgaagccagagcagtcattcatatgatgatagtactctccctctcattgaccggaaccaaaaatcagataagaaacctgatcgggaagaaattcagatgagcaatatgggatcaaacacaaaatcactagataacaactattccacaccaaatgagagaggagaccacaatagaacactggatcgatcgggggatctaggcgacatggagccattgaagggaacaacacccttgatgcaggacgaggggcaggaatctctggaggaagagttggatgtgttggttttggatgatgaggggggccaagtgtcttacccctccatgcagaagatttagcaccactatctccgttccatctgggcttatatgtacttttattttttggtggtgaaattgactgatgattttcctttttcttcgctggactattgtgccaactgccaggctgcctcctgcccttacagccctaagtggctgccttctttccatcaactcccaacttcttcctgtgaagtttaattgtctcaacgcctccccctcccccattccctccatttttctcccaagaaacctgactcaattatttgcatattttgagaaactgctgcagattagttctttttgccagttttccctggaactcctggccttttgtggaggggagggatggagagaataggaatcttcactagaagccgtgggaagaattggaagttacatgctgtatatgcaatgtccagcagtctgataaactgacgattcttaatcaagatttttttcctgatggggaagggacttttattttcttttagagaggggaaagtgtgagctcttcccttattcctaatggctatttttgaagcaaagaaggccagcaacattggcacatgccacctggcaaaggacccttgagtaagtgaaggtctcctaaaactgggattaagaaaccttgctctcctcatctccaaggcagggaccatcaagaacctacagactccatctcttctgcaagcctcatgccaaccctgggctattgctgctgccccttaaacacaggctgtccttaacccacctctcctgccctgtgatatgtctgctgagttggcctggccatttccaagaggctgtagaaaggggagaatgtcaaggaagacttttggtagagaaggagcagaaagatgtgtttttgggaagaagaagacctctaggaggagctagtaggaatgtacatgaagcaattagtctgaaactggcttccccactcccccgtttctccttttcctatccttataggcctgtcccttgcctctgccctggattggttggcaaactaaaggacttgatgtacataactcctgtcccttttcccttacaaggtggggattgcccctggctttgcctcttctttgtgcctttggcctggggtgcatctcctcccgcccttccatgtgcctttctttgcctctgcagtctcatttctcataattttgcaaattatattttgttgctttcttacctactattggccctaaatagcagaaagaagagaagtgaccgagagaacctcagattcttcattgaggattggtatagccatgatttcagtcatagcaagcttttgctcaacagcatatgggtgggattttgcaaaaatcctattctgatgaatctcaaagtaaggctggtaagagaagtgagtggtgtgactcttactccttaggtgcccagaatttaccatcatctctgaaggagttacagggaagtggtctccccaattctcccctccctccagtattgccccctctcactttagcatatattaattagcaggttgggctagagaaatcagctgctatgcgggttgattattattattatttctaatccttttccttatttgccttctactccccttaatctaatctaaaagctctgttccatgcaactggagttccttatccctctcttccccttcccttatatattgaggctatggggtaggagaaaagtgcacaacccaccaccccctttactcgtgcattaaaatttcttatttacccttttcccccttcccatttcttcccactttcatctaccttttctggcaaaaaggagccttttgctctctgtgaccctaagagcacactgcacagggaaaattgccccatccagacctggctccactcttgatctctcttgtcctcttctgctcttttcctggtgctcttttttctcggtggggtgtgggtaatagaacagccgtgggcttttggggacctttaacttttttttctctcttttgtttataaaaaacactaaacattcaattccagagaaccaaaaatcccaccttcccaccgaacactactaaggggcttgtgttctgctccataccttttctcttttctttctgtcttgttaatgcttttaaaaacaaatgagttttttatataaataaagtttttaaagtgtgtatgtggggggtctgtgtcatttcttcacttcaagctgttatttcttccctgctttgcatctttgttacttccttatgtatcagtgtcctttccagagcaaccagaaggaggttataccaggatttattttgagctcagccccaactctttatcaagcaacattcttgttaactatatgtgaaacattttttcttctgaagattcttaaaaattgaatgtggctgaagttgaacatgggagcttattgctaatttagagataggaaactgaagcataaagaattaatgacttactttaattactggaattcttctgcaacatttgacaaaactaaccttgaataaggcccactgtaatacgtagctctcttaaatataacacttaggactagaagattagaaactaccaatcccaactacgtaataggaaaatgtaggatcaaaaggcccatgtatataagtactgaccactgggccataatgttgcttctcaggctatatgcagtcctttagtcagaagtcaataggcctatttattaatattttacagaccatattacctggattaccagggactatctttgctgcagagatcaagggttaagatctatgggaagatacttatttttctgaggtccttatgtcctgtcatataattaaagactcaagagaatttatgtgaaatgctttctgtatgcccaaatctttagattaaaattatatagctgctcct

SEQ ID NO: 114925 - DNA, 5800 bp, Homo sapiens
  Payload ID: 2444
  Gene Symbol: CTNND1
  Gene Name: catenin (cadherin-associated protein), delta 1
  Uniprot ID: O60716
  ENST ID: ENST00000426142
  CDS Start-End: 432-2930
ctgccagatcagtttgtcaccacccaggctcccttgcctttggctgggtgcaacttccattttaggtgttggatctgagggggaaaaaaaagagagagggagagagagagaaagaagagcaggaaagatcccgaaaggaggaagaggtggcgaaaaatcaactgccctgctggatttgtctttctcagcaccttggcgaagccttgggtttctttcttaaaggactgatttttagaactccacatttgaggtgtgtggcttttgaagaaaatgtatgtactgacgggaaaaggaggataagcaagtcgaatttttgtcttacgaacggccggtttgtgggcgatgctgaccttgaaagacagaaattttcagatttgaaactcaacggaccccaggatcacagtcaccttctatatagcaccatccccaggatgcaggagccggggcagattgtggagacctacacggaggaggatcctgagggagccatgtctgtagtctctgtggagacctcagatgatgggaccactcggcgcacagagaccacggtcaagaaagtagtgaagactgtgacaacacggacagtacagccagtcgctatgggaccagacgggttgcctgtggatgcttcatcagtttctaacaactatatccagactttgggtcgtgatttccgcaagaatggcaatgggggacctggtccctatgtggggcaagctggcactgctacccttcctaggaacttccactaccctcctgatggttatagtcgccactatgaagatggttatccaggtggcagtgataactatggcagtctgtcccgggtgacccgcattgaggagcggtataggcccagcatggaaggctaccgggcacctagtagacaggatgtgtatgggccccaaccccaggttcgggtaggtgggagcagcgtggatctgcatcgctttcatccagagccttatgggctagaggatgaccagcgtagtatgggctatgatgacctggattatggtatgatgtctgattatggcactgcccgtcggactgggacaccctctgaccctcgtcggcgcctcaggagctatgaagacatgattggtgaggaggtgccatcggatcaatactactgggctcctttggcccagcatgagcgaggaagtttagcaagcttggatagcctgcgcaaaggagggcctccacctcctaattggagacagccagagctgccagaggtgatcgccatgcttggattccgcttggatgctgtcaagtccaatgcagctgcatacctgcaacacttatgctaccgcaatgacaaggtgaagactgacgtgcggaagctcaagggcatcccagtactggtgggattgttagaccatcccaaaaaggaagtgcaccttggagcctgtggagctctcaagaatatctcttttggacgtgaccaggataacaagattgccataaaaaactgtgatggtgtgcctgcccttgtgcgattgcttcgaaaggctcgtgatatggaccttactgaagttattaccggaaccctgtggaatctttcatcccatgactcaatcaaaatggagattgtggaccatgcactgcatgccttgacagatgaagtgatcattcctcattctggttgggagcgggaacctaatgaagactgtaagccacgccacattgagtgggaatcggtgctcaccaacacagctggctgccttaggaatgtaagctcagagaggagtgaagctcgccggaaacttcgggaatgtgatggtttagttgatgccctcattttcattgttcaggctgagattgggcagaaggattcagacagcaagcttgtagagaactgtgtttgccttcttcggaacttatcatatcaagttcaccgggagatcccacaggcagagcgttaccaagaggcagctcccaatgttgccaacaatactgggccacatgctgccagttgctttggggccaagaagggcaaagggaaaaaacctatagaggatccagcaaacgatacagtggatttccctaaaagaacgagtccagctcgaggctatgagctcttatttcagccagaggtggttcggatatacatctcacttcttaaggagagcaagactcctgccatcctagaagcctcagctggagctatccagaacttgtgtgctgggcgctggacgtatggtcgatacatccgctctgctctgcgtcaagagaaggctctttctgccatagctgacctcctgactaatgaacatgaacgggtggtgaaagctgcatctggagcactgagaaacctggctgtggatgctcgcaacaaagaattaattggtaaacatgctattcctaacttggtaaagaatctgccaggaggacagcagaactcctcttggaatttctctgaggacactgtcatctctattttgaacactatcaacgaggttatcgctgagaacttggaggctgccaaaaagcttcgagagacacagggtattgagaagctggtgttgatcaacaaatcagggaaccgctcagaaaaagaagttcgagcagcagcacttgtattacagacaatctggggatataaggaactgcggaagccactggaaaaagaaggatggaagaaatcagactttcaggtgaatctaaacaatgcttcccgaagccagagcagtcattcatatgatgatagtactctccctctcattgaccggaaccaaaaatcagataagaaacctgatcgggaagaaattcagatgagcaatatgggatcaaacacaaaatcactagataacaactattccacaccaaatgagagaggagaccacaatagaacactggatcgatcgggggatctaggcgacatggagccattgaagggaacaacacccttgatgcagaagatttagcaccactatctccgttccatctgggcttatatgtacttttattttttggtggtgaaattgactgatgattttcctttttcttcgctggactattgtgccaactgccaggctgcctcctgcccttacagccctaagtggctgccttctttccatcaactcccaacttcttcctgtgaagtttaattgtctcaacgcctccccctcccccattccctccatttttctcccaagaaacctgactcaattatttgcatattttgagaaactgctgcagattagttctttttgccagttttccctggaactcctggccttttgtggaggggagggatggagagaataggaatcttcactagaagccgtgggaagaattggaagttacatgctgtatatgcaatgtccagcagtctgataaactgacgattcttaatcaagatttttttcctgatggggaagggacttttattttcttttagagaggggaaagtgtgagctcttcccttattcctaatggctatttttgaagcaaagaaggccagcaacattggcacatgccacctggcaaaggacccttgagtaagtgaaggtctcctaaaactgggattaagaaaccttgctctcctcatctccaaggcagggaccatcaagaacctacagactccatctcttctgcaagcctcatgccaaccctgggctattgctgctgccccttaaacacaggctgtccttaacccacctctcctgccctgtgatatgtctgctgagttggcctggccatttccaagaggctgtagaaaggggagaatgtcaaggaagacttttggtagagaaggagcagaaagatgtgtttttgggaagaagaagacctctaggaggagctagtaggaatgtacatgaagcaattagtctgaaactggcttccccactcccccgtttctccttttcctatccttataggcctgtcccttgcctctgccctggattggttggcaaactaaaggacttgatgtacataactcctgtcccttttcccttacaaggtggggattgcccctggctttgcctcttctttgtgcctttggcctggggtgcatctcctcccgcccttccatgtgcctttctttgcctctgcagtctcatttctcataattttgcaaattatattttgttgctttcttacctactattggccctaaatagcagaaagaagagaagtgaccgagagaacctcagattcttcattgaggattggtatagccatgatttcagtcatagcaagcttttgctcaacagcatatgggtgggattttgcaaaaatcctattctgatgaatctcaaagtaaggctggtaagagaagtgagtggtgtgactcttactccttaggtgcccagaatttaccatcatctctgaaggagttacagggaagtggtctccccaattctcccctccctccagtattgccccctctcactttagcatatattaattagcaggttgggctagagaaatcagctgctatgcgggttgattattattattatttctaatccttttccttatttgccttctactccccttaatctaatctaaaagctctgttccatgcaactggagttccttatccctctcttccccttcccttatatattgaggctatggggtaggagaaaagtgcacaacccaccaccccctttactcgtgcattaaaatttcttatttacccttttcccccttcccatttcttcccactttcatctaccttttctggcaaaaaggagccttttgctctctgtgaccctaagagcacactgcacagggaaaattgccccatccagacctggctccactcttgatctctcttgtcctcttctgctcttttcctggtgctcttttttctcggtggggtgtgggtaatagaacagccgtgggcttttggggacctttaacttttttttctctcttttgtttataaaaaacactaaacattcaattccagagaaccaaaaatcccaccttcccaccgaacactactaaggggcttgtgttctgctccataccttttctcttttctttctgtcttgttaatgcttttaaaaacaaatgagttttttatataaataaagtttttaaagtgtgtatgtggggggtctgtgtcatttcttcacttcaagctgttatttcttccctgctttgcatctttgttacttccttatgtatcagtgtcctttccagagcaaccagaaggaggttataccaggatttattttgagctcagccccaactctttatcaagcaacattcttgttaactatatgtgaaacattttttcttctgaagattcttaaaaattgaatgtggctgaagttgaacatgggagcttattgctaatttagagataggaaactgaagcataaagaattaatgacttactttaattactggaattcttctgcaacatttgacaaaactaaccttgaataaggcccactgtaatacgtagctctcttaaatataacacttaggactagaagattagaaactaccaatcccaactacgtaataggaaaatgtaggatcaaaaggcccatgtatataagtactgaccactgggccataatgttgcttctcaggctatatgcagtcctttagtcagaagtcaataggcctatttattaatattttacagaccatattacctggattaccagggactatctttgctgcagagatcaagggttaagatctatgggaagatacttatttttctgaggtccttatgtcctgtcatataattaaagactcaagagaatttatgtgaaatgctttctgtatgcccaaatctttagattaaaattatatagctgctcct

SEQ ID NO: 114926 - DNA, 6016 bp, Homo sapiens
  Payload ID: 2444
  Gene Symbol: CTNND1
  Gene Name: catenin (cadherin-associated protein), delta 1
  Uniprot ID: O60716
  ENST ID: ENST00000428599
  CDS Start-End: 345-3146
ctgccagatcagtttgtcaccacccaggctcccttgcctttggctgggtgcaacttccattttaggtgttggatctgagggggaaaaaaaagagagagggagagagagagaaagaagagcaggaaagatcccgaaaggaggaagaggtggcgaaaaatcaactgccctgctggatttgtctttctcagcaccttggcgaagccttgggtttctttcttaaaggactgatttttagaactccacatttgagtgtgaagtgagggggtctctctccctccttctccttcctctgtgattcaccttcctttttaccctgccctgcggcggctccgccccttaccttcatggacgactcagaggtggagtcgaccgccagcatcttggcctctgtgaaggaacaagaggcccagtttgagaagctgacccgggcgctggaggaggaacggcgccacgtctcggcgcagctggaacgcgtccgggtctcaccacaagatgccaacccactcatggccaacggcacactcacccgccggcatcagaacggccggtttgtgggcgatgctgaccttgaaagacagaaattttcagatttgaaactcaacggaccccaggatcacagtcaccttctatatagcaccatccccaggatgcaggagccggggcagattgtggagacctacacggaggaggatcctgagggagccatgtctgtagtctctgtggagacctcagatgatgggaccactcggcgcacagagaccacggtcaagaaagtagtgaagactgtgacaacacggacagtacagccagtcgctatgggaccagacgggttgcctgtggatgcttcatcagtttctaacaactatatccagactttgggtcgtgatttccgcaagaatggcaatgggggacctggtccctatgtggggcaagctggcactgctacccttcctaggaacttccactaccctcctgatggttatagtcgccactatgaagatggttatccaggtggcagtgataactatggcagtctgtcccgggtgacccgcattgaggagcggtataggcccagcatggaaggctaccgggcacctagtagacaggatgtgtatgggccccaaccccaggttcgggtaggtgggagcagcgtggatctgcatcgctttcatccagagccttatgggctagaggatgaccagcgtagtatgggctatgatgacctggattatggtatgatgtctgattatggcactgcccgtcggactgggacaccctctgaccctcgtcggcgcctcaggagctatgaagacatgattggtgaggaggtgccatcggatcaatactactgggctcctttggcccagcatgagcgaggaagtttagcaagcttggatagcctgcgcaaaggagggcctccacctcctaattggagacagccagagctgccagaggtgatcgccatgcttggattccgcttggatgctgtcaagtccaatgcagctgcatacctgcaacacttatgctaccgcaatgacaaggtgaagactgacgtgcggaagctcaagggcatcccagtactggtgggattgttagaccatcccaaaaaggaagtgcaccttggagcctgtggagctctcaagaatatctcttttggacgtgaccaggataacaagattgccataaaaaactgtgatggtgtgcctgcccttgtgcgattgcttcgaaaggctcgtgatatggaccttactgaagttattaccggaaccctgtggaatctttcatcccatgactcaatcaaaatggagattgtggaccatgcactgcatgccttgacagatgaagtgatcattcctcattctggttgggagcgggaacctaatgaagactgtaagccacgccacattgagtgggaatcggtgctcaccaacacagctggctgccttaggaatgtaagctcagagaggagtgaagctcgccggaaacttcgggaatgtgatggtttagttgatgccctcattttcattgttcaggctgagattgggcagaaggattcagacagcaagcttgtagagaactgtgtttgccttcttcggaacttatcatatcaagttcaccgggagatcccacaggcagagcgttaccaagaggcagctcccaatgttgccaacaatactgggccacatgctgccagttgctttggggccaagaagggcaaagggaaaaaacctatagaggatccagcaaacgatacagtggatttccctaaaagaacgagtccagctcgaggctatgagctcttatttcagccagaggtggttcggatatacatctcacttcttaaggagagcaagactcctgccatcctagaagcctcagctggagctatccagaacttgtgtgctgggcgctggacgtatggtcgatacatccgctctgctctgcgtcaagagaaggctctttctgccatagctgacctcctgactaatgaacatgaacgggtggtgaaagctgcatctggagcactgagaaacctggctgtggatgctcgcaacaaagaattaattggtaaacatgctattcctaacttggtaaagaatctgccaggaggacagcagaactcctcttggaatttctctgaggacactgtcatctctattttgaacactatcaacgaggttatcgctgagaacttggaggctgccaaaaagcttcgagagacacagggtattgagaagctggtgttgatcaacaaatcagggaaccgctcagaaaaagaagttcgagcagcagcacttgtattacagacaatctggggatataaggaactgcggaagccactggaaaaagaaggatggaagaaatcagactttcaggtgaatctaaacaatgcttcccgaagccagagcagtcattcatatgatgatagtactctccctctcattgaccggaaccaaaaatcagataagaaacctgatcgggaagaaattcagatgagcaatatgggatcaaacacaaaatcactagataacaactattccacaccaaatgagagaggagaccacaatagaacactggatcgatcgggggatctaggcgacatggagccattgaagggaacaacacccttgatgcagaagatttagcaccactatctccgttccatctgggcttatatgtacttttattttttggtggtgaaattgactgatgattttcctttttcttcgctggactattgtgccaactgccaggctgcctcctgcccttacagccctaagtggctgccttctttccatcaactcccaacttcttcctgtgaagtttaattgtctcaacgcctccccctcccccattccctccatttttctcccaagaaacctgactcaattatttgcatattttgagaaactgctgcagattagttctttttgccagttttccctggaactcctggccttttgtggaggggagggatggagagaataggaatcttcactagaagccgtgggaagaattggaagttacatgctgtatatgcaatgtccagcagtctgataaactgacgattcttaatcaagatttttttcctgatggggaagggacttttattttcttttagagaggggaaagtgtgagctcttcccttattcctaatggctatttttgaagcaaagaaggccagcaacattggcacatgccacctggcaaaggacccttgagtaagtgaaggtctcctaaaactgggattaagaaaccttgctctcctcatctccaaggcagggaccatcaagaacctacagactccatctcttctgcaagcctcatgccaaccctgggctattgctgctgccccttaaacacaggctgtccttaacccacctctcctgccctgtgatatgtctgctgagttggcctggccatttccaagaggctgtagaaaggggagaatgtcaaggaagacttttggtagagaaggagcagaaagatgtgtttttgggaagaagaagacctctaggaggagctagtaggaatgtacatgaagcaattagtctgaaactggcttccccactcccccgtttctccttttcctatccttataggcctgtcccttgcctctgccctggattggttggcaaactaaaggacttgatgtacataactcctgtcccttttcccttacaaggtggggattgcccctggctttgcctcttctttgtgcctttggcctggggtgcatctcctcccgcccttccatgtgcctttctttgcctctgcagtctcatttctcataattttgcaaattatattttgttgctttcttacctactattggccctaaatagcagaaagaagagaagtgaccgagagaacctcagattcttcattgaggattggtatagccatgatttcagtcatagcaagcttttgctcaacagcatatgggtgggattttgcaaaaatcctattctgatgaatctcaaagtaaggctggtaagagaagtgagtggtgtgactcttactccttaggtgcccagaatttaccatcatctctgaaggagttacagggaagtggtctccccaattctcccctccctccagtattgccccctctcactttagcatatattaattagcaggttgggctagagaaatcagctgctatgcgggttgattattattattatttctaatccttttccttatttgccttctactccccttaatctaatctaaaagctctgttccatgcaactggagttccttatccctctcttccccttcccttatatattgaggctatggggtaggagaaaagtgcacaacccaccaccccctttactcgtgcattaaaatttcttatttacccttttcccccttcccatttcttcccactttcatctaccttttctggcaaaaaggagccttttgctctctgtgaccctaagagcacactgcacagggaaaattgccccatccagacctggctccactcttgatctctcttgtcctcttctgctcttttcctggtgctcttttttctcggtggggtgtgggtaatagaacagccgtgggcttttggggacctttaacttttttttctctcttttgtttataaaaaacactaaacattcaattccagagaaccaaaaatcccaccttcccaccgaacactactaaggggcttgtgttctgctccataccttttctcttttctttctgtcttgttaatgcttttaaaaacaaatgagttttttatataaataaagtttttaaagtgtgtatgtggggggtctgtgtcatttcttcacttcaagctgttatttcttccctgctttgcatctttgttacttccttatgtatcagtgtcctttccagagcaaccagaaggaggttataccaggatttattttgagctcagccccaactctttatcaagcaacattcttgttaactatatgtgaaacattttttcttctgaagattcttaaaaattgaatgtggctgaagttgaacatgggagcttattgctaatttagagataggaaactgaagcataaagaattaatgacttactttaattactggaattcttctgcaacatttgacaaaactaaccttgaataaggcccactgtaatacgtagctctcttaaatataacacttaggactagaagattagaaactaccaatcccaactacgtaataggaaaatgtaggatcaaaaggcccatgtatataagtactgaccactgggccataatgttgcttctcaggctatatgcagtcctttagtcagaagtcaataggcctatttattaatattttacagaccatattacctggattaccagggactatctttgctgcagagatcaagggttaagatctatgggaagatacttatttttctgaggtccttatgtcctgtcatataattaaagactcaagagaatttatgtgaaatgctttctgtatgcccaaatctttagattaaaattatatagctgctcct

SEQ ID NO: 114927 - DNA, 848 bp, Homo sapiens
  Payload ID: 2444
  Gene Symbol: CTNND1
  Gene Name: catenin (cadherin-associated protein), delta 1
  ENST ID: ENST00000531007
  CDS Start-End: 1-370
tgtattacagacaatctggggatataaggaactgcggaagccactggaaaaagaaggatggaagaaatcagactttcaggtgaatctaaacaatgcttcccgaagccagagcagtcattcatatgatgatagtactctccctctcattgaccggaaccaaaaatcagataagaaacctgatcgggaagaaattcagatgagcaatatgggatcaaacacaaaatcactagataacaactattccacaccaaatgagagaggagaccacaatagaacactggatcgatcgggggatctaggcgacatggagccattgaagggaacaacacccttgatggtaaattctctttatatactgctatctgtctaaggctagttctattttgaagcctatgtgttttgtgaaacacaaaaaaaagtacagagaaagatcgcatccttttctggtaggggttttcaggaaaaagtaagagttctgactcatgttgggatttcttgggccgttattctgcagtggtcaaaatgggggaagcatgtctgtaaaagtgttactgatatgactaacactaactgatctactttcaaacattacctttttcctctccctccctgtttatgaatgttttgcccttctcttactattatatcttgttttgtttgagtttacaaattttcagagtttccctagctctggcacacactcatgaggttcctgtctctactcatactaacaaattgcatgtgttcacagcaggacgaggggcaggaatctctggaggaagagttggatgtgttggttttggatgatgaggggggccaagtgtcttacccctccatggtatgtcctt

SEQ ID NO: 114928 - DNA, 579 bp, Homo sapiens
  Payload ID: 2444
  Gene Symbol: CTNND1
  Gene Name: catenin (cadherin-associated protein), delta 1
  ENST ID: ENST00000530068
  CDS Start-End: 194-579
aaggctaggtgaggtgtctttggcaaggttgcacagggatccagaggtggagtcgaccgccagcatcttggcctctgtgaaggaacaagaggcccagtttgagaagctgacccgggcgctggaggaggaacggcgccacgtctcggcgcagctggaacgcgtccgggtctcaccacaagatgccaacccactcatggccaacggcacactcacccgccggcatcagaacggccggtttgtgggcgatgctgaccttgaaagacagaaattttcagatttgaaactcaacggaccccaggatcacagtcaccttctatatagcaccatccccaggatgcaggagccggggcagattgtggagacctacacggaggaggatcctgagggagccatgtctgtagtctctgtggagacctcagatgatgggaccactcggcgcacagagaccacggtcaagaaagtagtgaagactgtgacaacacggacagtacagccagtcgctatgggaccagacgggttgcctgtggatgcttcatcagtttctaacaactatatccagactttgggtcgtgatttccg

SEQ ID NO: 114929 - DNA, 3489 bp, Homo sapiens
  Payload ID: 2444
  Gene Symbol: CTNND1
  Gene Name: catenin (cadherin-associated protein), delta 1
  Uniprot ID: O60716
  ENST ID: ENST00000526938
  CDS Start-End: 324-3080
acccaggctcccttgcctttggctgggtgcaacttccattttaggtgttggatctgagggggaaaaaaaagagagagggagagagagagaaagaagagcaggaaagatcccgaaaggaggaagaggtggcgaaaaatcaactgccctgctggatttgtctttctcagcaccttggcgaagccttgggtttctttcttaaaggactgatttttagaactccacatttgagtgtgaagtgagggggtctctctccctccttctccttcctctgtgattcaccttcctttttaccctgccctgcggcggctccgccccttaccttcatggacgactcagaggtggagtcgaccgccagcatcttggcctctgtgaaggaacaagaggcccagtttgagaagctgacccgggcgctggaggaggaacggcgccacgtctcggcgcagctggaacgcgtccgggtctcaccacaagatgccaacccactcatggccaacggcacactcacccgccggcatcagaacggccggtttgtgggcgatgctgaccttgaaagacagaaattttcagatttgaaactcaacggaccccaggatcacagtcaccttctatatagcaccatccccaggatgcaggagccggggcagattgtggagacctacacggaggaggatcctgagggagccatgtctgtagtctctgtggagacctcagatgatgggaccactcggcgcacagagaccacggtcaagaaagtagtgaagactgtgacaacacggacagtacagccagtcgctatgggaccagacgggttgcctgtggatgcttcatcagtttctaacaactatatccagactttgggtcgtgatttccgcaagaatggcaatgggggacctggtccctatgtggggcaagctggcactgctacccttcctaggaacttccactaccctcctgatggttatagtcgccactatgaagatggttatccaggtggcagtgataactatggcagtctgtcccgggtgacccgcattgaggagcggtataggcccagcatggaaggctaccgggcacctagtagacaggatgtgtatgggccccaaccccaggttcgggtaggtgggagcagcgtggatctgcatcgctttcatccagagccttatgggctagaggatgaccagcgtagtatgggctatgatgacctggattatggtatgatgtctgattatggcactgcccgtcggactgggacaccctctgaccctcgtcggcgcctcaggagctatgaagacatgattggtgaggaggtgccatcggatcaatactactgggctcctttggcccagcatgagcgaggaagtttagcaagcttggatagcctgcgcaaaggagggcctccacctcctaattggagacagccagagctgccagaggtgatcgccatgcttggattccgcttggatgctgtcaagtccaatgcagctgcatacctgcaacacttatgctaccgcaatgacaaggtgaagactgacgtgcggaagctcaagggcatcccagtactggtgggattgttagaccatcccaaaaaggaagtgcaccttggagcctgtggagctctcaagaatatctcttttggacgtgaccaggataacaagattgccataaaaaactgtgatggtgtgcctgcccttgtgcgattgcttcgaaaggctcgtgatatggaccttactgaagttattaccggaaccctgtggaatctttcatcccatgactcaatcaaaatggagattgtggaccatgcactgcatgccttgacagatgaagtgatcattcctcattctggttgggagcgggaacctaatgaagactgtaagccacgccacattgagtgggaatcggtgctcaccaacacagctggctgccttaggaatgtaagctcagagaggagtgaagctcgccggaaacttcgggaatgtgatggtttagttgatgccctcattttcattgttcaggctgagattgggcagaaggattcagacagcaagcttgtagagaactgtgtttgccttcttcggaacttatcatatcaagttcaccgggagatcccacaggcagagcgttaccaagaggcagctcccaatgttgccaacaatactgggccacatgctgccagttgctttggggccaagaagggcaaagatgagtggttctccagagggaaaaaacctatagaggatccagcaaacgatacagtggatttccctaaaagaacgagtccagctcgaggctatgagctcttatttcagccagaggtggttcggatatacatctcacttcttaaggagagcaagactcctgccatcctagaagcctcagctggagctatccagaacttgtgtgctgggcgctggacgtatggtcgatacatccgctctgctctgcgtcaagagaaggctctttctgccatagctgacctcctgactaatgaacatgaacgggtggtgaaagctgcatctggagcactgagaaacctggctgtggatgctcgcaacaaagaattaattggtaaacatgctattcctaacttggtaaagaatctgccaggaggacagcagaactcctcttggaatttctctgaggacactgtcatctctattttgaacactatcaacgaggttatcgctgagaacttggaggctgccaaaaagcttcgagagacacagggtattgagaagctggtgttgatcaacaaatcagggaaccgctcagaaaaagaagttcgagcagcagcacttgtattacagacaatctggggatataaggaactgcggaagccactggaaaaagaaggatggaagaaatcagactttcaggtgaatctaaacaatgcttcccgaagccagagcagtcattcatatgatgatagtactctccctctcattgaccggaaccaaaaatcagataacaactattccacaccaaatgagagaggagaccacaatagaacactggatcgatcgggggatctaggcgacatggagccattgaagggaacaacacccttgatgcagaagatttagcaccactatctccgttccatctgggcttatatgtacttttattttttggtggtgaaattgactgatgattttcctttttcttcgctggactattgtgccaactgccaggctgcctcctgcccttacagccctaagtggctgccttctttccatcaactcccaacttcttcctgtgaagtttaattgtctcaacgcctccccctcccccattccctccatttttctcccaagaaacctgactcaattatttgcatattttgagaaactgctgcagattagttctttttgccagttttccctggaactcctggccttttgtggaggggagggatggagagaataggaatcttcactagaagccgtgggaagaattggaagttacatgctgtatatgcaatgtccagcagtc

SEQ ID NO: 114930 - DNA, 5749 bp, Homo sapiens
  Payload ID: 2444
  Gene Symbol: CTNND1
  Gene Name: catenin (cadherin-associated protein), delta 1
  Uniprot ID: O60716
  ENST ID: ENST00000532463
  CDS Start-End: 381-2879
ctgccagatcagtttgtcaccacccaggctcccttgcctttggctgggtgcaacttccattttaggtgttggatctgagggggaaaaaaaagagagagggagagagagagaaagaagagcaggaaagatcccgaaaggaggaagaggtggcgaaaaatcaactgccctgctggatttgtctttctcagcaccttggcgaagccttgggtttctttcttaaaggactgatttttagaactccacatttgaggtgtgtggcttttgaagaaaataacggccggtttgtgggcgatgctgaccttgaaagacagaaattttcagatttgaaactcaacggaccccaggatcacagtcaccttctatatagcaccatccccaggatgcaggagccggggcagattgtggagacctacacggaggaggatcctgagggagccatgtctgtagtctctgtggagacctcagatgatgggaccactcggcgcacagagaccacggtcaagaaagtagtgaagactgtgacaacacggacagtacagccagtcgctatgggaccagacgggttgcctgtggatgcttcatcagtttctaacaactatatccagactttgggtcgtgatttccgcaagaatggcaatgggggacctggtccctatgtggggcaagctggcactgctacccttcctaggaacttccactaccctcctgatggttatagtcgccactatgaagatggttatccaggtggcagtgataactatggcagtctgtcccgggtgacccgcattgaggagcggtataggcccagcatggaaggctaccgggcacctagtagacaggatgtgtatgggccccaaccccaggttcgggtaggtgggagcagcgtggatctgcatcgctttcatccagagccttatgggctagaggatgaccagcgtagtatgggctatgatgacctggattatggtatgatgtctgattatggcactgcccgtcggactgggacaccctctgaccctcgtcggcgcctcaggagctatgaagacatgattggtgaggaggtgccatcggatcaatactactgggctcctttggcccagcatgagcgaggaagtttagcaagcttggatagcctgcgcaaaggagggcctccacctcctaattggagacagccagagctgccagaggtgatcgccatgcttggattccgcttggatgctgtcaagtccaatgcagctgcatacctgcaacacttatgctaccgcaatgacaaggtgaagactgacgtgcggaagctcaagggcatcccagtactggtgggattgttagaccatcccaaaaaggaagtgcaccttggagcctgtggagctctcaagaatatctcttttggacgtgaccaggataacaagattgccataaaaaactgtgatggtgtgcctgcccttgtgcgattgcttcgaaaggctcgtgatatggaccttactgaagttattaccggaaccctgtggaatctttcatcccatgactcaatcaaaatggagattgtggaccatgcactgcatgccttgacagatgaagtgatcattcctcattctggttgggagcgggaacctaatgaagactgtaagccacgccacattgagtgggaatcggtgctcaccaacacagctggctgccttaggaatgtaagctcagagaggagtgaagctcgccggaaacttcgggaatgtgatggtttagttgatgccctcattttcattgttcaggctgagattgggcagaaggattcagacagcaagcttgtagagaactgtgtttgccttcttcggaacttatcatatcaagttcaccgggagatcccacaggcagagcgttaccaagaggcagctcccaatgttgccaacaatactgggccacatgctgccagttgctttggggccaagaagggcaaagggaaaaaacctatagaggatccagcaaacgatacagtggatttccctaaaagaacgagtccagctcgaggctatgagctcttatttcagccagaggtggttcggatatacatctcacttcttaaggagagcaagactcctgccatcctagaagcctcagctggagctatccagaacttgtgtgctgggcgctggacgtatggtcgatacatccgctctgctctgcgtcaagagaaggctctttctgccatagctgacctcctgactaatgaacatgaacgggtggtgaaagctgcatctggagcactgagaaacctggctgtggatgctcgcaacaaagaattaattggtaaacatgctattcctaacttggtaaagaatctgccaggaggacagcagaactcctcttggaatttctctgaggacactgtcatctctattttgaacactatcaacgaggttatcgctgagaacttggaggctgccaaaaagcttcgagagacacagggtattgagaagctggtgttgatcaacaaatcagggaaccgctcagaaaaagaagttcgagcagcagcacttgtattacagacaatctggggatataaggaactgcggaagccactggaaaaagaaggatggaagaaatcagactttcaggtgaatctaaacaatgcttcccgaagccagagcagtcattcatatgatgatagtactctccctctcattgaccggaaccaaaaatcagataagaaacctgatcgggaagaaattcagatgagcaatatgggatcaaacacaaaatcactagataacaactattccacaccaaatgagagaggagaccacaatagaacactggatcgatcgggggatctaggcgacatggagccattgaagggaacaacacccttgatgcagaagatttagcaccactatctccgttccatctgggcttatatgtacttttattttttggtggtgaaattgactgatgattttcctttttcttcgctggactattgtgccaactgccaggctgcctcctgcccttacagccctaagtggctgccttctttccatcaactcccaacttcttcctgtgaagtttaattgtctcaacgcctccccctcccccattccctccatttttctcccaagaaacctgactcaattatttgcatattttgagaaactgctgcagattagttctttttgccagttttccctggaactcctggccttttgtggaggggagggatggagagaataggaatcttcactagaagccgtgggaagaattggaagttacatgctgtatatgcaatgtccagcagtctgataaactgacgattcttaatcaagatttttttcctgatggggaagggacttttattttcttttagagaggggaaagtgtgagctcttcccttattcctaatggctatttttgaagcaaagaaggccagcaacattggcacatgccacctggcaaaggacccttgagtaagtgaaggtctcctaaaactgggattaagaaaccttgctctcctcatctccaaggcagggaccatcaagaacctacagactccatctcttctgcaagcctcatgccaaccctgggctattgctgctgccccttaaacacaggctgtccttaacccacctctcctgccctgtgatatgtctgctgagttggcctggccatttccaagaggctgtagaaaggggagaatgtcaaggaagacttttggtagagaaggagcagaaagatgtgtttttgggaagaagaagacctctaggaggagctagtaggaatgtacatgaagcaattagtctgaaactggcttccccactcccccgtttctccttttcctatccttataggcctgtcccttgcctctgccctggattggttggcaaactaaaggacttgatgtacataactcctgtcccttttcccttacaaggtggggattgcccctggctttgcctcttctttgtgcctttggcctggggtgcatctcctcccgcccttccatgtgcctttctttgcctctgcagtctcatttctcataattttgcaaattatattttgttgctttcttacctactattggccctaaatagcagaaagaagagaagtgaccgagagaacctcagattcttcattgaggattggtatagccatgatttcagtcatagcaagcttttgctcaacagcatatgggtgggattttgcaaaaatcctattctgatgaatctcaaagtaaggctggtaagagaagtgagtggtgtgactcttactccttaggtgcccagaatttaccatcatctctgaaggagttacagggaagtggtctccccaattctcccctccctccagtattgccccctctcactttagcatatattaattagcaggttgggctagagaaatcagctgctatgcgggttgattattattattatttctaatccttttccttatttgccttctactccccttaatctaatctaaaagctctgttccatgcaactggagttccttatccctctcttccccttcccttatatattgaggctatggggtaggagaaaagtgcacaacccaccaccccctttactcgtgcattaaaatttcttatttacccttttcccccttcccatttcttcccactttcatctaccttttctggcaaaaaggagccttttgctctctgtgaccctaagagcacactgcacagggaaaattgccccatccagacctggctccactcttgatctctcttgtcctcttctgctcttttcctggtgctcttttttctcggtggggtgtgggtaatagaacagccgtgggcttttggggacctttaacttttttttctctcttttgtttataaaaaacactaaacattcaattccagagaaccaaaaatcccaccttcccaccgaacactactaaggggcttgtgttctgctccataccttttctcttttctttctgtcttgttaatgcttttaaaaacaaatgagttttttatataaataaagtttttaaagtgtgtatgtggggggtctgtgtcatttcttcacttcaagctgttatttcttccctgctttgcatctttgttacttccttatgtatcagtgtcctttccagagcaaccagaaggaggttataccaggatttattttgagctcagccccaactctttatcaagcaacattcttgttaactatatgtgaaacattttttcttctgaagattcttaaaaattgaatgtggctgaagttgaacatgggagcttattgctaatttagagataggaaactgaagcataaagaattaatgacttactttaattactggaattcttctgcaacatttgacaaaactaaccttgaataaggcccactgtaatacgtagctctcttaaatataacacttaggactagaagattagaaactaccaatcccaactacgtaataggaaaatgtaggatcaaaaggcccatgtatataagtactgaccactgggccataatgttgcttctcaggctatatgcagtcctttagtcagaagtcaataggcctatttattaatattttacagaccatattacctggattaccagggactatctttgctgcagagatcaagggttaagatctatgggaagatacttatttttctgaggtccttatgtcctgtcatataattaaagactcaagagaatttatgtgaaatgctttctgtatgcccaaatctttagattaaaattatatagctgctcct

SEQ ID NO: 114931 - DNA, 5907 bp, Homo sapiens
  Payload ID: 2444
  Gene Symbol: CTNND1
  Gene Name: catenin (cadherin-associated protein), delta 1
  Uniprot ID: O60716
  ENST ID: ENST00000528621
  CDS Start-End: 398-3037
ctgccagatcagtttgtcaccacccaggctcccttgcctttggctgggtgcaacttccattttaggtgttggatctgagggggaaaaaaaagagagagggagagagagagaaagaagagcaggaaagatcccgaaaggaggaagaggtggcgaaaaatcaactgccctgctggatttgtctttctcagcaccttggcgaagccttgggtttctttcttaaaggactgatttttagaactccacatttgaggtggagtcgaccgccagcatcttggcctctgtgaaggaacaagaggcccagtttgagaagctgacccgggcgctggaggaggaacggcgccacgtctcggcgcagctggaacgcgtccgggtctcaccacaagatgccaacccactcatggccaacggcacactcacccgccggcatcagaacggccggtttgtgggcgatgctgaccttgaaagacagaaattttcagatttgaaactcaacggaccccaggatcacagtcaccttctatatagcaccatccccaggatgcaggagccggggcagattgtggagacctacacggaggaggatcctgagggagccatgtctgtagtctctgtggagacctcagatgatgggaccactcggcgcacagagaccacggtcaagaaagtagtgaagactgtgacaacacggacagtacagccagtcgctatgggaccagacgggttgcctgtggatgcttcatcagtttctaacaactatatccagactttgggtcgtgatttccgcaagaatggcaatgggggacctggtccctatgtggggcaagctggcactgctacccttcctaggaacttccactaccctcctgatggttatagtcgccactatgaagatggttatccaggtggcagtgataactatggcagtctgtcccgggtgacccgcattgaggagcggtataggcccagcatggaaggctaccgggcacctagtagacaggatgtgtatgggccccaaccccaggttcgggtaggtgggagcagcgtggatctgcatcgctttcatccagagccttatgggctagaggatgaccagcgtagtatgggctatgatgacctggattatggtatgatgtctgattatggcactgcccgtcggactgggacaccctctgaccctcgtcggcgcctcaggagctatgaagacatgattggtgaggaggtgccatcggatcaatactactgggctcctttggcccagcatgagcgaggaagtttagcaagcttggatagcctgcgcaaaggagggcctccacctcctaattggagacagccagagctgccagaggtgatcgccatgcttggattccgcttggatgctgtcaagtccaatgcagctgcatacctgcaacacttatgctaccgcaatgacaaggtgaagactgacgtgcggaagctcaagggcatcccagtactggtgggattgttagaccatcccaaaaaggaagtgcaccttggagcctgtggagctctcaagaatatctcttttggacgtgaccaggataacaagattgccataaaaaactgtgatggtgtgcctgcccttgtgcgattgcttcgaaaggctcgtgatatggaccttactgaagttattaccggaaccctgtggaatctttcatcccatgactcaatcaaaatggagattgtggaccatgcactgcatgccttgacagatgaagtgatcattcctcattctggttgggagcgggaacctaatgaagactgtaagccacgccacattgagtgggaatcggtgctcaccaacacagctggctgccttaggaatgtaagctcagagaggagtgaagctcgccggaaacttcgggaatgtgatggtttagttgatgccctcattttcattgttcaggctgagattgggcagaaggattcagacagcaagcttgtagagaactgtgtttgccttcttcggaacttatcatatcaagttcaccgggagatcccacaggcagagcgttaccaagaggcagctcccaatgttgccaacaatactgggccacatgctgccagttgctttggggccaagaagggcaaagggaaaaaacctatagaggatccagcaaacgatacagtggatttccctaaaagaacgagtccagctcgaggctatgagctcttatttcagccagaggtggttcggatatacatctcacttcttaaggagagcaagactcctgccatcctagaagcctcagctggagctatccagaacttgtgtgctgggcgctggacgtatggtcgatacatccgctctgctctgcgtcaagagaaggctctttctgccatagctgacctcctgactaatgaacatgaacgggtggtgaaagctgcatctggagcactgagaaacctggctgtggatgctcgcaacaaagaattaattggtaaacatgctattcctaacttggtaaagaatctgccaggaggacagcagaactcctcttggaatttctctgaggacactgtcatctctattttgaacactatcaacgaggttatcgctgagaacttggaggctgccaaaaagcttcgagagacacagggtattgagaagctggtgttgatcaacaaatcagggaaccgctcagaaaaagaagttcgagcagcagcacttgtattacagacaatctggggatataaggaactgcggaagccactggaaaaagaaggatggaagaaatcagactttcaggtgaatctaaacaatgcttcccgaagccagagcagtcattcatatgatgatagtactctccctctcattgaccggaaccaaaaatcagataagaaacctgatcgggaagaaattcagatgagcaatatgggatcaaacacaaaatcactagataacaactattccacaccaaatgagagaggagaccacaatagaacactggatcgatcgggggatctaggcgacatggagccattgaagggaacaacacccttgatgcagaagatttagcaccactatctccgttccatctgggcttatatgtacttttattttttggtggtgaaattgactgatgattttcctttttcttcgctggactattgtgccaactgccaggctgcctcctgcccttacagccctaagtggctgccttctttccatcaactcccaacttcttcctgtgaagtttaattgtctcaacgcctccccctcccccattccctccatttttctcccaagaaacctgactcaattatttgcatattttgagaaactgctgcagattagttctttttgccagttttccctggaactcctggccttttgtggaggggagggatggagagaataggaatcttcactagaagccgtgggaagaattggaagttacatgctgtatatgcaatgtccagcagtctgataaactgacgattcttaatcaagatttttttcctgatggggaagggacttttattttcttttagagaggggaaagtgtgagctcttcccttattcctaatggctatttttgaagcaaagaaggccagcaacattggcacatgccacctggcaaaggacccttgagtaagtgaaggtctcctaaaactgggattaagaaaccttgctctcctcatctccaaggcagggaccatcaagaacctacagactccatctcttctgcaagcctcatgccaaccctgggctattgctgctgccccttaaacacaggctgtccttaacccacctctcctgccctgtgatatgtctgctgagttggcctggccatttccaagaggctgtagaaaggggagaatgtcaaggaagacttttggtagagaaggagcagaaagatgtgtttttgggaagaagaagacctctaggaggagctagtaggaatgtacatgaagcaattagtctgaaactggcttccccactcccccgtttctccttttcctatccttataggcctgtcccttgcctctgccctggattggttggcaaactaaaggacttgatgtacataactcctgtcccttttcccttacaaggtggggattgcccctggctttgcctcttctttgtgcctttggcctggggtgcatctcctcccgcccttccatgtgcctttctttgcctctgcagtctcatttctcataattttgcaaattatattttgttgctttcttacctactattggccctaaatagcagaaagaagagaagtgaccgagagaacctcagattcttcattgaggattggtatagccatgatttcagtcatagcaagcttttgctcaacagcatatgggtgggattttgcaaaaatcctattctgatgaatctcaaagtaaggctggtaagagaagtgagtggtgtgactcttactccttaggtgcccagaatttaccatcatctctgaaggagttacagggaagtggtctccccaattctcccctccctccagtattgccccctctcactttagcatatattaattagcaggttgggctagagaaatcagctgctatgcgggttgattattattattatttctaatccttttccttatttgccttctactccccttaatctaatctaaaagctctgttccatgcaactggagttccttatccctctcttccccttcccttatatattgaggctatggggtaggagaaaagtgcacaacccaccaccccctttactcgtgcattaaaatttcttatttacccttttcccccttcccatttcttcccactttcatctaccttttctggcaaaaaggagccttttgctctctgtgaccctaagagcacactgcacagggaaaattgccccatccagacctggctccactcttgatctctcttgtcctcttctgctcttttcctggtgctcttttttctcggtggggtgtgggtaatagaacagccgtgggcttttggggacctttaacttttttttctctcttttgtttataaaaaacactaaacattcaattccagagaaccaaaaatcccaccttcccaccgaacactactaaggggcttgtgttctgctccataccttttctcttttctttctgtcttgttaatgcttttaaaaacaaatgagttttttatataaataaagtttttaaagtgtgtatgtggggggtctgtgtcatttcttcacttcaagctgttatttcttccctgctttgcatctttgttacttccttatgtatcagtgtcctttccagagcaaccagaaggaggttataccaggatttattttgagctcagccccaactctttatcaagcaacattcttgttaactatatgtgaaacattttttcttctgaagattcttaaaaattgaatgtggctgaagttgaacatgggagcttattgctaatttagagataggaaactgaagcataaagaattaatgacttactttaattactggaattcttctgcaacatttgacaaaactaaccttgaataaggcccactgtaatacgtagctctcttaaatataacacttaggactagaagattagaaactaccaatcccaactacgtaataggaaaatgtaggatcaaaaggcccatgtatataagtactgaccactgggccataatgttgcttctcaggctatatgcagtcctttagtcagaagtcaataggcctatttattaatattttacagaccatattacctggattaccagggactatctttgctgcagagatcaagggttaagatctatgggaagatacttatttttctgaggtccttatgtcctgtcatataattaaagactcaagagaatttatgtgaaatgctttctgtatgcccaaatctttagattaaaattatatagctgctcct

SEQ ID NO: 114932 - DNA, 505 bp, Homo sapiens
  Payload ID: 2444
  Gene Symbol: CTNND1
  Gene Name: catenin (cadherin-associated protein), delta 1
  ENST ID: ENST00000524579
  CDS Start-End: 494-505
agtggtggtgatttgggtctagctttaaatagtgggctttgtgtagctgaagtgagcatcctagttaacctagtgtccaggactatttccacgaactaagggttgttttgactggtgtgtagtacagagcctttggggtgataagatggaagatttgtcttttacctcacctccactggttctttcaggaattataagggatgcagataagtaaatcttttattttttaaattttttgttttgctcattgtcttggttttggggtaaaaaatgatgatagctctctccttcctgcttcctccttgctgtggtggctgggatgcttcttccatgattttttgaatctagactgggctgttctctgtgttaaaccaatcagttgcgaccttctcttaacagtgtgaagtgagggggtctctctccctccttctccttcctctgtgattcaccttcctttttaccctgccctgcggcggctccgccccttaccttcatggacgactca

SEQ ID NO: 114933 - DNA, 5053 bp, Homo sapiens
  Payload ID: 2444
  Gene Symbol: CTNND1
  Gene Name: catenin (cadherin-associated protein), delta 1
  Uniprot ID: O60716
  ENST ID: ENST00000531014
  CDS Start-End: 264-2183
ctgccagatcagtttgtcaccacccaggctcccttgcctttggctgggtgcaacttccattttaggtgttggatctgagggggaaaaaaaagagagagggagagagagagaaagaagagcaggaaagatcccgaaaggaggaagaggtggcgaaaaatcaactgccctgctggatttgtctttctcagcaccttggcgaagccttgggtttctttcttaaaggactgatttttagaactccacatttgaggagctatgaagacatgattggtgaggaggtgccatcggatcaatactactgggctcctttggcccagcatgagcgaggaagtttagcaagcttggatagcctgcgcaaaggagggcctccacctcctaattggagacagccagagctgccagaggtgatcgccatgcttggattccgcttggatgctgtcaagtccaatgcagctgcatacctgcaacacttatgctaccgcaatgacaaggtgaagactgacgtgcggaagctcaagggcatcccagtactggtgggattgttagaccatcccaaaaaggaagtgcaccttggagcctgtggagctctcaagaatatctcttttggacgtgaccaggataacaagattgccataaaaaactgtgatggtgtgcctgcccttgtgcgattgcttcgaaaggctcgtgatatggaccttactgaagttattaccggaaccctgtggaatctttcatcccatgactcaatcaaaatggagattgtggaccatgcactgcatgccttgacagatgaagtgatcattcctcattctggttgggagcgggaacctaatgaagactgtaagccacgccacattgagtgggaatcggtgctcaccaacacagctggctgccttaggaatgtaagctcagagaggagtgaagctcgccggaaacttcgggaatgtgatggtttagttgatgccctcattttcattgttcaggctgagattgggcagaaggattcagacagcaagcttgtagagaactgtgtttgccttcttcggaacttatcatatcaagttcaccgggagatcccacaggcagagcgttaccaagaggcagctcccaatgttgccaacaatactgggccacatgctgccagttgctttggggccaagaagggcaaagggaaaaaacctatagaggatccagcaaacgatacagtggatttccctaaaagaacgagtccagctcgaggctatgagctcttatttcagccagaggtggttcggatatacatctcacttcttaaggagagcaagactcctgccatcctagaagcctcagctggagctatccagaacttgtgtgctgggcgctggacgtatggtcgatacatccgctctgctctgcgtcaagagaaggctctttctgccatagctgacctcctgactaatgaacatgaacgggtggtgaaagctgcatctggagcactgagaaacctggctgtggatgctcgcaacaaagaattaattggtaaacatgctattcctaacttggtaaagaatctgccaggaggacagcagaactcctcttggaatttctctgaggacactgtcatctctattttgaacactatcaacgaggttatcgctgagaacttggaggctgccaaaaagcttcgagagacacagggtattgagaagctggtgttgatcaacaaatcagggaaccgctcagaaaaagaagttcgagcagcagcacttgtattacagacaatctggggatataaggaactgcggaagccactggaaaaagaaggatggaagaaatcagactttcaggtgaatctaaacaatgcttcccgaagccagagcagtcattcatatgatgatagtactctccctctcattgaccggaaccaaaaatcagataagaaacctgatcgggaagaaattcagatgagcaatatgggatcaaacacaaaatcactagataacaactattccacaccaaatgagagaggagaccacaatagaacactggatcgatcgggggatctaggcgacatggagccattgaagggaacaacacccttgatgcaggacgaggggcaggaatctctggaggaagagttggatgtgttggttttggatgatgaggggggccaagtgtcttacccctccatgcagaagatttagcaccactatctccgttccatctgggcttatatgtacttttattttttggtggtgaaattgactgatgattttcctttttcttcgctggactattgtgccaactgccaggctgcctcctgcccttacagccctaagtggctgccttctttccatcaactcccaacttcttcctgtgaagtttaattgtctcaacgcctccccctcccccattccctccatttttctcccaagaaacctgactcaattatttgcatattttgagaaactgctgcagattagttctttttgccagttttccctggaactcctggccttttgtggaggggagggatggagagaataggaatcttcactagaagccgtgggaagaattggaagttacatgctgtatatgcaatgtccagcagtctgataaactgacgattcttaatcaagatttttttcctgatggggaagggacttttattttcttttagagaggggaaagtgtgagctcttcccttattcctaatggctatttttgaagcaaagaaggccagcaacattggcacatgccacctggcaaaggacccttgagtaagtgaaggtctcctaaaactgggattaagaaaccttgctctcctcatctccaaggcagggaccatcaagaacctacagactccatctcttctgcaagcctcatgccaaccctgggctattgctgctgccccttaaacacaggctgtccttaacccacctctcctgccctgtgatatgtctgctgagttggcctggccatttccaagaggctgtagaaaggggagaatgtcaaggaagacttttggtagagaaggagcagaaagatgtgtttttgggaagaagaagacctctaggaggagctagtaggaatgtacatgaagcaattagtctgaaactggcttccccactcccccgtttctccttttcctatccttataggcctgtcccttgcctctgccctggattggttggcaaactaaaggacttgatgtacataactcctgtcccttttcccttacaaggtggggattgcccctggctttgcctcttctttgtgcctttggcctggggtgcatctcctcccgcccttccatgtgcctttctttgcctctgcagtctcatttctcataattttgcaaattatattttgttgctttcttacctactattggccctaaatagcagaaagaagagaagtgaccgagagaacctcagattcttcattgaggattggtatagccatgatttcagtcatagcaagcttttgctcaacagcatatgggtgggattttgcaaaaatcctattctgatgaatctcaaagtaaggctggtaagagaagtgagtggtgtgactcttactccttaggtgcccagaatttaccatcatctctgaaggagttacagggaagtggtctccccaattctcccctccctccagtattgccccctctcactttagcatatattaattagcaggttgggctagagaaatcagctgctatgcgggttgattattattattatttctaatccttttccttatttgccttctactccccttaatctaatctaaaagctctgttccatgcaactggagttccttatccctctcttccccttcccttatatattgaggctatggggtaggagaaaagtgcacaacccaccaccccctttactcgtgcattaaaatttcttatttacccttttcccccttcccatttcttcccactttcatctaccttttctggcaaaaaggagccttttgctctctgtgaccctaagagcacactgcacagggaaaattgccccatccagacctggctccactcttgatctctcttgtcctcttctgctcttttcctggtgctcttttttctcggtggggtgtgggtaatagaacagccgtgggcttttggggacctttaacttttttttctctcttttgtttataaaaaacactaaacattcaattccagagaaccaaaaatcccaccttcccaccgaacactactaaggggcttgtgttctgctccataccttttctcttttctttctgtcttgttaatgcttttaaaaacaaatgagttttttatataaataaagtttttaaagtgtgtatgtggggggtctgtgtcatttcttcacttcaagctgttatttcttccctgctttgcatctttgttacttccttatgtatcagtgtcctttccagagcaaccagaaggaggttataccaggatttattttgagctcagccccaactctttatcaagcaacattcttgttaactatatgtgaaacattttttcttctgaagattcttaaaaattgaatgtggctgaagttgaacatgggagcttattgctaatttagagataggaaactgaagcataaagaattaatgacttactttaattactggaattcttctgcaacatttgacaaaactaaccttgaataaggcccactgtaatacgtagctctcttaaatataacacttaggactagaagattagaaactaccaatcccaactacgtaataggaaaatgtaggatcaaaaggcccatgtatataagtactgaccactgggccataatgttgcttctcaggctatatgcagtcctttagtcagaagtcaataggcctatttattaatattttacagaccatattacctggattaccagggactatctttgctgcagagatcaagggttaagatctatgggaagatacttatttttctgaggtccttatgtcctgtcatataattaaagactcaagagaatttatgtgaaatgctttctgtatgcccaaatctttagattaaaattatatagctgctcct

SEQ ID NO: 114934 - DNA, 4966 bp, Homo sapiens
  Payload ID: 2444
  Gene Symbol: CTNND1
  Gene Name: catenin (cadherin-associated protein), delta 1
  Uniprot ID: O60716
  ENST ID: ENST00000526772
  CDS Start-End: 264-2096
ctgccagatcagtttgtcaccacccaggctcccttgcctttggctgggtgcaacttccattttaggtgttggatctgagggggaaaaaaaagagagagggagagagagagaaagaagagcaggaaagatcccgaaaggaggaagaggtggcgaaaaatcaactgccctgctggatttgtctttctcagcaccttggcgaagccttgggtttctttcttaaaggactgatttttagaactccacatttgaggagctatgaagacatgattggtgaggaggtgccatcggatcaatactactgggctcctttggcccagcatgagcgaggaagtttagcaagcttggatagcctgcgcaaaggagggcctccacctcctaattggagacagccagagctgccagaggtgatcgccatgcttggattccgcttggatgctgtcaagtccaatgcagctgcatacctgcaacacttatgctaccgcaatgacaaggtgaagactgacgtgcggaagctcaagggcatcccagtactggtgggattgttagaccatcccaaaaaggaagtgcaccttggagcctgtggagctctcaagaatatctcttttggacgtgaccaggataacaagattgccataaaaaactgtgatggtgtgcctgcccttgtgcgattgcttcgaaaggctcgtgatatggaccttactgaagttattaccggaaccctgtggaatctttcatcccatgactcaatcaaaatggagattgtggaccatgcactgcatgccttgacagatgaagtgatcattcctcattctggttgggagcgggaacctaatgaagactgtaagccacgccacattgagtgggaatcggtgctcaccaacacagctggctgccttaggaatgtaagctcagagaggagtgaagctcgccggaaacttcgggaatgtgatggtttagttgatgccctcattttcattgttcaggctgagattgggcagaaggattcagacagcaagcttgtagagaactgtgtttgccttcttcggaacttatcatatcaagttcaccgggagatcccacaggcagagcgttaccaagaggcagctcccaatgttgccaacaatactgggccacatgctgccagttgctttggggccaagaagggcaaagggaaaaaacctatagaggatccagcaaacgatacagtggatttccctaaaagaacgagtccagctcgaggctatgagctcttatttcagccagaggtggttcggatatacatctcacttcttaaggagagcaagactcctgccatcctagaagcctcagctggagctatccagaacttgtgtgctgggcgctggacgtatggtcgatacatccgctctgctctgcgtcaagagaaggctctttctgccatagctgacctcctgactaatgaacatgaacgggtggtgaaagctgcatctggagcactgagaaacctggctgtggatgctcgcaacaaagaattaattggtaaacatgctattcctaacttggtaaagaatctgccaggaggacagcagaactcctcttggaatttctctgaggacactgtcatctctattttgaacactatcaacgaggttatcgctgagaacttggaggctgccaaaaagcttcgagagacacagggtattgagaagctggtgttgatcaacaaatcagggaaccgctcagaaaaagaagttcgagcagcagcacttgtattacagacaatctggggatataaggaactgcggaagccactggaaaaagaaggatggaagaaatcagactttcaggtgaatctaaacaatgcttcccgaagccagagcagtcattcatatgatgatagtactctccctctcattgaccggaaccaaaaatcagataagaaacctgatcgggaagaaattcagatgagcaatatgggatcaaacacaaaatcactagataacaactattccacaccaaatgagagaggagaccacaatagaacactggatcgatcgggggatctaggcgacatggagccattgaagggaacaacacccttgatgcagaagatttagcaccactatctccgttccatctgggcttatatgtacttttattttttggtggtgaaattgactgatgattttcctttttcttcgctggactattgtgccaactgccaggctgcctcctgcccttacagccctaagtggctgccttctttccatcaactcccaacttcttcctgtgaagtttaattgtctcaacgcctccccctcccccattccctccatttttctcccaagaaacctgactcaattatttgcatattttgagaaactgctgcagattagttctttttgccagttttccctggaactcctggccttttgtggaggggagggatggagagaataggaatcttcactagaagccgtgggaagaattggaagttacatgctgtatatgcaatgtccagcagtctgataaactgacgattcttaatcaagatttttttcctgatggggaagggacttttattttcttttagagaggggaaagtgtgagctcttcccttattcctaatggctatttttgaagcaaagaaggccagcaacattggcacatgccacctggcaaaggacccttgagtaagtgaaggtctcctaaaactgggattaagaaaccttgctctcctcatctccaaggcagggaccatcaagaacctacagactccatctcttctgcaagcctcatgccaaccctgggctattgctgctgccccttaaacacaggctgtccttaacccacctctcctgccctgtgatatgtctgctgagttggcctggccatttccaagaggctgtagaaaggggagaatgtcaaggaagacttttggtagagaaggagcagaaagatgtgtttttgggaagaagaagacctctaggaggagctagtaggaatgtacatgaagcaattagtctgaaactggcttccccactcccccgtttctccttttcctatccttataggcctgtcccttgcctctgccctggattggttggcaaactaaaggacttgatgtacataactcctgtcccttttcccttacaaggtggggattgcccctggctttgcctcttctttgtgcctttggcctggggtgcatctcctcccgcccttccatgtgcctttctttgcctctgcagtctcatttctcataattttgcaaattatattttgttgctttcttacctactattggccctaaatagcagaaagaagagaagtgaccgagagaacctcagattcttcattgaggattggtatagccatgatttcagtcatagcaagcttttgctcaacagcatatgggtgggattttgcaaaaatcctattctgatgaatctcaaagtaaggctggtaagagaagtgagtggtgtgactcttactccttaggtgcccagaatttaccatcatctctgaaggagttacagggaagtggtctccccaattctcccctccctccagtattgccccctctcactttagcatatattaattagcaggttgggctagagaaatcagctgctatgcgggttgattattattattatttctaatccttttccttatttgccttctactccccttaatctaatctaaaagctctgttccatgcaactggagttccttatccctctcttccccttcccttatatattgaggctatggggtaggagaaaagtgcacaacccaccaccccctttactcgtgcattaaaatttcttatttacccttttcccccttcccatttcttcccactttcatctaccttttctggcaaaaaggagccttttgctctctgtgaccctaagagcacactgcacagggaaaattgccccatccagacctggctccactcttgatctctcttgtcctcttctgctcttttcctggtgctcttttttctcggtggggtgtgggtaatagaacagccgtgggcttttggggacctttaacttttttttctctcttttgtttataaaaaacactaaacattcaattccagagaaccaaaaatcccaccttcccaccgaacactactaaggggcttgtgttctgctccataccttttctcttttctttctgtcttgttaatgcttttaaaaacaaatgagttttttatataaataaagtttttaaagtgtgtatgtggggggtctgtgtcatttcttcacttcaagctgttatttcttccctgctttgcatctttgttacttccttatgtatcagtgtcctttccagagcaaccagaaggaggttataccaggatttattttgagctcagccccaactctttatcaagcaacattcttgttaactatatgtgaaacattttttcttctgaagattcttaaaaattgaatgtggctgaagttgaacatgggagcttattgctaatttagagataggaaactgaagcataaagaattaatgacttactttaattactggaattcttctgcaacatttgacaaaactaaccttgaataaggcccactgtaatacgtagctctcttaaatataacacttaggactagaagattagaaactaccaatcccaactacgtaataggaaaatgtaggatcaaaaggcccatgtatataagtactgaccactgggccataatgttgcttctcaggctatatgcagtcctttagtcagaagtcaataggcctatttattaatattttacagaccatattacctggattaccagggactatctttgctgcagagatcaagggttaagatctatgggaagatacttatttttctgaggtccttatgtcctgtcatataattaaagactcaagagaatttatgtgaaatgctttctgtatgcccaaatctttagattaaaattatatagctgctcct

SEQ ID NO: 114935 - DNA, 6012 bp, Homo sapiens
  Payload ID: 2444
  Gene Symbol: CTNND1
  Gene Name: catenin (cadherin-associated protein), delta 1
  Uniprot ID: O60716
  ENST ID: ENST00000532844
  CDS Start-End: 398-3142
ctgccagatcagtttgtcaccacccaggctcccttgcctttggctgggtgcaacttccattttaggtgttggatctgagggggaaaaaaaagagagagggagagagagagaaagaagagcaggaaagatcccgaaaggaggaagaggtggcgaaaaatcaactgccctgctggatttgtctttctcagcaccttggcgaagccttgggtttctttcttaaaggactgatttttagaactccacatttgaggtggagtcgaccgccagcatcttggcctctgtgaaggaacaagaggcccagtttgagaagctgacccgggcgctggaggaggaacggcgccacgtctcggcgcagctggaacgcgtccgggtctcaccacaagatgccaacccactcatggccaacggcacactcacccgccggcatcagaacggccggtttgtgggcgatgctgaccttgaaagacagaaattttcagatttgaaactcaacggaccccaggatcacagtcaccttctatatagcaccatccccaggatgcaggagccggggcagattgtggagacctacacggaggaggatcctgagggagccatgtctgtagtctctgtggagacctcagatgatgggaccactcggcgcacagagaccacggtcaagaaagtagtgaagactgtgacaacacggacagtacagccagtcgctatgggaccagacgggttgcctgtggatgcttcatcagtttctaacaactatatccagactttgggtcgtgatttccgcaagaatggcaatgggggacctggtccctatgtggggcaagctggcactgctacccttcctaggaacttccactaccctcctgatggttatagtcgccactatgaagatggttatccaggtggcagtgataactatggcagtctgtcccgggtgacccgcattgaggagcggtataggcccagcatggaaggctaccgggcacctagtagacaggatgtgtatgggccccaaccccaggttcgggtaggtgggagcagcgtggatctgcatcgctttcatccagagccttatgggctagaggatgaccagcgtagtatgggctatgatgacctggattatggtatgatgtctgattatggcactgcccgtcggactgggacaccctctgaccctcgtcggcgcctcaggagctatgaagacatgattggtgaggaggtgccatcggatcaatactactgggctcctttggcccagcatgagcgaggaagtttagcaagcttggatagcctgcgcaaaggagggcctccacctcctaattggagacagccagagctgccagaggtgatcgccatgcttggattccgcttggatgctgtcaagtccaatgcagctgcatacctgcaacacttatgctaccgcaatgacaaggtgaagactgacgtgcggaagctcaagggcatcccagtactggtgggattgttagaccatcccaaaaaggaagtgcaccttggagcctgtggagctctcaagaatatctcttttggacgtgaccaggataacaagattgccataaaaaactgtgatggtgtgcctgcccttgtgcgattgcttcgaaaggctcgtgatatggaccttactgaagttattaccggaaccctgtggaatctttcatcccatgactcaatcaaaatggagattgtggaccatgcactgcatgccttgacagatgaagtgatcattcctcattctggttgggagcgggaacctaatgaagactgtaagccacgccacattgagtgggaatcggtgctcaccaacacagctggctgccttaggaatgtaagctcagagaggagtgaagctcgccggaaacttcgggaatgtgatggtttagttgatgccctcattttcattgttcaggctgagattgggcagaaggattcagacagcaagcttgtagagaactgtgtttgccttcttcggaacttatcatatcaagttcaccgggagatcccacaggcagagcgttaccaagaggcagctcccaatgttgccaacaatactgggccacatgctgccagttgctttggggccaagaagggcaaagatgagtggttctccagagggaaaaaacctatagaggatccagcaaacgatacagtggatttccctaaaagaacgagtccagctcgaggctatgagctcttatttcagccagaggtggttcggatatacatctcacttcttaaggagagcaagactcctgccatcctagaagcctcagctggagctatccagaacttgtgtgctgggcgctggacgtatggtcgatacatccgctctgctctgcgtcaagagaaggctctttctgccatagctgacctcctgactaatgaacatgaacgggtggtgaaagctgcatctggagcactgagaaacctggctgtggatgctcgcaacaaagaattaattggtaaacatgctattcctaacttggtaaagaatctgccaggaggacagcagaactcctcttggaatttctctgaggacactgtcatctctattttgaacactatcaacgaggttatcgctgagaacttggaggctgccaaaaagcttcgagagacacagggtattgagaagctggtgttgatcaacaaatcagggaaccgctcagaaaaagaagttcgagcagcagcacttgtattacagacaatctggggatataaggaactgcggaagccactggaaaaagaaggatggaagaaatcagactttcaggtgaatctaaacaatgcttcccgaagccagagcagtcattcatatgatgatagtactctccctctcattgaccggaaccaaaaatcagataagaaacctgatcgggaagaaattcagatgagcaatatgggatcaaacacaaaatcactagataacaactattccacaccaaatgagagaggagaccacaatagaacactggatcgatcgggggatctaggcgacatggagccattgaagggaacaacacccttgatgcaggacgaggggcaggaatctctggaggaagagttggatgtgttggttttggatgatgaggggggccaagtgtcttacccctccatgcagaagatttagcaccactatctccgttccatctgggcttatatgtacttttattttttggtggtgaaattgactgatgattttcctttttcttcgctggactattgtgccaactgccaggctgcctcctgcccttacagccctaagtggctgccttctttccatcaactcccaacttcttcctgtgaagtttaattgtctcaacgcctccccctcccccattccctccatttttctcccaagaaacctgactcaattatttgcatattttgagaaactgctgcagattagttctttttgccagttttccctggaactcctggccttttgtggaggggagggatggagagaataggaatcttcactagaagccgtgggaagaattggaagttacatgctgtatatgcaatgtccagcagtctgataaactgacgattcttaatcaagatttttttcctgatggggaagggacttttattttcttttagagaggggaaagtgtgagctcttcccttattcctaatggctatttttgaagcaaagaaggccagcaacattggcacatgccacctggcaaaggacccttgagtaagtgaaggtctcctaaaactgggattaagaaaccttgctctcctcatctccaaggcagggaccatcaagaacctacagactccatctcttctgcaagcctcatgccaaccctgggctattgctgctgccccttaaacacaggctgtccttaacccacctctcctgccctgtgatatgtctgctgagttggcctggccatttccaagaggctgtagaaaggggagaatgtcaaggaagacttttggtagagaaggagcagaaagatgtgtttttgggaagaagaagacctctaggaggagctagtaggaatgtacatgaagcaattagtctgaaactggcttccccactcccccgtttctccttttcctatccttataggcctgtcccttgcctctgccctggattggttggcaaactaaaggacttgatgtacataactcctgtcccttttcccttacaaggtggggattgcccctggctttgcctcttctttgtgcctttggcctggggtgcatctcctcccgcccttccatgtgcctttctttgcctctgcagtctcatttctcataattttgcaaattatattttgttgctttcttacctactattggccctaaatagcagaaagaagagaagtgaccgagagaacctcagattcttcattgaggattggtatagccatgatttcagtcatagcaagcttttgctcaacagcatatgggtgggattttgcaaaaatcctattctgatgaatctcaaagtaaggctggtaagagaagtgagtggtgtgactcttactccttaggtgcccagaatttaccatcatctctgaaggagttacagggaagtggtctccccaattctcccctccctccagtattgccccctctcactttagcatatattaattagcaggttgggctagagaaatcagctgctatgcgggttgattattattattatttctaatccttttccttatttgccttctactccccttaatctaatctaaaagctctgttccatgcaactggagttccttatccctctcttccccttcccttatatattgaggctatggggtaggagaaaagtgcacaacccaccaccccctttactcgtgcattaaaatttcttatttacccttttcccccttcccatttcttcccactttcatctaccttttctggcaaaaaggagccttttgctctctgtgaccctaagagcacactgcacagggaaaattgccccatccagacctggctccactcttgatctctcttgtcctcttctgctcttttcctggtgctcttttttctcggtggggtgtgggtaatagaacagccgtgggcttttggggacctttaacttttttttctctcttttgtttataaaaaacactaaacattcaattccagagaaccaaaaatcccaccttcccaccgaacactactaaggggcttgtgttctgctccataccttttctcttttctttctgtcttgttaatgcttttaaaaacaaatgagttttttatataaataaagtttttaaagtgtgtatgtggggggtctgtgtcatttcttcacttcaagctgttatttcttccctgctttgcatctttgttacttccttatgtatcagtgtcctttccagagcaaccagaaggaggttataccaggatttattttgagctcagccccaactctttatcaagcaacattcttgttaactatatgtgaaacattttttcttctgaagattcttaaaaattgaatgtggctgaagttgaacatgggagcttattgctaatttagagataggaaactgaagcataaagaattaatgacttactttaattactggaattcttctgcaacatttgacaaaactaaccttgaataaggcccactgtaatacgtagctctcttaaatataacacttaggactagaagattagaaactaccaatcccaactacgtaataggaaaatgtaggatcaaaaggcccatgtatataagtactgaccactgggccataatgttgcttctcaggctatatgcagtcctttagtcagaagtcaataggcctatttattaatattttacagaccatattacctggattaccagggactatctttgctgcagagatcaagggttaagatctatgggaagatacttatttttctgaggtccttatgtcctgtcatataattaaagactcaagagaatttatgtgaaatgctttctgtatgcccaaatctttagattaaaattatatagctgctcct

SEQ ID NO: 114936 - DNA, 5994 bp, Homo sapiens
  Payload ID: 2444
  Gene Symbol: CTNND1
  Gene Name: catenin (cadherin-associated protein), delta 1
  Uniprot ID: O60716
  ENST ID: ENST00000526357
  CDS Start-End: 398-3124
ctgccagatcagtttgtcaccacccaggctcccttgcctttggctgggtgcaacttccattttaggtgttggatctgagggggaaaaaaaagagagagggagagagagagaaagaagagcaggaaagatcccgaaaggaggaagaggtggcgaaaaatcaactgccctgctggatttgtctttctcagcaccttggcgaagccttgggtttctttcttaaaggactgatttttagaactccacatttgaggtggagtcgaccgccagcatcttggcctctgtgaaggaacaagaggcccagtttgagaagctgacccgggcgctggaggaggaacggcgccacgtctcggcgcagctggaacgcgtccgggtctcaccacaagatgccaacccactcatggccaacggcacactcacccgccggcatcagaacggccggtttgtgggcgatgctgaccttgaaagacagaaattttcagatttgaaactcaacggaccccaggatcacagtcaccttctatatagcaccatccccaggatgcaggagccggggcagattgtggagacctacacggaggaggatcctgagggagccatgtctgtagtctctgtggagacctcagatgatgggaccactcggcgcacagagaccacggtcaagaaagtagtgaagactgtgacaacacggacagtacagccagtcgctatgggaccagacgggttgcctgtggatgcttcatcagtttctaacaactatatccagactttgggtcgtgatttccgcaagaatggcaatgggggacctggtccctatgtggggcaagctggcactgctacccttcctaggaacttccactaccctcctgatggttatagtcgccactatgaagatggttatccaggtggcagtgataactatggcagtctgtcccgggtgacccgcattgaggagcggtataggcccagcatggaaggctaccgggcacctagtagacaggatgtgtatgggccccaaccccaggttcgggtaggtgggagcagcgtggatctgcatcgctttcatccagagccttatgggctagaggatgaccagcgtagtatgggctatgatgacctggattatggtatgatgtctgattatggcactgcccgtcggactgggacaccctctgaccctcgtcggcgcctcaggagctatgaagacatgattggtgaggaggtgccatcggatcaatactactgggctcctttggcccagcatgagcgaggaagtttagcaagcttggatagcctgcgcaaaggagggcctccacctcctaattggagacagccagagctgccagaggtgatcgccatgcttggattccgcttggatgctgtcaagtccaatgcagctgcatacctgcaacacttatgctaccgcaatgacaaggtgaagactgacgtgcggaagctcaagggcatcccagtactggtgggattgttagaccatcccaaaaaggaagtgcaccttggagcctgtggagctctcaagaatatctcttttggacgtgaccaggataacaagattgccataaaaaactgtgatggtgtgcctgcccttgtgcgattgcttcgaaaggctcgtgatatggaccttactgaagttattaccggaaccctgtggaatctttcatcccatgactcaatcaaaatggagattgtggaccatgcactgcatgccttgacagatgaagtgatcattcctcattctggttgggagcgggaacctaatgaagactgtaagccacgccacattgagtgggaatcggtgctcaccaacacagctggctgccttaggaatgtaagctcagagaggagtgaagctcgccggaaacttcgggaatgtgatggtttagttgatgccctcattttcattgttcaggctgagattgggcagaaggattcagacagcaagcttgtagagaactgtgtttgccttcttcggaacttatcatatcaagttcaccgggagatcccacaggcagagcgttaccaagaggcagctcccaatgttgccaacaatactgggccacatgctgccagttgctttggggccaagaagggcaaagggaaaaaacctatagaggatccagcaaacgatacagtggatttccctaaaagaacgagtccagctcgaggctatgagctcttatttcagccagaggtggttcggatatacatctcacttcttaaggagagcaagactcctgccatcctagaagcctcagctggagctatccagaacttgtgtgctgggcgctggacgtatggtcgatacatccgctctgctctgcgtcaagagaaggctctttctgccatagctgacctcctgactaatgaacatgaacgggtggtgaaagctgcatctggagcactgagaaacctggctgtggatgctcgcaacaaagaattaattggtaaacatgctattcctaacttggtaaagaatctgccaggaggacagcagaactcctcttggaatttctctgaggacactgtcatctctattttgaacactatcaacgaggttatcgctgagaacttggaggctgccaaaaagcttcgagagacacagggtattgagaagctggtgttgatcaacaaatcagggaaccgctcagaaaaagaagttcgagcagcagcacttgtattacagacaatctggggatataaggaactgcggaagccactggaaaaagaaggatggaagaaatcagactttcaggtgaatctaaacaatgcttcccgaagccagagcagtcattcatatgatgatagtactctccctctcattgaccggaaccaaaaatcagataagaaacctgatcgggaagaaattcagatgagcaatatgggatcaaacacaaaatcactagataacaactattccacaccaaatgagagaggagaccacaatagaacactggatcgatcgggggatctaggcgacatggagccattgaagggaacaacacccttgatgcaggacgaggggcaggaatctctggaggaagagttggatgtgttggttttggatgatgaggggggccaagtgtcttacccctccatgcagaagatttagcaccactatctccgttccatctgggcttatatgtacttttattttttggtggtgaaattgactgatgattttcctttttcttcgctggactattgtgccaactgccaggctgcctcctgcccttacagccctaagtggctgccttctttccatcaactcccaacttcttcctgtgaagtttaattgtctcaacgcctccccctcccccattccctccatttttctcccaagaaacctgactcaattatttgcatattttgagaaactgctgcagattagttctttttgccagttttccctggaactcctggccttttgtggaggggagggatggagagaataggaatcttcactagaagccgtgggaagaattggaagttacatgctgtatatgcaatgtccagcagtctgataaactgacgattcttaatcaagatttttttcctgatggggaagggacttttattttcttttagagaggggaaagtgtgagctcttcccttattcctaatggctatttttgaagcaaagaaggccagcaacattggcacatgccacctggcaaaggacccttgagtaagtgaaggtctcctaaaactgggattaagaaaccttgctctcctcatctccaaggcagggaccatcaagaacctacagactccatctcttctgcaagcctcatgccaaccctgggctattgctgctgccccttaaacacaggctgtccttaacccacctctcctgccctgtgatatgtctgctgagttggcctggccatttccaagaggctgtagaaaggggagaatgtcaaggaagacttttggtagagaaggagcagaaagatgtgtttttgggaagaagaagacctctaggaggagctagtaggaatgtacatgaagcaattagtctgaaactggcttccccactcccccgtttctccttttcctatccttataggcctgtcccttgcctctgccctggattggttggcaaactaaaggacttgatgtacataactcctgtcccttttcccttacaaggtggggattgcccctggctttgcctcttctttgtgcctttggcctggggtgcatctcctcccgcccttccatgtgcctttctttgcctctgcagtctcatttctcataattttgcaaattatattttgttgctttcttacctactattggccctaaatagcagaaagaagagaagtgaccgagagaacctcagattcttcattgaggattggtatagccatgatttcagtcatagcaagcttttgctcaacagcatatgggtgggattttgcaaaaatcctattctgatgaatctcaaagtaaggctggtaagagaagtgagtggtgtgactcttactccttaggtgcccagaatttaccatcatctctgaaggagttacagggaagtggtctccccaattctcccctccctccagtattgccccctctcactttagcatatattaattagcaggttgggctagagaaatcagctgctatgcgggttgattattattattatttctaatccttttccttatttgccttctactccccttaatctaatctaaaagctctgttccatgcaactggagttccttatccctctcttccccttcccttatatattgaggctatggggtaggagaaaagtgcacaacccaccaccccctttactcgtgcattaaaatttcttatttacccttttcccccttcccatttcttcccactttcatctaccttttctggcaaaaaggagccttttgctctctgtgaccctaagagcacactgcacagggaaaattgccccatccagacctggctccactcttgatctctcttgtcctcttctgctcttttcctggtgctcttttttctcggtggggtgtgggtaatagaacagccgtgggcttttggggacctttaacttttttttctctcttttgtttataaaaaacactaaacattcaattccagagaaccaaaaatcccaccttcccaccgaacactactaaggggcttgtgttctgctccataccttttctcttttctttctgtcttgttaatgcttttaaaaacaaatgagttttttatataaataaagtttttaaagtgtgtatgtggggggtctgtgtcatttcttcacttcaagctgttatttcttccctgctttgcatctttgttacttccttatgtatcagtgtcctttccagagcaaccagaaggaggttataccaggatttattttgagctcagccccaactctttatcaagcaacattcttgttaactatatgtgaaacattttttcttctgaagattcttaaaaattgaatgtggctgaagttgaacatgggagcttattgctaatttagagataggaaactgaagcataaagaattaatgacttactttaattactggaattcttctgcaacatttgacaaaactaaccttgaataaggcccactgtaatacgtagctctcttaaatataacacttaggactagaagattagaaactaccaatcccaactacgtaataggaaaatgtaggatcaaaaggcccatgtatataagtactgaccactgggccataatgttgcttctcaggctatatgcagtcctttagtcagaagtcaataggcctatttattaatattttacagaccatattacctggattaccagggactatctttgctgcagagatcaagggttaagatctatgggaagatacttatttttctgaggtccttatgtcctgtcatataattaaagactcaagagaatttatgtgaaatgctttctgtatgcccaaatctttagattaaaattatatagctgctcct

SEQ ID NO: 114937 - DNA, 5655 bp, Homo sapiens
  Payload ID: 2444
  Gene Symbol: CTNND1
  Gene Name: catenin (cadherin-associated protein), delta 1
  Uniprot ID: O60716
  ENST ID: ENST00000532245
  CDS Start-End: 287-2785
ctgccagatcagtttgtcaccacccaggctcccttgcctttggctgggtgcaacttccattttaggtgttggatctgagggggaaaaaaaagagagagggagagagagagaaagaagagcaggaaagatcccgaaaggaggaagaggtggcgaaaaatcaactgccctgctggatttgtctttctcagcaccttggcgaagccttgggtttctttcttaaaggactgatttttagaactccacatttgaggatcacagtcaccttctatatagcaccatccccaggatgcaggagccggggcagattgtggagacctacacggaggaggatcctgagggagccatgtctgtagtctctgtggagacctcagatgatgggaccactcggcgcacagagaccacggtcaagaaagtagtgaagactgtgacaacacggacagtacagccagtcgctatgggaccagacgggttgcctgtggatgcttcatcagtttctaacaactatatccagactttgggtcgtgatttccgcaagaatggcaatgggggacctggtccctatgtggggcaagctggcactgctacccttcctaggaacttccactaccctcctgatggttatagtcgccactatgaagatggttatccaggtggcagtgataactatggcagtctgtcccgggtgacccgcattgaggagcggtataggcccagcatggaaggctaccgggcacctagtagacaggatgtgtatgggccccaaccccaggttcgggtaggtgggagcagcgtggatctgcatcgctttcatccagagccttatgggctagaggatgaccagcgtagtatgggctatgatgacctggattatggtatgatgtctgattatggcactgcccgtcggactgggacaccctctgaccctcgtcggcgcctcaggagctatgaagacatgattggtgaggaggtgccatcggatcaatactactgggctcctttggcccagcatgagcgaggaagtttagcaagcttggatagcctgcgcaaaggagggcctccacctcctaattggagacagccagagctgccagaggtgatcgccatgcttggattccgcttggatgctgtcaagtccaatgcagctgcatacctgcaacacttatgctaccgcaatgacaaggtgaagactgacgtgcggaagctcaagggcatcccagtactggtgggattgttagaccatcccaaaaaggaagtgcaccttggagcctgtggagctctcaagaatatctcttttggacgtgaccaggataacaagattgccataaaaaactgtgatggtgtgcctgcccttgtgcgattgcttcgaaaggctcgtgatatggaccttactgaagttattaccggaaccctgtggaatctttcatcccatgactcaatcaaaatggagattgtggaccatgcactgcatgccttgacagatgaagtgatcattcctcattctggttgggagcgggaacctaatgaagactgtaagccacgccacattgagtgggaatcggtgctcaccaacacagctggctgccttaggaatgtaagctcagagaggagtgaagctcgccggaaacttcgggaatgtgatggtttagttgatgccctcattttcattgttcaggctgagattgggcagaaggattcagacagcaagcttgtagagaactgtgtttgccttcttcggaacttatcatatcaagttcaccgggagatcccacaggcagagcgttaccaagaggcagctcccaatgttgccaacaatactgggccacatgctgccagttgctttggggccaagaagggcaaagggaaaaaacctatagaggatccagcaaacgatacagtggatttccctaaaagaacgagtccagctcgaggctatgagctcttatttcagccagaggtggttcggatatacatctcacttcttaaggagagcaagactcctgccatcctagaagcctcagctggagctatccagaacttgtgtgctgggcgctggacgtatggtcgatacatccgctctgctctgcgtcaagagaaggctctttctgccatagctgacctcctgactaatgaacatgaacgggtggtgaaagctgcatctggagcactgagaaacctggctgtggatgctcgcaacaaagaattaattggtaaacatgctattcctaacttggtaaagaatctgccaggaggacagcagaactcctcttggaatttctctgaggacactgtcatctctattttgaacactatcaacgaggttatcgctgagaacttggaggctgccaaaaagcttcgagagacacagggtattgagaagctggtgttgatcaacaaatcagggaaccgctcagaaaaagaagttcgagcagcagcacttgtattacagacaatctggggatataaggaactgcggaagccactggaaaaagaaggatggaagaaatcagactttcaggtgaatctaaacaatgcttcccgaagccagagcagtcattcatatgatgatagtactctccctctcattgaccggaaccaaaaatcagataagaaacctgatcgggaagaaattcagatgagcaatatgggatcaaacacaaaatcactagataacaactattccacaccaaatgagagaggagaccacaatagaacactggatcgatcgggggatctaggcgacatggagccattgaagggaacaacacccttgatgcagaagatttagcaccactatctccgttccatctgggcttatatgtacttttattttttggtggtgaaattgactgatgattttcctttttcttcgctggactattgtgccaactgccaggctgcctcctgcccttacagccctaagtggctgccttctttccatcaactcccaacttcttcctgtgaagtttaattgtctcaacgcctccccctcccccattccctccatttttctcccaagaaacctgactcaattatttgcatattttgagaaactgctgcagattagttctttttgccagttttccctggaactcctggccttttgtggaggggagggatggagagaataggaatcttcactagaagccgtgggaagaattggaagttacatgctgtatatgcaatgtccagcagtctgataaactgacgattcttaatcaagatttttttcctgatggggaagggacttttattttcttttagagaggggaaagtgtgagctcttcccttattcctaatggctatttttgaagcaaagaaggccagcaacattggcacatgccacctggcaaaggacccttgagtaagtgaaggtctcctaaaactgggattaagaaaccttgctctcctcatctccaaggcagggaccatcaagaacctacagactccatctcttctgcaagcctcatgccaaccctgggctattgctgctgccccttaaacacaggctgtccttaacccacctctcctgccctgtgatatgtctgctgagttggcctggccatttccaagaggctgtagaaaggggagaatgtcaaggaagacttttggtagagaaggagcagaaagatgtgtttttgggaagaagaagacctctaggaggagctagtaggaatgtacatgaagcaattagtctgaaactggcttccccactcccccgtttctccttttcctatccttataggcctgtcccttgcctctgccctggattggttggcaaactaaaggacttgatgtacataactcctgtcccttttcccttacaaggtggggattgcccctggctttgcctcttctttgtgcctttggcctggggtgcatctcctcccgcccttccatgtgcctttctttgcctctgcagtctcatttctcataattttgcaaattatattttgttgctttcttacctactattggccctaaatagcagaaagaagagaagtgaccgagagaacctcagattcttcattgaggattggtatagccatgatttcagtcatagcaagcttttgctcaacagcatatgggtgggattttgcaaaaatcctattctgatgaatctcaaagtaaggctggtaagagaagtgagtggtgtgactcttactccttaggtgcccagaatttaccatcatctctgaaggagttacagggaagtggtctccccaattctcccctccctccagtattgccccctctcactttagcatatattaattagcaggttgggctagagaaatcagctgctatgcgggttgattattattattatttctaatccttttccttatttgccttctactccccttaatctaatctaaaagctctgttccatgcaactggagttccttatccctctcttccccttcccttatatattgaggctatggggtaggagaaaagtgcacaacccaccaccccctttactcgtgcattaaaatttcttatttacccttttcccccttcccatttcttcccactttcatctaccttttctggcaaaaaggagccttttgctctctgtgaccctaagagcacactgcacagggaaaattgccccatccagacctggctccactcttgatctctcttgtcctcttctgctcttttcctggtgctcttttttctcggtggggtgtgggtaatagaacagccgtgggcttttggggacctttaacttttttttctctcttttgtttataaaaaacactaaacattcaattccagagaaccaaaaatcccaccttcccaccgaacactactaaggggcttgtgttctgctccataccttttctcttttctttctgtcttgttaatgcttttaaaaacaaatgagttttttatataaataaagtttttaaagtgtgtatgtggggggtctgtgtcatttcttcacttcaagctgttatttcttccctgctttgcatctttgttacttccttatgtatcagtgtcctttccagagcaaccagaaggaggttataccaggatttattttgagctcagccccaactctttatcaagcaacattcttgttaactatatgtgaaacattttttcttctgaagattcttaaaaattgaatgtggctgaagttgaacatgggagcttattgctaatttagagataggaaactgaagcataaagaattaatgacttactttaattactggaattcttctgcaacatttgacaaaactaaccttgaataaggcccactgtaatacgtagctctcttaaatataacacttaggactagaagattagaaactaccaatcccaactacgtaataggaaaatgtaggatcaaaaggcccatgtatataagtactgaccactgggccataatgttgcttctcaggctatatgcagtcctttagtcagaagtcaataggcctatttattaatattttacagaccatattacctggattaccagggactatctttgctgcagagatcaagggttaagatctatgggaagatacttatttttctgaggtccttatgtcctgtcatataattaaagactcaagagaatttatgtgaaatgctttctgtatgcccaaatctttagattaaaattatatagctgctcct

SEQ ID NO: 114938 - DNA, 866 bp, Homo sapiens
  Payload ID: 2444
  Gene Symbol: CTNND1
  Gene Name: catenin (cadherin-associated protein), delta 1
  ENST ID: ENST00000534647
  CDS Start-End: 83-866
ccgggcgctggaggaggaacggcgccacgtctcggcgcagctggaacgcgtccgggtctcaccacaagatgccaacccactcatggccaacggcacactcacccgccggcatcaggatcacagtcaccttctatatagcaccatccccaggatgcaggagccggggcagattgtggagacctacacggaggaggatcctgagggagccatgtctgtagtctctgtggagacctcagatgatgggaccactcggcgcacagagaccacggtcaagaaagtagtgaagactgtgacaacacggacagtacagccagtcgctatgggaccagacgggttgcctgtggatgcttcatcagtttctaacaactatatccagactttgggtcgtgatttccgcaagaatggcaatgggggacctggtccctatgtggggcaagctggcactgctacccttcctaggaacttccactaccctcctgatggttatagtcgccactatgaagatggttatccaggtggcagtgataactatggcagtctgtcccgggtgacccgcattgaggagcggtataggcccagcatggaaggctaccgggcacctagtagacaggatgtgtatgggccccaaccccaggttcgggtaggtgggagcagcgtggatctgcatcgctttcatccagagccttatgggctagaggatgaccagcgtagtatgggctatgatgacctggattatggtatgatgtctgattatggcactgcccgtcggactgggacaccctctgaccctcgtcggcgcctcaggagctatgaagacatgattggtgaggaggtgccatcggatcaatactactgggctcctttgg

SEQ ID NO: 114939 - DNA, 4984 bp, Homo sapiens
  Payload ID: 2444
  Gene Symbol: CTNND1
  Gene Name: catenin (cadherin-associated protein), delta 1
  Uniprot ID: O60716
  ENST ID: ENST00000525902
  CDS Start-End: 264-2114
ctgccagatcagtttgtcaccacccaggctcccttgcctttggctgggtgcaacttccattttaggtgttggatctgagggggaaaaaaaagagagagggagagagagagaaagaagagcaggaaagatcccgaaaggaggaagaggtggcgaaaaatcaactgccctgctggatttgtctttctcagcaccttggcgaagccttgggtttctttcttaaaggactgatttttagaactccacatttgaggagctatgaagacatgattggtgaggaggtgccatcggatcaatactactgggctcctttggcccagcatgagcgaggaagtttagcaagcttggatagcctgcgcaaaggagggcctccacctcctaattggagacagccagagctgccagaggtgatcgccatgcttggattccgcttggatgctgtcaagtccaatgcagctgcatacctgcaacacttatgctaccgcaatgacaaggtgaagactgacgtgcggaagctcaagggcatcccagtactggtgggattgttagaccatcccaaaaaggaagtgcaccttggagcctgtggagctctcaagaatatctcttttggacgtgaccaggataacaagattgccataaaaaactgtgatggtgtgcctgcccttgtgcgattgcttcgaaaggctcgtgatatggaccttactgaagttattaccggaaccctgtggaatctttcatcccatgactcaatcaaaatggagattgtggaccatgcactgcatgccttgacagatgaagtgatcattcctcattctggttgggagcgggaacctaatgaagactgtaagccacgccacattgagtgggaatcggtgctcaccaacacagctggctgccttaggaatgtaagctcagagaggagtgaagctcgccggaaacttcgggaatgtgatggtttagttgatgccctcattttcattgttcaggctgagattgggcagaaggattcagacagcaagcttgtagagaactgtgtttgccttcttcggaacttatcatatcaagttcaccgggagatcccacaggcagagcgttaccaagaggcagctcccaatgttgccaacaatactgggccacatgctgccagttgctttggggccaagaagggcaaagatgagtggttctccagagggaaaaaacctatagaggatccagcaaacgatacagtggatttccctaaaagaacgagtccagctcgaggctatgagctcttatttcagccagaggtggttcggatatacatctcacttcttaaggagagcaagactcctgccatcctagaagcctcagctggagctatccagaacttgtgtgctgggcgctggacgtatggtcgatacatccgctctgctctgcgtcaagagaaggctctttctgccatagctgacctcctgactaatgaacatgaacgggtggtgaaagctgcatctggagcactgagaaacctggctgtggatgctcgcaacaaagaattaattggtaaacatgctattcctaacttggtaaagaatctgccaggaggacagcagaactcctcttggaatttctctgaggacactgtcatctctattttgaacactatcaacgaggttatcgctgagaacttggaggctgccaaaaagcttcgagagacacagggtattgagaagctggtgttgatcaacaaatcagggaaccgctcagaaaaagaagttcgagcagcagcacttgtattacagacaatctggggatataaggaactgcggaagccactggaaaaagaaggatggaagaaatcagactttcaggtgaatctaaacaatgcttcccgaagccagagcagtcattcatatgatgatagtactctccctctcattgaccggaaccaaaaatcagataagaaacctgatcgggaagaaattcagatgagcaatatgggatcaaacacaaaatcactagataacaactattccacaccaaatgagagaggagaccacaatagaacactggatcgatcgggggatctaggcgacatggagccattgaagggaacaacacccttgatgcagaagatttagcaccactatctccgttccatctgggcttatatgtacttttattttttggtggtgaaattgactgatgattttcctttttcttcgctggactattgtgccaactgccaggctgcctcctgcccttacagccctaagtggctgccttctttccatcaactcccaacttcttcctgtgaagtttaattgtctcaacgcctccccctcccccattccctccatttttctcccaagaaacctgactcaattatttgcatattttgagaaactgctgcagattagttctttttgccagttttccctggaactcctggccttttgtggaggggagggatggagagaataggaatcttcactagaagccgtgggaagaattggaagttacatgctgtatatgcaatgtccagcagtctgataaactgacgattcttaatcaagatttttttcctgatggggaagggacttttattttcttttagagaggggaaagtgtgagctcttcccttattcctaatggctatttttgaagcaaagaaggccagcaacattggcacatgccacctggcaaaggacccttgagtaagtgaaggtctcctaaaactgggattaagaaaccttgctctcctcatctccaaggcagggaccatcaagaacctacagactccatctcttctgcaagcctcatgccaaccctgggctattgctgctgccccttaaacacaggctgtccttaacccacctctcctgccctgtgatatgtctgctgagttggcctggccatttccaagaggctgtagaaaggggagaatgtcaaggaagacttttggtagagaaggagcagaaagatgtgtttttgggaagaagaagacctctaggaggagctagtaggaatgtacatgaagcaattagtctgaaactggcttccccactcccccgtttctccttttcctatccttataggcctgtcccttgcctctgccctggattggttggcaaactaaaggacttgatgtacataactcctgtcccttttcccttacaaggtggggattgcccctggctttgcctcttctttgtgcctttggcctggggtgcatctcctcccgcccttccatgtgcctttctttgcctctgcagtctcatttctcataattttgcaaattatattttgttgctttcttacctactattggccctaaatagcagaaagaagagaagtgaccgagagaacctcagattcttcattgaggattggtatagccatgatttcagtcatagcaagcttttgctcaacagcatatgggtgggattttgcaaaaatcctattctgatgaatctcaaagtaaggctggtaagagaagtgagtggtgtgactcttactccttaggtgcccagaatttaccatcatctctgaaggagttacagggaagtggtctccccaattctcccctccctccagtattgccccctctcactttagcatatattaattagcaggttgggctagagaaatcagctgctatgcgggttgattattattattatttctaatccttttccttatttgccttctactccccttaatctaatctaaaagctctgttccatgcaactggagttccttatccctctcttccccttcccttatatattgaggctatggggtaggagaaaagtgcacaacccaccaccccctttactcgtgcattaaaatttcttatttacccttttcccccttcccatttcttcccactttcatctaccttttctggcaaaaaggagccttttgctctctgtgaccctaagagcacactgcacagggaaaattgccccatccagacctggctccactcttgatctctcttgtcctcttctgctcttttcctggtgctcttttttctcggtggggtgtgggtaatagaacagccgtgggcttttggggacctttaacttttttttctctcttttgtttataaaaaacactaaacattcaattccagagaaccaaaaatcccaccttcccaccgaacactactaaggggcttgtgttctgctccataccttttctcttttctttctgtcttgttaatgcttttaaaaacaaatgagttttttatataaataaagtttttaaagtgtgtatgtggggggtctgtgtcatttcttcacttcaagctgttatttcttccctgctttgcatctttgttacttccttatgtatcagtgtcctttccagagcaaccagaaggaggttataccaggatttattttgagctcagccccaactctttatcaagcaacattcttgttaactatatgtgaaacattttttcttctgaagattcttaaaaattgaatgtggctgaagttgaacatgggagcttattgctaatttagagataggaaactgaagcataaagaattaatgacttactttaattactggaattcttctgcaacatttgacaaaactaaccttgaataaggcccactgtaatacgtagctctcttaaatataacacttaggactagaagattagaaactaccaatcccaactacgtaataggaaaatgtaggatcaaaaggcccatgtatataagtactgaccactgggccataatgttgcttctcaggctatatgcagtcctttagtcagaagtcaataggcctatttattaatattttacagaccatattacctggattaccagggactatctttgctgcagagatcaagggttaagatctatgggaagatacttatttttctgaggtccttatgtcctgtcatataattaaagactcaagagaatttatgtgaaatgctttctgtatgcccaaatctttagattaaaattatatagctgctcct

SEQ ID NO: 114940 - DNA, 4780 bp, Homo sapiens
  Payload ID: 2444
  Gene Symbol: CTNND1
  Gene Name: catenin (cadherin-associated protein), delta 1
  ENST ID: ENST00000529919
  CDS Start-End: 332-3148
gagggctgagggaagatggctgggctgcaagaggcagggggatgggcccgtcagggaggaattcttgtgaaagccgtcgtctgcctcagcacttgatgaaaacacaccgaaaaagaggctctctccttcctgcttcctccttgctgtggtggctgggatgcttcttccatgattttttgaatctagactgggctgttctctgtgttaaaccaatcagttgcgaccttctcttaacagtgtgaagtgagggggtctctctccctccttctccttcctctgtgattcaccttcctttttaccctgccctgcggcggctccgccccttaccttcatggacgactcagaggtggagtcgaccgccagcatcttggcctctgtgaaggaacaagaggcccagtttgagaagctgacccgggcgctggaggaggaacggcgccacgtctcggcgcagctggaacgcgtccgggtctcaccacaagatgccaacccactcatggccaacggcacactcacccgccggcatcagaacggccggtttgtgggcgatgctgaccttgaaagacagaaattttcagatttgaaactcaacggaccccaggatcacagtcaccttctatatagcaccatccccaggatgcaggagccggggcagattgtggagacctacacggaggaggatcctgagggagccatgtctgtagtctctgtggagacctcagatgatgggaccactcggcgcacagagaccacggtcaagaaagtagtgaagactgtgacaacacggacagtacagccagtcgctatgggaccagacgggttgcctgtggatgcttcatcagtttctaacaactatatccagactttgggtcgtgatttccgcaagaatggcaatgggggacctggtccctatgtggggcaagctggcactgctacccttcctaggaacttccactaccctcctgatggttatagtcgccactatgaagatggttatccaggtggcagtgataactatggcagtctgtcccgggtgacccgcattgaggagcggtataggcccagcatggaaggctaccgggcacctagtagacaggatgtgtatgggccccaaccccaggttcgggtaggtgggagcagcgtggatctgcatcgctttcatccagagccttatgggctagaggatgaccagcgtagtatgggctatgatgacctggattatggtatgatgtctgattatggcactgcccgtcggactgggacaccctctgaccctcgtcggcgcctcaggagctatgaagacatgattggtgaggaggtgccatcggatcaatactactgggctcctttggcccagcatgagcgaggaagtttagcaagcttggatagcctgcgcaaaggagggcctccacctcctaattggagacagccagagctgccagaggtgatcgccatgcttggattccgcttggatgctgtcaagtccaatgcagctgcatacctgcaacacttatgctaccgcaatgacaaggtgaagactgacgtgcggaagctcaagggcatcccagtactggtgggattgttagaccatcccaaaaaggaagtgcaccttggagcctgtggagctctcaagaatatctcttttggacgtgaccaggataacaagattgccataaaaaactgtgatggtgtgcctgcccttgtgcgattgcttcgaaaggctcgtgatatggaccttactgaagttattaccggaaccctgtggaatctttcatcccatgactcaatcaaaatggagattgtggaccatgcactgcatgccttgacagatgaagtgatcattcctcattctggttgggagcgggaacctaatgaagactgtaagccacgccacattgagtgggaatcggtgctcaccaacacagctggctgccttaggaatgtaagctcagagaggagtgaagctcgccggaaacttcgggaatgtgatggtttagttgatgccctcattttcattgttcaggctgagattgggcagaaggattcagacagcaagcttgtagagaactgtgtttgccttcttcggaacttatcatatcaagttcaccgggagatcccacaggcagagcgttaccaagaggcagctcccaatgttgccaacaatactgggccacatgctgccagttgctttggggccaagaagggcaaagatgagtggttctccagagggaaaaaacctatagaggatccagcaaacgatacagtggatttccctaaaagaacgagtccagctcgaggctatgagctcttatttcagccagaggtggttcggatatacatctcacttcttaaggagagcaagactcctgccatcctagaagcctcagctggagctatccagaacttgtgtgctgggcgctggacgtatggtcgatacatccgctctgctctgcgtcaagagaaggctctttctgccatagctgacctcctgactaatgaacatgaacgggtggtgaaagctgcatctggagcactgagaaacctggctgtggatgctcgcaacaaagaattaattggtaaacatgctattcctaacttggtaaagaatctgccaggaggacagcagaactcctcttggaatttctctgaggacactgtcatctctattttgaacactatcaacgaggttatcgctgagaacttggaggctgccaaaaagcttcgagagacacagggtattgagaagctggtgttgatcaacaaatcagggaaccgctcagaaaaagaagttcgagcagcagcacttgtattacagacaatctggggatataaggaactgcggaagccactggaaaaagaaggatggaagaaatcagactttcaggtgaatctaaacaatgcttcccgaagccagagcagtcattcatatgatgatagtactctccctctcattgaccggaaccaaaaatcagataagaaacctgatcgggaagaaattcagatgagcaatatgggatcaaacacaaaatcactagataacaactattccacaccaaatgagagaggagaccacaatagaacactggatcgatcgggggatctaggcgacatggagccattgaagggaacaacacccttgatgaagatttagcaccactatctccgttccatctgggcttatatgtacttttattttttggtggtgaaattgactgatgattttcctttttcttcgctggactattgtgccaactgccaggctgcctcctgcccttacagccctaagtggctgccttctttccatcaactcccaacttcttcctgtgaagtttaattgtctcaacgcctccccctcccccattccctccatttttctcccaagaaacctgactcaattatttgcatattttgagaaactgctgcagattagttctttttgccagttttccctggaactcctggccttttgtggaggggagggatggagagaataggaatcttcactagaagccgtgggaagaattggaagttacatgctgtatatgcaatgtccagcagtctgataaactgacgattcttaatcaagatttttttcctgatggggaagggacttttattttcttttagagaggggaaagtgtgagctcttcccttattcctaatggctatttttgaagcaaagaaggccagcaacattggcacatgccacctggcaaaggacccttgagtaagtgaaggtctcctaaaactgggattaagaaaccttgctctcctcatctccaaggcagggaccatcaagaacctacagactccatctcttctgcaagcctcatgccaaccctgggctattgctgctgccccttaaacacaggctgtccttaacccacctctcctgccctgtgatatgtctgctgagttggcctggccatttccaagaggctgtagaaaggggagaatgtcaaggaagacttttggtagagaaggagcagaaagatgtgtttttgggaagaagaagacctctaggaggagctagtaggaatgtacatgaagcaattagtctgaaactggcttccccactcccccgtttctccttttcctatccttataggcctgtcccttgcctctgccctggattggttggcaaactaaaggacttgatgtacataactcctgtcccttttcccttacaaggtggggattgcccctggctttgcctcttctttgtgcctttggcctggggtgcatctcctcccgcccttccatgtgcctttctttgcctctgcagtctcatttctcataattttgcaaattatattttgttgctttcttacctactattggccctaaatagcagaaagaagagaagtgaccgagagaacctcagattcttcattgaggattggtatagccatgatttcagtcatagcaagcttttgctcaacagcatatgggtgggattttgcaaaaatcctattctgatgaatctcaaagtaaggctggtaagagaagtgagtggtgtgactcttactccttaggtgcccagaatttaccatcatctctgaaggagttacagggaagtggtctccccaattctcccctccctccagtattgccccctctcactttagcatatattaattagcaggttgggctagagaaatcagctgctatgcgggttgattattattattatttctaatccttttccttatttgccttctactccccttaatctaatctaaaagctctgttccatgcaactggagttccttatccctctctt

SEQ ID NO: 114941 - DNA, 5071 bp, Homo sapiens
  Payload ID: 2444
  Gene Symbol: CTNND1
  Gene Name: catenin (cadherin-associated protein), delta 1
  Uniprot ID: O60716
  ENST ID: ENST00000527467
  CDS Start-End: 264-2201
ctgccagatcagtttgtcaccacccaggctcccttgcctttggctgggtgcaacttccattttaggtgttggatctgagggggaaaaaaaagagagagggagagagagagaaagaagagcaggaaagatcccgaaaggaggaagaggtggcgaaaaatcaactgccctgctggatttgtctttctcagcaccttggcgaagccttgggtttctttcttaaaggactgatttttagaactccacatttgaggagctatgaagacatgattggtgaggaggtgccatcggatcaatactactgggctcctttggcccagcatgagcgaggaagtttagcaagcttggatagcctgcgcaaaggagggcctccacctcctaattggagacagccagagctgccagaggtgatcgccatgcttggattccgcttggatgctgtcaagtccaatgcagctgcatacctgcaacacttatgctaccgcaatgacaaggtgaagactgacgtgcggaagctcaagggcatcccagtactggtgggattgttagaccatcccaaaaaggaagtgcaccttggagcctgtggagctctcaagaatatctcttttggacgtgaccaggataacaagattgccataaaaaactgtgatggtgtgcctgcccttgtgcgattgcttcgaaaggctcgtgatatggaccttactgaagttattaccggaaccctgtggaatctttcatcccatgactcaatcaaaatggagattgtggaccatgcactgcatgccttgacagatgaagtgatcattcctcattctggttgggagcgggaacctaatgaagactgtaagccacgccacattgagtgggaatcggtgctcaccaacacagctggctgccttaggaatgtaagctcagagaggagtgaagctcgccggaaacttcgggaatgtgatggtttagttgatgccctcattttcattgttcaggctgagattgggcagaaggattcagacagcaagcttgtagagaactgtgtttgccttcttcggaacttatcatatcaagttcaccgggagatcccacaggcagagcgttaccaagaggcagctcccaatgttgccaacaatactgggccacatgctgccagttgctttggggccaagaagggcaaagatgagtggttctccagagggaaaaaacctatagaggatccagcaaacgatacagtggatttccctaaaagaacgagtccagctcgaggctatgagctcttatttcagccagaggtggttcggatatacatctcacttcttaaggagagcaagactcctgccatcctagaagcctcagctggagctatccagaacttgtgtgctgggcgctggacgtatggtcgatacatccgctctgctctgcgtcaagagaaggctctttctgccatagctgacctcctgactaatgaacatgaacgggtggtgaaagctgcatctggagcactgagaaacctggctgtggatgctcgcaacaaagaattaattggtaaacatgctattcctaacttggtaaagaatctgccaggaggacagcagaactcctcttggaatttctctgaggacactgtcatctctattttgaacactatcaacgaggttatcgctgagaacttggaggctgccaaaaagcttcgagagacacagggtattgagaagctggtgttgatcaacaaatcagggaaccgctcagaaaaagaagttcgagcagcagcacttgtattacagacaatctggggatataaggaactgcggaagccactggaaaaagaaggatggaagaaatcagactttcaggtgaatctaaacaatgcttcccgaagccagagcagtcattcatatgatgatagtactctccctctcattgaccggaaccaaaaatcagataagaaacctgatcgggaagaaattcagatgagcaatatgggatcaaacacaaaatcactagataacaactattccacaccaaatgagagaggagaccacaatagaacactggatcgatcgggggatctaggcgacatggagccattgaagggaacaacacccttgatgcaggacgaggggcaggaatctctggaggaagagttggatgtgttggttttggatgatgaggggggccaagtgtcttacccctccatgcagaagatttagcaccactatctccgttccatctgggcttatatgtacttttattttttggtggtgaaattgactgatgattttcctttttcttcgctggactattgtgccaactgccaggctgcctcctgcccttacagccctaagtggctgccttctttccatcaactcccaacttcttcctgtgaagtttaattgtctcaacgcctccccctcccccattccctccatttttctcccaagaaacctgactcaattatttgcatattttgagaaactgctgcagattagttctttttgccagttttccctggaactcctggccttttgtggaggggagggatggagagaataggaatcttcactagaagccgtgggaagaattggaagttacatgctgtatatgcaatgtccagcagtctgataaactgacgattcttaatcaagatttttttcctgatggggaagggacttttattttcttttagagaggggaaagtgtgagctcttcccttattcctaatggctatttttgaagcaaagaaggccagcaacattggcacatgccacctggcaaaggacccttgagtaagtgaaggtctcctaaaactgggattaagaaaccttgctctcctcatctccaaggcagggaccatcaagaacctacagactccatctcttctgcaagcctcatgccaaccctgggctattgctgctgccccttaaacacaggctgtccttaacccacctctcctgccctgtgatatgtctgctgagttggcctggccatttccaagaggctgtagaaaggggagaatgtcaaggaagacttttggtagagaaggagcagaaagatgtgtttttgggaagaagaagacctctaggaggagctagtaggaatgtacatgaagcaattagtctgaaactggcttccccactcccccgtttctccttttcctatccttataggcctgtcccttgcctctgccctggattggttggcaaactaaaggacttgatgtacataactcctgtcccttttcccttacaaggtggggattgcccctggctttgcctcttctttgtgcctttggcctggggtgcatctcctcccgcccttccatgtgcctttctttgcctctgcagtctcatttctcataattttgcaaattatattttgttgctttcttacctactattggccctaaatagcagaaagaagagaagtgaccgagagaacctcagattcttcattgaggattggtatagccatgatttcagtcatagcaagcttttgctcaacagcatatgggtgggattttgcaaaaatcctattctgatgaatctcaaagtaaggctggtaagagaagtgagtggtgtgactcttactccttaggtgcccagaatttaccatcatctctgaaggagttacagggaagtggtctccccaattctcccctccctccagtattgccccctctcactttagcatatattaattagcaggttgggctagagaaatcagctgctatgcgggttgattattattattatttctaatccttttccttatttgccttctactccccttaatctaatctaaaagctctgttccatgcaactggagttccttatccctctcttccccttcccttatatattgaggctatggggtaggagaaaagtgcacaacccaccaccccctttactcgtgcattaaaatttcttatttacccttttcccccttcccatttcttcccactttcatctaccttttctggcaaaaaggagccttttgctctctgtgaccctaagagcacactgcacagggaaaattgccccatccagacctggctccactcttgatctctcttgtcctcttctgctcttttcctggtgctcttttttctcggtggggtgtgggtaatagaacagccgtgggcttttggggacctttaacttttttttctctcttttgtttataaaaaacactaaacattcaattccagagaaccaaaaatcccaccttcccaccgaacactactaaggggcttgtgttctgctccataccttttctcttttctttctgtcttgttaatgcttttaaaaacaaatgagttttttatataaataaagtttttaaagtgtgtatgtggggggtctgtgtcatttcttcacttcaagctgttatttcttccctgctttgcatctttgttacttccttatgtatcagtgtcctttccagagcaaccagaaggaggttataccaggatttattttgagctcagccccaactctttatcaagcaacattcttgttaactatatgtgaaacattttttcttctgaagattcttaaaaattgaatgtggctgaagttgaacatgggagcttattgctaatttagagataggaaactgaagcataaagaattaatgacttactttaattactggaattcttctgcaacatttgacaaaactaaccttgaataaggcccactgtaatacgtagctctcttaaatataacacttaggactagaagattagaaactaccaatcccaactacgtaataggaaaatgtaggatcaaaaggcccatgtatataagtactgaccactgggccataatgttgcttctcaggctatatgcagtcctttagtcagaagtcaataggcctatttattaatattttacagaccatattacctggattaccagggactatctttgctgcagagatcaagggttaagatctatgggaagatacttatttttctgaggtccttatgtcctgtcatataattaaagactcaagagaatttatgtgaaatgctttctgtatgcccaaatctttagattaaaattatatagctgctcct

SEQ ID NO: 114942 - DNA, 5751 bp, Homo sapiens
  Payload ID: 2444
  Gene Symbol: CTNND1
  Gene Name: catenin (cadherin-associated protein), delta 1
  Uniprot ID: O60716
  ENST ID: ENST00000532787
  CDS Start-End: 359-2881
ctgccagatcagtttgtcaccacccaggctcccttgcctttggctgggtgcaacttccattttaggtgttggatctgagggggaaaaaaaagagagagggagagagagagaaagaagagcaggaaagatcccgaaaggaggaagaggtggcgaaaaatcaactgccctgctggatttgtctttctcagcaccttggcgaagccttgggtttctttcttaaaggactgatttttagaactccacatttgagaacggccggtttgtgggcgatgctgaccttgaaagacagaaattttcagatttgaaactcaacggaccccaggatcacagtcaccttctatatagcaccatccccaggatgcaggagccggggcagattgtggagacctacacggaggaggatcctgagggagccatgtctgtagtctctgtggagacctcagatgatgggaccactcggcgcacagagaccacggtcaagaaagtagtgaagactgtgacaacacggacagtacagccagtcgctatgggaccagacgggttgcctgtggatgcttcatcagtttctaacaactatatccagactttgggtcgtgatttccgcaagaatggcaatgggggacctggtccctatgtggggcaagctggcactgctacccttcctaggaacttccactaccctcctgatggttatagtcgccactatgaagatggttatccaggtggcagtgataactatggcagtctgtcccgggtgacccgcattgaggagcggtataggcccagcatggaaggctaccgggcacctagtagacaggatgtgtatgggccccaaccccaggttcgggtaggtgggagcagcgtggatctgcatcgctttcatccagagccttatgggctagaggatgaccagcgtagtatgggctatgatgacctggattatggtatgatgtctgattatggcactgcccgtcggactgggacaccctctgaccctcgtcggcgcctcaggagctatgaagacatgattggtgaggaggtgccatcggatcaatactactgggctcctttggcccagcatgagcgaggaagtttagcaagcttggatagcctgcgcaaaggagggcctccacctcctaattggagacagccagagctgccagaggtgatcgccatgcttggattccgcttggatgctgtcaagtccaatgcagctgcatacctgcaacacttatgctaccgcaatgacaaggtgaagactgacgtgcggaagctcaagggcatcccagtactggtgggattgttagaccatcccaaaaaggaagtgcaccttggagcctgtggagctctcaagaatatctcttttggacgtgaccaggataacaagattgccataaaaaactgtgatggtgtgcctgcccttgtgcgattgcttcgaaaggctcgtgatatggaccttactgaagttattaccggaaccctgtggaatctttcatcccatgactcaatcaaaatggagattgtggaccatgcactgcatgccttgacagatgaagtgatcattcctcattctggttgggagcgggaacctaatgaagactgtaagccacgccacattgagtgggaatcggtgctcaccaacacagctggctgccttaggaatgtaagctcagagaggagtgaagctcgccggaaacttcgggaatgtgatggtttagttgatgccctcattttcattgttcaggctgagattgggcagaaggattcagacagcaagcttgtagagaactgtgtttgccttcttcggaacttatcatatcaagttcaccgggagatcccacaggcagagcgttaccaagaggcagctcccaatgttgccaacaatactgggccacatgctgccagttgctttggggccaagaagggcaaagggaaaaaacctatagaggatccagcaaacgatacagtggatttccctaaaagaacgagtccagctcgaggctatgagctcttatttcagccagaggtggttcggatatacatctcacttcttaaggagagcaagactcctgccatcctagaagcctcagctggagctatccagaacttgtgtgctgggcgctggacgtatggtcgatacatccgctctgctctgcgtcaagagaaggctctttctgccatagctgacctcctgactaatgaacatgaacgggtggtgaaagctgcatctggagcactgagaaacctggctgtggatgctcgcaacaaagaattaattggtaaacatgctattcctaacttggtaaagaatctgccaggaggacagcagaactcctcttggaatttctctgaggacactgtcatctctattttgaacactatcaacgaggttatcgctgagaacttggaggctgccaaaaagcttcgagagacacagggtattgagaagctggtgttgatcaacaaatcagggaaccgctcagaaaaagaagttcgagcagcagcacttgtattacagacaatctggggatataaggaactgcggaagccactggaaaaagaaggatggaagaaatcagactttcaggtgaatctaaacaatgcttcccgaagccagagcagtcattcatatgatgatagtactctccctctcattgaccggaaccaaaaatcagataacaactattccacaccaaatgagagaggagaccacaatagaacactggatcgatcgggggatctaggcgacatggagccattgaagggaacaacacccttgatgcaggacgaggggcaggaatctctggaggaagagttggatgtgttggttttggatgatgaggggggccaagtgtcttacccctccatgcagaagatttagcaccactatctccgttccatctgggcttatatgtacttttattttttggtggtgaaattgactgatgattttcctttttcttcgctggactattgtgccaactgccaggctgcctcctgcccttacagccctaagtggctgccttctttccatcaactcccaacttcttcctgtgaagtttaattgtctcaacgcctccccctcccccattccctccatttttctcccaagaaacctgactcaattatttgcatattttgagaaactgctgcagattagttctttttgccagttttccctggaactcctggccttttgtggaggggagggatggagagaataggaatcttcactagaagccgtgggaagaattggaagttacatgctgtatatgcaatgtccagcagtctgataaactgacgattcttaatcaagatttttttcctgatggggaagggacttttattttcttttagagaggggaaagtgtgagctcttcccttattcctaatggctatttttgaagcaaagaaggccagcaacattggcacatgccacctggcaaaggacccttgagtaagtgaaggtctcctaaaactgggattaagaaaccttgctctcctcatctccaaggcagggaccatcaagaacctacagactccatctcttctgcaagcctcatgccaaccctgggctattgctgctgccccttaaacacaggctgtccttaacccacctctcctgccctgtgatatgtctgctgagttggcctggccatttccaagaggctgtagaaaggggagaatgtcaaggaagacttttggtagagaaggagcagaaagatgtgtttttgggaagaagaagacctctaggaggagctagtaggaatgtacatgaagcaattagtctgaaactggcttccccactcccccgtttctccttttcctatccttataggcctgtcccttgcctctgccctggattggttggcaaactaaaggacttgatgtacataactcctgtcccttttcccttacaaggtggggattgcccctggctttgcctcttctttgtgcctttggcctggggtgcatctcctcccgcccttccatgtgcctttctttgcctctgcagtctcatttctcataattttgcaaattatattttgttgctttcttacctactattggccctaaatagcagaaagaagagaagtgaccgagagaacctcagattcttcattgaggattggtatagccatgatttcagtcatagcaagcttttgctcaacagcatatgggtgggattttgcaaaaatcctattctgatgaatctcaaagtaaggctggtaagagaagtgagtggtgtgactcttactccttaggtgcccagaatttaccatcatctctgaaggagttacagggaagtggtctccccaattctcccctccctccagtattgccccctctcactttagcatatattaattagcaggttgggctagagaaatcagctgctatgcgggttgattattattattatttctaatccttttccttatttgccttctactccccttaatctaatctaaaagctctgttccatgcaactggagttccttatccctctcttccccttcccttatatattgaggctatggggtaggagaaaagtgcacaacccaccaccccctttactcgtgcattaaaatttcttatttacccttttcccccttcccatttcttcccactttcatctaccttttctggcaaaaaggagccttttgctctctgtgaccctaagagcacactgcacagggaaaattgccccatccagacctggctccactcttgatctctcttgtcctcttctgctcttttcctggtgctcttttttctcggtggggtgtgggtaatagaacagccgtgggcttttggggacctttaacttttttttctctcttttgtttataaaaaacactaaacattcaattccagagaaccaaaaatcccaccttcccaccgaacactactaaggggcttgtgttctgctccataccttttctcttttctttctgtcttgttaatgcttttaaaaacaaatgagttttttatataaataaagtttttaaagtgtgtatgtggggggtctgtgtcatttcttcacttcaagctgttatttcttccctgctttgcatctttgttacttccttatgtatcagtgtcctttccagagcaaccagaaggaggttataccaggatttattttgagctcagccccaactctttatcaagcaacattcttgttaactatatgtgaaacattttttcttctgaagattcttaaaaattgaatgtggctgaagttgaacatgggagcttattgctaatttagagataggaaactgaagcataaagaattaatgacttactttaattactggaattcttctgcaacatttgacaaaactaaccttgaataaggcccactgtaatacgtagctctcttaaatataacacttaggactagaagattagaaactaccaatcccaactacgtaataggaaaatgtaggatcaaaaggcccatgtatataagtactgaccactgggccataatgttgcttctcaggctatatgcagtcctttagtcagaagtcaataggcctatttattaatattttacagaccatattacctggattaccagggactatctttgctgcagagatcaagggttaagatctatgggaagatacttatttttctgaggtccttatgtcctgtcatataattaaagactcaagagaatttatgtgaaatgctttctgtatgcccaaatctttagattaaaattatatagctgctcct

SEQ ID NO: 114943 - DNA, 498 bp, Homo sapiens
  Payload ID: 2444
  Gene Symbol: CTNND1
  Gene Name: catenin (cadherin-associated protein), delta 1
  ENST ID: ENST00000533189
  CDS Start-End: 120-498
aagatggctgggctgcaagaggcagggggatgggcccgtcagggaggaattcttgtgaaagccgtcgtctgcctcagcacttgatgaaaacacaccgaaaaagagggagctatgaagacatgattggtgaggaggtgccatcggatcaatactactgggctcctttggcccagcatgagcgaggaagtttagcaagcttggatagcctgcgcaaaggagggcctccacctcctaattggagacagccagagctgccagaggtgatcgccatgcttggattccgcttggatgctgtcaagtccaatgcagctgcatacctgcaacacttatgctaccgcaatgacaaggtgaagactgacgtgcggaagctcaagggcatcccagtactggtgggattgttagaccatcccaaaaaggaagtgcaccttggagcctgtggagctctcaagaatatctcttttggacgtgaccaggataacaagattgccataaaaaact

SEQ ID NO: 114944 - DNA, 5745 bp, Homo sapiens
  Payload ID: 2444
  Gene Symbol: CTNND1
  Gene Name: catenin (cadherin-associated protein), delta 1
  Uniprot ID: O60716
  ENST ID: ENST00000528232
  CDS Start-End: 359-2875
ctgccagatcagtttgtcaccacccaggctcccttgcctttggctgggtgcaacttccattttaggtgttggatctgagggggaaaaaaaagagagagggagagagagagaaagaagagcaggaaagatcccgaaaggaggaagaggtggcgaaaaatcaactgccctgctggatttgtctttctcagcaccttggcgaagccttgggtttctttcttaaaggactgatttttagaactccacatttgagaacggccggtttgtgggcgatgctgaccttgaaagacagaaattttcagatttgaaactcaacggaccccaggatcacagtcaccttctatatagcaccatccccaggatgcaggagccggggcagattgtggagacctacacggaggaggatcctgagggagccatgtctgtagtctctgtggagacctcagatgatgggaccactcggcgcacagagaccacggtcaagaaagtagtgaagactgtgacaacacggacagtacagccagtcgctatgggaccagacgggttgcctgtggatgcttcatcagtttctaacaactatatccagactttgggtcgtgatttccgcaagaatggcaatgggggacctggtccctatgtggggcaagctggcactgctacccttcctaggaacttccactaccctcctgatggttatagtcgccactatgaagatggttatccaggtggcagtgataactatggcagtctgtcccgggtgacccgcattgaggagcggtataggcccagcatggaaggctaccgggcacctagtagacaggatgtgtatgggccccaaccccaggttcgggtaggtgggagcagcgtggatctgcatcgctttcatccagagccttatgggctagaggatgaccagcgtagtatgggctatgatgacctggattatggtatgatgtctgattatggcactgcccgtcggactgggacaccctctgaccctcgtcggcgcctcaggagctatgaagacatgattggtgaggaggtgccatcggatcaatactactgggctcctttggcccagcatgagcgaggaagtttagcaagcttggatagcctgcgcaaaggagggcctccacctcctaattggagacagccagagctgccagaggtgatcgccatgcttggattccgcttggatgctgtcaagtccaatgcagctgcatacctgcaacacttatgctaccgcaatgacaaggtgaagactgacgtgcggaagctcaagggcatcccagtactggtgggattgttagaccatcccaaaaaggaagtgcaccttggagcctgtggagctctcaagaatatctcttttggacgtgaccaggataacaagattgccataaaaaactgtgatggtgtgcctgcccttgtgcgattgcttcgaaaggctcgtgatatggaccttactgaagttattaccggaaccctgtggaatctttcatcccatgactcaatcaaaatggagattgtggaccatgcactgcatgccttgacagatgaagtgatcattcctcattctggttgggagcgggaacctaatgaagactgtaagccacgccacattgagtgggaatcggtgctcaccaacacagctggctgccttaggaatgtaagctcagagaggagtgaagctcgccggaaacttcgggaatgtgatggtttagttgatgccctcattttcattgttcaggctgagattgggcagaaggattcagacagcaagcttgtagagaactgtgtttgccttcttcggaacttatcatatcaagttcaccgggagatcccacaggcagagcgttaccaagaggcagctcccaatgttgccaacaatactgggccacatgctgccagttgctttggggccaagaagggcaaagatgagtggttctccagagggaaaaaacctatagaggatccagcaaacgatacagtggatttccctaaaagaacgagtccagctcgaggctatgagctcttatttcagccagaggtggttcggatatacatctcacttcttaaggagagcaagactcctgccatcctagaagcctcagctggagctatccagaacttgtgtgctgggcgctggacgtatggtcgatacatccgctctgctctgcgtcaagagaaggctctttctgccatagctgacctcctgactaatgaacatgaacgggtggtgaaagctgcatctggagcactgagaaacctggctgtggatgctcgcaacaaagaattaattggtaaacatgctattcctaacttggtaaagaatctgccaggaggacagcagaactcctcttggaatttctctgaggacactgtcatctctattttgaacactatcaacgaggttatcgctgagaacttggaggctgccaaaaagcttcgagagacacagggtattgagaagctggtgttgatcaacaaatcagggaaccgctcagaaaaagaagttcgagcagcagcacttgtattacagacaatctggggatataaggaactgcggaagccactggaaaaagaaggatggaagaaatcagactttcaggtgaatctaaacaatgcttcccgaagccagagcagtcattcatatgatgatagtactctccctctcattgaccggaaccaaaaatcagataagaaacctgatcgggaagaaattcagatgagcaatatgggatcaaacacaaaatcactagataacaactattccacaccaaatgagagaggagaccacaatagaacactggatcgatcgggggatctaggcgacatggagccattgaagggaacaacacccttgatgcagaagatttagcaccactatctccgttccatctgggcttatatgtacttttattttttggtggtgaaattgactgatgattttcctttttcttcgctggactattgtgccaactgccaggctgcctcctgcccttacagccctaagtggctgccttctttccatcaactcccaacttcttcctgtgaagtttaattgtctcaacgcctccccctcccccattccctccatttttctcccaagaaacctgactcaattatttgcatattttgagaaactgctgcagattagttctttttgccagttttccctggaactcctggccttttgtggaggggagggatggagagaataggaatcttcactagaagccgtgggaagaattggaagttacatgctgtatatgcaatgtccagcagtctgataaactgacgattcttaatcaagatttttttcctgatggggaagggacttttattttcttttagagaggggaaagtgtgagctcttcccttattcctaatggctatttttgaagcaaagaaggccagcaacattggcacatgccacctggcaaaggacccttgagtaagtgaaggtctcctaaaactgggattaagaaaccttgctctcctcatctccaaggcagggaccatcaagaacctacagactccatctcttctgcaagcctcatgccaaccctgggctattgctgctgccccttaaacacaggctgtccttaacccacctctcctgccctgtgatatgtctgctgagttggcctggccatttccaagaggctgtagaaaggggagaatgtcaaggaagacttttggtagagaaggagcagaaagatgtgtttttgggaagaagaagacctctaggaggagctagtaggaatgtacatgaagcaattagtctgaaactggcttccccactcccccgtttctccttttcctatccttataggcctgtcccttgcctctgccctggattggttggcaaactaaaggacttgatgtacataactcctgtcccttttcccttacaaggtggggattgcccctggctttgcctcttctttgtgcctttggcctggggtgcatctcctcccgcccttccatgtgcctttctttgcctctgcagtctcatttctcataattttgcaaattatattttgttgctttcttacctactattggccctaaatagcagaaagaagagaagtgaccgagagaacctcagattcttcattgaggattggtatagccatgatttcagtcatagcaagcttttgctcaacagcatatgggtgggattttgcaaaaatcctattctgatgaatctcaaagtaaggctggtaagagaagtgagtggtgtgactcttactccttaggtgcccagaatttaccatcatctctgaaggagttacagggaagtggtctccccaattctcccctccctccagtattgccccctctcactttagcatatattaattagcaggttgggctagagaaatcagctgctatgcgggttgattattattattatttctaatccttttccttatttgccttctactccccttaatctaatctaaaagctctgttccatgcaactggagttccttatccctctcttccccttcccttatatattgaggctatggggtaggagaaaagtgcacaacccaccaccccctttactcgtgcattaaaatttcttatttacccttttcccccttcccatttcttcccactttcatctaccttttctggcaaaaaggagccttttgctctctgtgaccctaagagcacactgcacagggaaaattgccccatccagacctggctccactcttgatctctcttgtcctcttctgctcttttcctggtgctcttttttctcggtggggtgtgggtaatagaacagccgtgggcttttggggacctttaacttttttttctctcttttgtttataaaaaacactaaacattcaattccagagaaccaaaaatcccaccttcccaccgaacactactaaggggcttgtgttctgctccataccttttctcttttctttctgtcttgttaatgcttttaaaaacaaatgagttttttatataaataaagtttttaaagtgtgtatgtggggggtctgtgtcatttcttcacttcaagctgttatttcttccctgctttgcatctttgttacttccttatgtatcagtgtcctttccagagcaaccagaaggaggttataccaggatttattttgagctcagccccaactctttatcaagcaacattcttgttaactatatgtgaaacattttttcttctgaagattcttaaaaattgaatgtggctgaagttgaacatgggagcttattgctaatttagagataggaaactgaagcataaagaattaatgacttactttaattactggaattcttctgcaacatttgacaaaactaaccttgaataaggcccactgtaatacgtagctctcttaaatataacacttaggactagaagattagaaactaccaatcccaactacgtaataggaaaatgtaggatcaaaaggcccatgtatataagtactgaccactgggccataatgttgcttctcaggctatatgcagtcctttagtcagaagtcaataggcctatttattaatattttacagaccatattacctggattaccagggactatctttgctgcagagatcaagggttaagatctatgggaagatacttatttttctgaggtccttatgtcctgtcatataattaaagactcaagagaatttatgtgaaatgctttctgtatgcccaaatctttagattaaaattatatagctgctcct

SEQ ID NO: 114945 - DNA, 6026 bp, Homo sapiens
  Payload ID: 2444
  Gene Symbol: CTNND1
  Gene Name: catenin (cadherin-associated protein), delta 1
  Uniprot ID: O60716
  ENST ID: ENST00000532649
  CDS Start-End: 517-3156
ctgccagatcagtttgtcaccacccaggctcccttgcctttggctgggtgcaacttccattttaggtgttggatctgagggggaaaaaaaagagagagggagagagagagaaagaagagcaggaaagatcccgaaaggaggaagaggtggcgaaaaatcaactgccctgctggatttgtctttctcagcaccttggcgaagccttgggtttctttcttaaaggactgatttttagaactccacatttgagctctctccttcctgcttcctccttgctgtggtggctgggatgcttcttccatgattttttgaatctagactgggctgttctctgtgttaaaccaatcagttgcgaccttctcttaacaggtggagtcgaccgccagcatcttggcctctgtgaaggaacaagaggcccagtttgagaagctgacccgggcgctggaggaggaacggcgccacgtctcggcgcagctggaacgcgtccgggtctcaccacaagatgccaacccactcatggccaacggcacactcacccgccggcatcagaacggccggtttgtgggcgatgctgaccttgaaagacagaaattttcagatttgaaactcaacggaccccaggatcacagtcaccttctatatagcaccatccccaggatgcaggagccggggcagattgtggagacctacacggaggaggatcctgagggagccatgtctgtagtctctgtggagacctcagatgatgggaccactcggcgcacagagaccacggtcaagaaagtagtgaagactgtgacaacacggacagtacagccagtcgctatgggaccagacgggttgcctgtggatgcttcatcagtttctaacaactatatccagactttgggtcgtgatttccgcaagaatggcaatgggggacctggtccctatgtggggcaagctggcactgctacccttcctaggaacttccactaccctcctgatggttatagtcgccactatgaagatggttatccaggtggcagtgataactatggcagtctgtcccgggtgacccgcattgaggagcggtataggcccagcatggaaggctaccgggcacctagtagacaggatgtgtatgggccccaaccccaggttcgggtaggtgggagcagcgtggatctgcatcgctttcatccagagccttatgggctagaggatgaccagcgtagtatgggctatgatgacctggattatggtatgatgtctgattatggcactgcccgtcggactgggacaccctctgaccctcgtcggcgcctcaggagctatgaagacatgattggtgaggaggtgccatcggatcaatactactgggctcctttggcccagcatgagcgaggaagtttagcaagcttggatagcctgcgcaaaggagggcctccacctcctaattggagacagccagagctgccagaggtgatcgccatgcttggattccgcttggatgctgtcaagtccaatgcagctgcatacctgcaacacttatgctaccgcaatgacaaggtgaagactgacgtgcggaagctcaagggcatcccagtactggtgggattgttagaccatcccaaaaaggaagtgcaccttggagcctgtggagctctcaagaatatctcttttggacgtgaccaggataacaagattgccataaaaaactgtgatggtgtgcctgcccttgtgcgattgcttcgaaaggctcgtgatatggaccttactgaagttattaccggaaccctgtggaatctttcatcccatgactcaatcaaaatggagattgtggaccatgcactgcatgccttgacagatgaagtgatcattcctcattctggttgggagcgggaacctaatgaagactgtaagccacgccacattgagtgggaatcggtgctcaccaacacagctggctgccttaggaatgtaagctcagagaggagtgaagctcgccggaaacttcgggaatgtgatggtttagttgatgccctcattttcattgttcaggctgagattgggcagaaggattcagacagcaagcttgtagagaactgtgtttgccttcttcggaacttatcatatcaagttcaccgggagatcccacaggcagagcgttaccaagaggcagctcccaatgttgccaacaatactgggccacatgctgccagttgctttggggccaagaagggcaaagggaaaaaacctatagaggatccagcaaacgatacagtggatttccctaaaagaacgagtccagctcgaggctatgagctcttatttcagccagaggtggttcggatatacatctcacttcttaaggagagcaagactcctgccatcctagaagcctcagctggagctatccagaacttgtgtgctgggcgctggacgtatggtcgatacatccgctctgctctgcgtcaagagaaggctctttctgccatagctgacctcctgactaatgaacatgaacgggtggtgaaagctgcatctggagcactgagaaacctggctgtggatgctcgcaacaaagaattaattggtaaacatgctattcctaacttggtaaagaatctgccaggaggacagcagaactcctcttggaatttctctgaggacactgtcatctctattttgaacactatcaacgaggttatcgctgagaacttggaggctgccaaaaagcttcgagagacacagggtattgagaagctggtgttgatcaacaaatcagggaaccgctcagaaaaagaagttcgagcagcagcacttgtattacagacaatctggggatataaggaactgcggaagccactggaaaaagaaggatggaagaaatcagactttcaggtgaatctaaacaatgcttcccgaagccagagcagtcattcatatgatgatagtactctccctctcattgaccggaaccaaaaatcagataagaaacctgatcgggaagaaattcagatgagcaatatgggatcaaacacaaaatcactagataacaactattccacaccaaatgagagaggagaccacaatagaacactggatcgatcgggggatctaggcgacatggagccattgaagggaacaacacccttgatgcagaagatttagcaccactatctccgttccatctgggcttatatgtacttttattttttggtggtgaaattgactgatgattttcctttttcttcgctggactattgtgccaactgccaggctgcctcctgcccttacagccctaagtggctgccttctttccatcaactcccaacttcttcctgtgaagtttaattgtctcaacgcctccccctcccccattccctccatttttctcccaagaaacctgactcaattatttgcatattttgagaaactgctgcagattagttctttttgccagttttccctggaactcctggccttttgtggaggggagggatggagagaataggaatcttcactagaagccgtgggaagaattggaagttacatgctgtatatgcaatgtccagcagtctgataaactgacgattcttaatcaagatttttttcctgatggggaagggacttttattttcttttagagaggggaaagtgtgagctcttcccttattcctaatggctatttttgaagcaaagaaggccagcaacattggcacatgccacctggcaaaggacccttgagtaagtgaaggtctcctaaaactgggattaagaaaccttgctctcctcatctccaaggcagggaccatcaagaacctacagactccatctcttctgcaagcctcatgccaaccctgggctattgctgctgccccttaaacacaggctgtccttaacccacctctcctgccctgtgatatgtctgctgagttggcctggccatttccaagaggctgtagaaaggggagaatgtcaaggaagacttttggtagagaaggagcagaaagatgtgtttttgggaagaagaagacctctaggaggagctagtaggaatgtacatgaagcaattagtctgaaactggcttccccactcccccgtttctccttttcctatccttataggcctgtcccttgcctctgccctggattggttggcaaactaaaggacttgatgtacataactcctgtcccttttcccttacaaggtggggattgcccctggctttgcctcttctttgtgcctttggcctggggtgcatctcctcccgcccttccatgtgcctttctttgcctctgcagtctcatttctcataattttgcaaattatattttgttgctttcttacctactattggccctaaatagcagaaagaagagaagtgaccgagagaacctcagattcttcattgaggattggtatagccatgatttcagtcatagcaagcttttgctcaacagcatatgggtgggattttgcaaaaatcctattctgatgaatctcaaagtaaggctggtaagagaagtgagtggtgtgactcttactccttaggtgcccagaatttaccatcatctctgaaggagttacagggaagtggtctccccaattctcccctccctccagtattgccccctctcactttagcatatattaattagcaggttgggctagagaaatcagctgctatgcgggttgattattattattatttctaatccttttccttatttgccttctactccccttaatctaatctaaaagctctgttccatgcaactggagttccttatccctctcttccccttcccttatatattgaggctatggggtaggagaaaagtgcacaacccaccaccccctttactcgtgcattaaaatttcttatttacccttttcccccttcccatttcttcccactttcatctaccttttctggcaaaaaggagccttttgctctctgtgaccctaagagcacactgcacagggaaaattgccccatccagacctggctccactcttgatctctcttgtcctcttctgctcttttcctggtgctcttttttctcggtggggtgtgggtaatagaacagccgtgggcttttggggacctttaacttttttttctctcttttgtttataaaaaacactaaacattcaattccagagaaccaaaaatcccaccttcccaccgaacactactaaggggcttgtgttctgctccataccttttctcttttctttctgtcttgttaatgcttttaaaaacaaatgagttttttatataaataaagtttttaaagtgtgtatgtggggggtctgtgtcatttcttcacttcaagctgttatttcttccctgctttgcatctttgttacttccttatgtatcagtgtcctttccagagcaaccagaaggaggttataccaggatttattttgagctcagccccaactctttatcaagcaacattcttgttaactatatgtgaaacattttttcttctgaagattcttaaaaattgaatgtggctgaagttgaacatgggagcttattgctaatttagagataggaaactgaagcataaagaattaatgacttactttaattactggaattcttctgcaacatttgacaaaactaaccttgaataaggcccactgtaatacgtagctctcttaaatataacacttaggactagaagattagaaactaccaatcccaactacgtaataggaaaatgtaggatcaaaaggcccatgtatataagtactgaccactgggccataatgttgcttctcaggctatatgcagtcctttagtcagaagtcaataggcctatttattaatattttacagaccatattacctggattaccagggactatctttgctgcagagatcaagggttaagatctatgggaagatacttatttttctgaggtccttatgtcctgtcatataattaaagactcaagagaatttatgtgaaatgctttctgtatgcccaaatctttagattaaaattatatagctgctcct

SEQ ID NO: 114946 - DNA, 5931 bp, Homo sapiens
  Payload ID: 2444
  Gene Symbol: CTNND1
  Gene Name: catenin (cadherin-associated protein), delta 1
  Uniprot ID: O60716
  ENST ID: ENST00000529873
  CDS Start-End: 398-3061
ctgccagatcagtttgtcaccacccaggctcccttgcctttggctgggtgcaacttccattttaggtgttggatctgagggggaaaaaaaagagagagggagagagagagaaagaagagcaggaaagatcccgaaaggaggaagaggtggcgaaaaatcaactgccctgctggatttgtctttctcagcaccttggcgaagccttgggtttctttcttaaaggactgatttttagaactccacatttgaggtggagtcgaccgccagcatcttggcctctgtgaaggaacaagaggcccagtttgagaagctgacccgggcgctggaggaggaacggcgccacgtctcggcgcagctggaacgcgtccgggtctcaccacaagatgccaacccactcatggccaacggcacactcacccgccggcatcagaacggccggtttgtgggcgatgctgaccttgaaagacagaaattttcagatttgaaactcaacggaccccaggatcacagtcaccttctatatagcaccatccccaggatgcaggagccggggcagattgtggagacctacacggaggaggatcctgagggagccatgtctgtagtctctgtggagacctcagatgatgggaccactcggcgcacagagaccacggtcaagaaagtagtgaagactgtgacaacacggacagtacagccagtcgctatgggaccagacgggttgcctgtggatgcttcatcagtttctaacaactatatccagactttgggtcgtgatttccgcaagaatggcaatgggggacctggtccctatgtggggcaagctggcactgctacccttcctaggaacttccactaccctcctgatggttatagtcgccactatgaagatggttatccaggtggcagtgataactatggcagtctgtcccgggtgacccgcattgaggagcggtataggcccagcatggaaggctaccgggcacctagtagacaggatgtgtatgggccccaaccccaggttcgggtaggtgggagcagcgtggatctgcatcgctttcatccagagccttatgggctagaggatgaccagcgtagtatgggctatgatgacctggattatggtatgatgtctgattatggcactgcccgtcggactgggacaccctctgaccctcgtcggcgcctcaggagctatgaagacatgattggtgaggaggtgccatcggatcaatactactgggctcctttggcccagcatgagcgaggaagtttagcaagcttggatagcctgcgcaaaggagggcctccacctcctaattggagacagccagagctgccagaggtgatcgccatgcttggattccgcttggatgctgtcaagtccaatgcagctgcatacctgcaacacttatgctaccgcaatgacaaggtgaagactgacgtgcggaagctcaagggcatcccagtactggtgggattgttagaccatcccaaaaaggaagtgcaccttggagcctgtggagctctcaagaatatctcttttggacgtgaccaggataacaagattgccataaaaaactgtgatggtgtgcctgcccttgtgcgattgcttcgaaaggctcgtgatatggaccttactgaagttattaccggaaccctgtggaatctttcatcccatgactcaatcaaaatggagattgtggaccatgcactgcatgccttgacagatgaagtgatcattcctcattctggttgggagcgggaacctaatgaagactgtaagccacgccacattgagtgggaatcggtgctcaccaacacagctggctgccttaggaatgtaagctcagagaggagtgaagctcgccggaaacttcgggaatgtgatggtttagttgatgccctcattttcattgttcaggctgagattgggcagaaggattcagacagcaagcttgtagagaactgtgtttgccttcttcggaacttatcatatcaagttcaccgggagatcccacaggcagagcgttaccaagaggcagctcccaatgttgccaacaatactgggccacatgctgccagttgctttggggccaagaagggcaaagggaaaaaacctatagaggatccagcaaacgatacagtggatttccctaaaagaacgagtccagctcgaggctatgagctcttatttcagccagaggtggttcggatatacatctcacttcttaaggagagcaagactcctgccatcctagaagcctcagctggagctatccagaacttgtgtgctgggcgctggacgtatggtcgatacatccgctctgctctgcgtcaagagaaggctctttctgccatagctgacctcctgactaatgaacatgaacgggtggtgaaagctgcatctggagcactgagaaacctggctgtggatgctcgcaacaaagaattaattggtaaacatgctattcctaacttggtaaagaatctgccaggaggacagcagaactcctcttggaatttctctgaggacactgtcatctctattttgaacactatcaacgaggttatcgctgagaacttggaggctgccaaaaagcttcgagagacacagggtattgagaagctggtgttgatcaacaaatcagggaaccgctcagaaaaagaagttcgagcagcagcacttgtattacagacaatctggggatataaggaactgcggaagccactggaaaaagaaggatggaagaaatcagactttcaggtgaatctaaacaatgcttcccgaagccagagcagtcattcatatgatgatagtactctccctctcattgaccggaaccaaaaatcagataacaactattccacaccaaatgagagaggagaccacaatagaacactggatcgatcgggggatctaggcgacatggagccattgaagggaacaacacccttgatgcaggacgaggggcaggaatctctggaggaagagttggatgtgttggttttggatgatgaggggggccaagtgtcttacccctccatgcagaagatttagcaccactatctccgttccatctgggcttatatgtacttttattttttggtggtgaaattgactgatgattttcctttttcttcgctggactattgtgccaactgccaggctgcctcctgcccttacagccctaagtggctgccttctttccatcaactcccaacttcttcctgtgaagtttaattgtctcaacgcctccccctcccccattccctccatttttctcccaagaaacctgactcaattatttgcatattttgagaaactgctgcagattagttctttttgccagttttccctggaactcctggccttttgtggaggggagggatggagagaataggaatcttcactagaagccgtgggaagaattggaagttacatgctgtatatgcaatgtccagcagtctgataaactgacgattcttaatcaagatttttttcctgatggggaagggacttttattttcttttagagaggggaaagtgtgagctcttcccttattcctaatggctatttttgaagcaaagaaggccagcaacattggcacatgccacctggcaaaggacccttgagtaagtgaaggtctcctaaaactgggattaagaaaccttgctctcctcatctccaaggcagggaccatcaagaacctacagactccatctcttctgcaagcctcatgccaaccctgggctattgctgctgccccttaaacacaggctgtccttaacccacctctcctgccctgtgatatgtctgctgagttggcctggccatttccaagaggctgtagaaaggggagaatgtcaaggaagacttttggtagagaaggagcagaaagatgtgtttttgggaagaagaagacctctaggaggagctagtaggaatgtacatgaagcaattagtctgaaactggcttccccactcccccgtttctccttttcctatccttataggcctgtcccttgcctctgccctggattggttggcaaactaaaggacttgatgtacataactcctgtcccttttcccttacaaggtggggattgcccctggctttgcctcttctttgtgcctttggcctggggtgcatctcctcccgcccttccatgtgcctttctttgcctctgcagtctcatttctcataattttgcaaattatattttgttgctttcttacctactattggccctaaatagcagaaagaagagaagtgaccgagagaacctcagattcttcattgaggattggtatagccatgatttcagtcatagcaagcttttgctcaacagcatatgggtgggattttgcaaaaatcctattctgatgaatctcaaagtaaggctggtaagagaagtgagtggtgtgactcttactccttaggtgcccagaatttaccatcatctctgaaggagttacagggaagtggtctccccaattctcccctccctccagtattgccccctctcactttagcatatattaattagcaggttgggctagagaaatcagctgctatgcgggttgattattattattatttctaatccttttccttatttgccttctactccccttaatctaatctaaaagctctgttccatgcaactggagttccttatccctctcttccccttcccttatatattgaggctatggggtaggagaaaagtgcacaacccaccaccccctttactcgtgcattaaaatttcttatttacccttttcccccttcccatttcttcccactttcatctaccttttctggcaaaaaggagccttttgctctctgtgaccctaagagcacactgcacagggaaaattgccccatccagacctggctccactcttgatctctcttgtcctcttctgctcttttcctggtgctcttttttctcggtggggtgtgggtaatagaacagccgtgggcttttggggacctttaacttttttttctctcttttgtttataaaaaacactaaacattcaattccagagaaccaaaaatcccaccttcccaccgaacactactaaggggcttgtgttctgctccataccttttctcttttctttctgtcttgttaatgcttttaaaaacaaatgagttttttatataaataaagtttttaaagtgtgtatgtggggggtctgtgtcatttcttcacttcaagctgttatttcttccctgctttgcatctttgttacttccttatgtatcagtgtcctttccagagcaaccagaaggaggttataccaggatttattttgagctcagccccaactctttatcaagcaacattcttgttaactatatgtgaaacattttttcttctgaagattcttaaaaattgaatgtggctgaagttgaacatgggagcttattgctaatttagagataggaaactgaagcataaagaattaatgacttactttaattactggaattcttctgcaacatttgacaaaactaaccttgaataaggcccactgtaatacgtagctctcttaaatataacacttaggactagaagattagaaactaccaatcccaactacgtaataggaaaatgtaggatcaaaaggcccatgtatataagtactgaccactgggccataatgttgcttctcaggctatatgcagtcctttagtcagaagtcaataggcctatttattaatattttacagaccatattacctggattaccagggactatctttgctgcagagatcaagggttaagatctatgggaagatacttatttttctgaggtccttatgtcctgtcatataattaaagactcaagagaatttatgtgaaatgctttctgtatgcccaaatctttagattaaaattatatagctgctcct

SEQ ID NO: 114947 - DNA, 6024 bp, Homo sapiens
  Payload ID: 2444
  Gene Symbol: CTNND1
  Gene Name: catenin (cadherin-associated protein), delta 1
  Uniprot ID: O60716
  ENST ID: ENST00000534579
  CDS Start-End: 515-3154
cagatcagtttgtcaccacccaggctcccttgcctttggctgggtgcaacttccattttaggtgttggatctgagggggaaaaaaaagagagagggagagagagagaaagaagagcaggaaagatcccgaaaggaggaagaggtggcgaaaaatcaactgccctgctggatttgtctttctcagcaccttggcgaagccttgggtttctttcttaaaggactgatttttagaactccacatttgagctctctccttcctgcttcctccttgctgtggtggctgggatgcttcttccatgattttttgaatctagactgggctgttctctgtgttaaaccaatcagttgcgaccttctcttaacagaggtggagtcgaccgccagcatcttggcctctgtgaaggaacaagaggcccagtttgagaagctgacccgggcgctggaggaggaacggcgccacgtctcggcgcagctggaacgcgtccgggtctcaccacaagatgccaacccactcatggccaacggcacactcacccgccggcatcagaacggccggtttgtgggcgatgctgaccttgaaagacagaaattttcagatttgaaactcaacggaccccaggatcacagtcaccttctatatagcaccatccccaggatgcaggagccggggcagattgtggagacctacacggaggaggatcctgagggagccatgtctgtagtctctgtggagacctcagatgatgggaccactcggcgcacagagaccacggtcaagaaagtagtgaagactgtgacaacacggacagtacagccagtcgctatgggaccagacgggttgcctgtggatgcttcatcagtttctaacaactatatccagactttgggtcgtgatttccgcaagaatggcaatgggggacctggtccctatgtggggcaagctggcactgctacccttcctaggaacttccactaccctcctgatggttatagtcgccactatgaagatggttatccaggtggcagtgataactatggcagtctgtcccgggtgacccgcattgaggagcggtataggcccagcatggaaggctaccgggcacctagtagacaggatgtgtatgggccccaaccccaggttcgggtaggtgggagcagcgtggatctgcatcgctttcatccagagccttatgggctagaggatgaccagcgtagtatgggctatgatgacctggattatggtatgatgtctgattatggcactgcccgtcggactgggacaccctctgaccctcgtcggcgcctcaggagctatgaagacatgattggtgaggaggtgccatcggatcaatactactgggctcctttggcccagcatgagcgaggaagtttagcaagcttggatagcctgcgcaaaggagggcctccacctcctaattggagacagccagagctgccagaggtgatcgccatgcttggattccgcttggatgctgtcaagtccaatgcagctgcatacctgcaacacttatgctaccgcaatgacaaggtgaagactgacgtgcggaagctcaagggcatcccagtactggtgggattgttagaccatcccaaaaaggaagtgcaccttggagcctgtggagctctcaagaatatctcttttggacgtgaccaggataacaagattgccataaaaaactgtgatggtgtgcctgcccttgtgcgattgcttcgaaaggctcgtgatatggaccttactgaagttattaccggaaccctgtggaatctttcatcccatgactcaatcaaaatggagattgtggaccatgcactgcatgccttgacagatgaagtgatcattcctcattctggttgggagcgggaacctaatgaagactgtaagccacgccacattgagtgggaatcggtgctcaccaacacagctggctgccttaggaatgtaagctcagagaggagtgaagctcgccggaaacttcgggaatgtgatggtttagttgatgccctcattttcattgttcaggctgagattgggcagaaggattcagacagcaagcttgtagagaactgtgtttgccttcttcggaacttatcatatcaagttcaccgggagatcccacaggcagagcgttaccaagaggcagctcccaatgttgccaacaatactgggccacatgctgccagttgctttggggccaagaagggcaaagggaaaaaacctatagaggatccagcaaacgatacagtggatttccctaaaagaacgagtccagctcgaggctatgagctcttatttcagccagaggtggttcggatatacatctcacttcttaaggagagcaagactcctgccatcctagaagcctcagctggagctatccagaacttgtgtgctgggcgctggacgtatggtcgatacatccgctctgctctgcgtcaagagaaggctctttctgccatagctgacctcctgactaatgaacatgaacgggtggtgaaagctgcatctggagcactgagaaacctggctgtggatgctcgcaacaaagaattaattggtaaacatgctattcctaacttggtaaagaatctgccaggaggacagcagaactcctcttggaatttctctgaggacactgtcatctctattttgaacactatcaacgaggttatcgctgagaacttggaggctgccaaaaagcttcgagagacacagggtattgagaagctggtgttgatcaacaaatcagggaaccgctcagaaaaagaagttcgagcagcagcacttgtattacagacaatctggggatataaggaactgcggaagccactggaaaaagaaggatggaagaaatcagactttcaggtgaatctaaacaatgcttcccgaagccagagcagtcattcatatgatgatagtactctccctctcattgaccggaaccaaaaatcagataagaaacctgatcgggaagaaattcagatgagcaatatgggatcaaacacaaaatcactagataacaactattccacaccaaatgagagaggagaccacaatagaacactggatcgatcgggggatctaggcgacatggagccattgaagggaacaacacccttgatgcagaagatttagcaccactatctccgttccatctgggcttatatgtacttttattttttggtggtgaaattgactgatgattttcctttttcttcgctggactattgtgccaactgccaggctgcctcctgcccttacagccctaagtggctgccttctttccatcaactcccaacttcttcctgtgaagtttaattgtctcaacgcctccccctcccccattccctccatttttctcccaagaaacctgactcaattatttgcatattttgagaaactgctgcagattagttctttttgccagttttccctggaactcctggccttttgtggaggggagggatggagagaataggaatcttcactagaagccgtgggaagaattggaagttacatgctgtatatgcaatgtccagcagtctgataaactgacgattcttaatcaagatttttttcctgatggggaagggacttttattttcttttagagaggggaaagtgtgagctcttcccttattcctaatggctatttttgaagcaaagaaggccagcaacattggcacatgccacctggcaaaggacccttgagtaagtgaaggtctcctaaaactgggattaagaaaccttgctctcctcatctccaaggcagggaccatcaagaacctacagactccatctcttctgcaagcctcatgccaaccctgggctattgctgctgccccttaaacacaggctgtccttaacccacctctcctgccctgtgatatgtctgctgagttggcctggccatttccaagaggctgtagaaaggggagaatgtcaaggaagacttttggtagagaaggagcagaaagatgtgtttttgggaagaagaagacctctaggaggagctagtaggaatgtacatgaagcaattagtctgaaactggcttccccactcccccgtttctccttttcctatccttataggcctgtcccttgcctctgccctggattggttggcaaactaaaggacttgatgtacataactcctgtcccttttcccttacaaggtggggattgcccctggctttgcctcttctttgtgcctttggcctggggtgcatctcctcccgcccttccatgtgcctttctttgcctctgcagtctcatttctcataattttgcaaattatattttgttgctttcttacctactattggccctaaatagcagaaagaagagaagtgaccgagagaacctcagattcttcattgaggattggtatagccatgatttcagtcatagcaagcttttgctcaacagcatatgggtgggattttgcaaaaatcctattctgatgaatctcaaagtaaggctggtaagagaagtgagtggtgtgactcttactccttaggtgcccagaatttaccatcatctctgaaggagttacagggaagtggtctccccaattctcccctccctccagtattgccccctctcactttagcatatattaattagcaggttgggctagagaaatcagctgctatgcgggttgattattattattatttctaatccttttccttatttgccttctactccccttaatctaatctaaaagctctgttccatgcaactggagttccttatccctctcttccccttcccttatatattgaggctatggggtaggagaaaagtgcacaacccaccaccccctttactcgtgcattaaaatttcttatttacccttttcccccttcccatttcttcccactttcatctaccttttctggcaaaaaggagccttttgctctctgtgaccctaagagcacactgcacagggaaaattgccccatccagacctggctccactcttgatctctcttgtcctcttctgctcttttcctggtgctcttttttctcggtggggtgtgggtaatagaacagccgtgggcttttggggacctttaacttttttttctctcttttgtttataaaaaacactaaacattcaattccagagaaccaaaaatcccaccttcccaccgaacactactaaggggcttgtgttctgctccataccttttctcttttctttctgtcttgttaatgcttttaaaaacaaatgagttttttatataaataaagtttttaaagtgtgtatgtggggggtctgtgtcatttcttcacttcaagctgttatttcttccctgctttgcatctttgttacttccttatgtatcagtgtcctttccagagcaaccagaaggaggttataccaggatttattttgagctcagccccaactctttatcaagcaacattcttgttaactatatgtgaaacattttttcttctgaagattcttaaaaattgaatgtggctgaagttgaacatgggagcttattgctaatttagagataggaaactgaagcataaagaattaatgacttactttaattactggaattcttctgcaacatttgacaaaactaaccttgaataaggcccactgtaatacgtagctctcttaaatataacacttaggactagaagattagaaactaccaatcccaactacgtaataggaaaatgtaggatcaaaaggcccatgtatataagtactgaccactgggccataatgttgcttctcaggctatatgcagtcctttagtcagaagtcaataggcctatttattaatattttacagaccatattacctggattaccagggactatctttgctgcagagatcaagggttaagatctatgggaagatacttatttttctgaggtccttatgtcctgtcatataattaaagactcaagagaatttatgtgaaatgctttctgtatgcccaaatctttagattaaaattatatagctgctcct

SEQ ID NO: 114948 - DNA, 6099 bp, Homo sapiens
  Payload ID: 2444
  Gene Symbol: CTNND1
  Gene Name: catenin (cadherin-associated protein), delta 1
  Uniprot ID: O60716
  ENST ID: ENST00000529526
  CDS Start-End: 590-3229
ctgccagatcagtttgtcaccacccaggctcccttgcctttggctgggtgcaacttccattttaggtgttggatctgagggggaaaaaaaagagagagggagagagagagaaagaagagcaggaaagatcccgaaaggaggaagaggtggcgaaaaatcaactgccctgctggatttgtctttctcagcaccttggcgaagccttgggtttctttcttaaaggactgatttttagaactccacatttgaggtgtgtggcttttgaagaaaatgtatgtactgacgggaaaaggaggataagcaagtcgaatttttgtcttacgctctctccttcctgcttcctccttgctgtggtggctgggatgcttcttccatgattttttgaatctagactgggctgttctctgtgttaaaccaatcagttgcgaccttctcttaacaggtggagtcgaccgccagcatcttggcctctgtgaaggaacaagaggcccagtttgagaagctgacccgggcgctggaggaggaacggcgccacgtctcggcgcagctggaacgcgtccgggtctcaccacaagatgccaacccactcatggccaacggcacactcacccgccggcatcagaacggccggtttgtgggcgatgctgaccttgaaagacagaaattttcagatttgaaactcaacggaccccaggatcacagtcaccttctatatagcaccatccccaggatgcaggagccggggcagattgtggagacctacacggaggaggatcctgagggagccatgtctgtagtctctgtggagacctcagatgatgggaccactcggcgcacagagaccacggtcaagaaagtagtgaagactgtgacaacacggacagtacagccagtcgctatgggaccagacgggttgcctgtggatgcttcatcagtttctaacaactatatccagactttgggtcgtgatttccgcaagaatggcaatgggggacctggtccctatgtggggcaagctggcactgctacccttcctaggaacttccactaccctcctgatggttatagtcgccactatgaagatggttatccaggtggcagtgataactatggcagtctgtcccgggtgacccgcattgaggagcggtataggcccagcatggaaggctaccgggcacctagtagacaggatgtgtatgggccccaaccccaggttcgggtaggtgggagcagcgtggatctgcatcgctttcatccagagccttatgggctagaggatgaccagcgtagtatgggctatgatgacctggattatggtatgatgtctgattatggcactgcccgtcggactgggacaccctctgaccctcgtcggcgcctcaggagctatgaagacatgattggtgaggaggtgccatcggatcaatactactgggctcctttggcccagcatgagcgaggaagtttagcaagcttggatagcctgcgcaaaggagggcctccacctcctaattggagacagccagagctgccagaggtgatcgccatgcttggattccgcttggatgctgtcaagtccaatgcagctgcatacctgcaacacttatgctaccgcaatgacaaggtgaagactgacgtgcggaagctcaagggcatcccagtactggtgggattgttagaccatcccaaaaaggaagtgcaccttggagcctgtggagctctcaagaatatctcttttggacgtgaccaggataacaagattgccataaaaaactgtgatggtgtgcctgcccttgtgcgattgcttcgaaaggctcgtgatatggaccttactgaagttattaccggaaccctgtggaatctttcatcccatgactcaatcaaaatggagattgtggaccatgcactgcatgccttgacagatgaagtgatcattcctcattctggttgggagcgggaacctaatgaagactgtaagccacgccacattgagtgggaatcggtgctcaccaacacagctggctgccttaggaatgtaagctcagagaggagtgaagctcgccggaaacttcgggaatgtgatggtttagttgatgccctcattttcattgttcaggctgagattgggcagaaggattcagacagcaagcttgtagagaactgtgtttgccttcttcggaacttatcatatcaagttcaccgggagatcccacaggcagagcgttaccaagaggcagctcccaatgttgccaacaatactgggccacatgctgccagttgctttggggccaagaagggcaaagggaaaaaacctatagaggatccagcaaacgatacagtggatttccctaaaagaacgagtccagctcgaggctatgagctcttatttcagccagaggtggttcggatatacatctcacttcttaaggagagcaagactcctgccatcctagaagcctcagctggagctatccagaacttgtgtgctgggcgctggacgtatggtcgatacatccgctctgctctgcgtcaagagaaggctctttctgccatagctgacctcctgactaatgaacatgaacgggtggtgaaagctgcatctggagcactgagaaacctggctgtggatgctcgcaacaaagaattaattggtaaacatgctattcctaacttggtaaagaatctgccaggaggacagcagaactcctcttggaatttctctgaggacactgtcatctctattttgaacactatcaacgaggttatcgctgagaacttggaggctgccaaaaagcttcgagagacacagggtattgagaagctggtgttgatcaacaaatcagggaaccgctcagaaaaagaagttcgagcagcagcacttgtattacagacaatctggggatataaggaactgcggaagccactggaaaaagaaggatggaagaaatcagactttcaggtgaatctaaacaatgcttcccgaagccagagcagtcattcatatgatgatagtactctccctctcattgaccggaaccaaaaatcagataagaaacctgatcgggaagaaattcagatgagcaatatgggatcaaacacaaaatcactagataacaactattccacaccaaatgagagaggagaccacaatagaacactggatcgatcgggggatctaggcgacatggagccattgaagggaacaacacccttgatgcagaagatttagcaccactatctccgttccatctgggcttatatgtacttttattttttggtggtgaaattgactgatgattttcctttttcttcgctggactattgtgccaactgccaggctgcctcctgcccttacagccctaagtggctgccttctttccatcaactcccaacttcttcctgtgaagtttaattgtctcaacgcctccccctcccccattccctccatttttctcccaagaaacctgactcaattatttgcatattttgagaaactgctgcagattagttctttttgccagttttccctggaactcctggccttttgtggaggggagggatggagagaataggaatcttcactagaagccgtgggaagaattggaagttacatgctgtatatgcaatgtccagcagtctgataaactgacgattcttaatcaagatttttttcctgatggggaagggacttttattttcttttagagaggggaaagtgtgagctcttcccttattcctaatggctatttttgaagcaaagaaggccagcaacattggcacatgccacctggcaaaggacccttgagtaagtgaaggtctcctaaaactgggattaagaaaccttgctctcctcatctccaaggcagggaccatcaagaacctacagactccatctcttctgcaagcctcatgccaaccctgggctattgctgctgccccttaaacacaggctgtccttaacccacctctcctgccctgtgatatgtctgctgagttggcctggccatttccaagaggctgtagaaaggggagaatgtcaaggaagacttttggtagagaaggagcagaaagatgtgtttttgggaagaagaagacctctaggaggagctagtaggaatgtacatgaagcaattagtctgaaactggcttccccactcccccgtttctccttttcctatccttataggcctgtcccttgcctctgccctggattggttggcaaactaaaggacttgatgtacataactcctgtcccttttcccttacaaggtggggattgcccctggctttgcctcttctttgtgcctttggcctggggtgcatctcctcccgcccttccatgtgcctttctttgcctctgcagtctcatttctcataattttgcaaattatattttgttgctttcttacctactattggccctaaatagcagaaagaagagaagtgaccgagagaacctcagattcttcattgaggattggtatagccatgatttcagtcatagcaagcttttgctcaacagcatatgggtgggattttgcaaaaatcctattctgatgaatctcaaagtaaggctggtaagagaagtgagtggtgtgactcttactccttaggtgcccagaatttaccatcatctctgaaggagttacagggaagtggtctccccaattctcccctccctccagtattgccccctctcactttagcatatattaattagcaggttgggctagagaaatcagctgctatgcgggttgattattattattatttctaatccttttccttatttgccttctactccccttaatctaatctaaaagctctgttccatgcaactggagttccttatccctctcttccccttcccttatatattgaggctatggggtaggagaaaagtgcacaacccaccaccccctttactcgtgcattaaaatttcttatttacccttttcccccttcccatttcttcccactttcatctaccttttctggcaaaaaggagccttttgctctctgtgaccctaagagcacactgcacagggaaaattgccccatccagacctggctccactcttgatctctcttgtcctcttctgctcttttcctggtgctcttttttctcggtggggtgtgggtaatagaacagccgtgggcttttggggacctttaacttttttttctctcttttgtttataaaaaacactaaacattcaattccagagaaccaaaaatcccaccttcccaccgaacactactaaggggcttgtgttctgctccataccttttctcttttctttctgtcttgttaatgcttttaaaaacaaatgagttttttatataaataaagtttttaaagtgtgtatgtggggggtctgtgtcatttcttcacttcaagctgttatttcttccctgctttgcatctttgttacttccttatgtatcagtgtcctttccagagcaaccagaaggaggttataccaggatttattttgagctcagccccaactctttatcaagcaacattcttgttaactatatgtgaaacattttttcttctgaagattcttaaaaattgaatgtggctgaagttgaacatgggagcttattgctaatttagagataggaaactgaagcataaagaattaatgacttactttaattactggaattcttctgcaacatttgacaaaactaaccttgaataaggcccactgtaatacgtagctctcttaaatataacacttaggactagaagattagaaactaccaatcccaactacgtaataggaaaatgtaggatcaaaaggcccatgtatataagtactgaccactgggccataatgttgcttctcaggctatatgcagtcctttagtcagaagtcaataggcctatttattaatattttacagaccatattacctggattaccagggactatctttgctgcagagatcaagggttaagatctatgggaagatacttatttttctgaggtccttatgtcctgtcatataattaaagactcaagagaatttatgtgaaatgctttctgtatgcccaaatctttagattaaaattatatagctgctcct

SEQ ID NO: 114949 - DNA, 6553 bp, Homo sapiens
  Payload ID: 2444
  Gene Symbol: CTNND1
  Gene Name: catenin (cadherin-associated protein), delta 1
  Uniprot ID: O60716
  ENST ID: ENST00000524630
  CDS Start-End: 514-3315
agaacaggaggagcgctttgggcgggaggctaagtctcgagggacttgagggctgagggaagatggctgggctgcaagaggcagggggatgggcccgtcagggaggaattcttgtgaaagccgtcgtctgcctcagcacttgatgaaaacacaccgaaaaagagggtagggatgctgtagtagagcaggcgccaaggcggttaagggtcatgtccgtcttccctttgaagaggcagtagatgcccttggctctgcctggagcgctccatgtttcgtgatggaagtctctggatggctctgctctctccttcctgcttcctccttgctgtggtggctgggatgcttcttccatgattttttgaatctagactgggctgttctctgtgttaaaccaatcagttgcgaccttctcttaacagtgtgaagtgagggggtctctctccctccttctccttcctctgtgattcaccttcctttttaccctgccctgcggcggctccgccccttaccttcatggacgactcagaggtggagtcgaccgccagcatcttggcctctgtgaaggaacaagaggcccagtttgagaagctgacccgggcgctggaggaggaacggcgccacgtctcggcgcagctggaacgcgtccgggtctcaccacaagatgccaacccactcatggccaacggcacactcacccgccggcatcagaacggccggtttgtgggcgatgctgaccttgaaagacagaaattttcagatttgaaactcaacggaccccaggatcacagtcaccttctatatagcaccatccccaggatgcaggagccggggcagattgtggagacctacacggaggaggatcctgagggagccatgtctgtagtctctgtggagacctcagatgatgggaccactcggcgcacagagaccacggtcaagaaagtagtgaagactgtgacaacacggacagtacagccagtcgctatgggaccagacgggttgcctgtggatgcttcatcagtttctaacaactatatccagactttgggtcgtgatttccgcaagaatggcaatgggggacctggtccctatgtggggcaagctggcactgctacccttcctaggaacttccactaccctcctgatggttatagtcgccactatgaagatggttatccaggtggcagtgataactatggcagtctgtcccgggtgacccgcattgaggagcggtataggcccagcatggaaggctaccgggcacctagtagacaggatgtgtatgggccccaaccccaggttcgggtaggtgggagcagcgtggatctgcatcgctttcatccagagccttatgggctagaggatgaccagcgtagtatgggctatgatgacctggattatggtatgatgtctgattatggcactgcccgtcggactgggacaccctctgaccctcgtcggcgcctcaggagctatgaagacatgattggtgaggaggtgccatcggatcaatactactgggctcctttggcccagcatgagcgaggaagtttagcaagcttggatagcctgcgcaaaggagggcctccacctcctaattggagacagccagagctgccagaggtgatcgccatgcttggattccgcttggatgctgtcaagtccaatgcagctgcatacctgcaacacttatgctaccgcaatgacaaggtgaagactgacgtgcggaagctcaagggcatcccagtactggtgggattgttagaccatcccaaaaaggaagtgcaccttggagcctgtggagctctcaagaatatctcttttggacgtgaccaggataacaagattgccataaaaaactgtgatggtgtgcctgcccttgtgcgattgcttcgaaaggctcgtgatatggaccttactgaagttattaccggaaccctgtggaatctttcatcccatgactcaatcaaaatggagattgtggaccatgcactgcatgccttgacagatgaagtgatcattcctcattctggttgggagcgggaacctaatgaagactgtaagccacgccacattgagtgggaatcggtgctcaccaacacagctggctgccttaggaatgtaagctcagagaggagtgaagctcgccggaaacttcgggaatgtgatggtttagttgatgccctcattttcattgttcaggctgagattgggcagaaggattcagacagcaagcttgtagagaactgtgtttgccttcttcggaacttatcatatcaagttcaccgggagatcccacaggcagagcgttaccaagaggcagctcccaatgttgccaacaatactgggccacatgctgccagttgctttggggccaagaagggcaaagggaaaaaacctatagaggatccagcaaacgatacagtggatttccctaaaagaacgagtccagctcgaggctatgagctcttatttcagccagaggtggttcggatatacatctcacttcttaaggagagcaagactcctgccatcctagaagcctcagctggagctatccagaacttgtgtgctgggcgctggacgtatggtcgatacatccgctctgctctgcgtcaagagaaggctctttctgccatagctgacctcctgactaatgaacatgaacgggtggtgaaagctgcatctggagcactgagaaacctggctgtggatgctcgcaacaaagaattaattggtaaacatgctattcctaacttggtaaagaatctgccaggaggacagcagaactcctcttggaatttctctgaggacactgtcatctctattttgaacactatcaacgaggttatcgctgagaacttggaggctgccaaaaagcttcgagagacacagggtattgagaagctggtgttgatcaacaaatcagggaaccgctcagaaaaagaagttcgagcagcagcacttgtattacagacaatctggggatataaggaactgcggaagccactggaaaaagaaggatggaagaaatcagactttcaggtgaatctaaacaatgcttcccgaagccagagcagtcattcatatgatgatagtactctccctctcattgaccggaaccaaaaatcagataagaaacctgatcgggaagaaattcagatgagcaatatgggatcaaacacaaaatcactagataacaactattccacaccaaatgagagaggagaccacaatagaacactggatcgatcgggggatctaggcgacatggagccattgaagggaacaacacccttgatgcagaagatttagcaccactatctccgttccatctgggcttatatgtacttttattttttggtggtgaaattgactgatgattttcctttttcttcgctggactattgtgccaactgccaggctgcctcctgcccttacagccctaagtggctgccttctttccatcaactcccaacttcttcctgtgaagtttaattgtctcaacgcctccccctcccccattccctccatttttctcccaagaaacctgactcaattatttgcatattttgagaaactgctgcagattagttctttttgccagttttccctggaactcctggccttttgtggaggggagggatggagagaataggaatcttcactagaagccgtgggaagaattggaagttacatgctgtatatgcaatgtccagcagtctgataaactgacgattcttaatcaagatttttttcctgatggggaagggacttttattttcttttagagaggggaaagtgtgagctcttcccttattcctaatggctatttttgaagcaaagaaggccagcaacattggcacatgccacctggcaaaggacccttgagtaagtgaaggtctcctaaaactgggattaagaaaccttgctctcctcatctccaaggcagggaccatcaagaacctacagactccatctcttctgcaagcctcatgccaaccctgggctattgctgctgccccttaaacacaggctgtccttaacccacctctcctgccctgtgatatgtctgctgagttggcctggccatttccaagaggctgtagaaaggggagaatgtcaaggaagacttttggtagagaaggagcagaaagatgtgtttttgggaagaagaagacctctaggaggagctagtaggaatgtacatgaagcaattagtctgaaactggcttccccactcccccgtttctccttttcctatccttataggcctgtcccttgcctctgccctggattggttggcaaactaaaggacttgatgtacataactcctgtcccttttcccttacaaggtggggattgcccctggctttgcctcttctttgtgcctttggcctggggtgcatctcctcccgcccttccatgtgcctttctttgcctctgcagtctcatttctcataattttgcaaattatattttgttgctttcttacctactattggccctaaatagcagaaagaagagaagtgaccgagagaacctcagattcttcattgaggattggtatagccatgatttcagtcatagcaagcttttgctcaacagcatatgggtgggattttgcaaaaatcctattctgatgaatctcaaagtaaggctggtaagagaagtgagtggtgtgactcttactccttaggtgcccagaatttaccatcatctctgaaggagttacagggaagtggtctccccaattctcccctccctccagtattgccccctctcactttagcatatattaattagcaggttgggctagagaaatcagctgctatgcgggttgattattattattatttctaatccttttccttatttgccttctactccccttaatctaatctaaaagctctgttccatgcaactggagttccttatccctctcttccccttcccttatatattgaggctatggggtaggagaaaagtgcacaacccaccaccccctttactcgtgcattaaaatttcttatttacccttttcccccttcccatttcttcccactttcatctaccttttctggcaaaaaggagccttttgctctctgtgaccctaagagcacactgcacagggaaaattgccccatccagacctggctccactcttgatctctcttgtcctcttctgctcttttcctggtgctcttttttctcggtggggtgtgggtaatagaacagccgtgggcttttggggacctttaacttttttttctctcttttgtttataaaaaacactaaacattcaattccagagaaccaaaaatcccaccttcccaccgaacactactaaggggcttgtgttctgctccataccttttctcttttctttctgtcttgttaatgcttttaaaaacaaatgagttttttatataaataaagtttttaaagtgtgtatgtggggggtctgtgtcatttcttcacttcaagctgttatttcttccctgctttgcatctttgttacttccttatgtatcagtgtcctttccagagcaaccagaaggaggttataccaggatttattttgagctcagccccaactctttatcaagcaacattcttgttaactatatgtgaaacattttttcttctgaagattcttaaaaattgaatgtggctgaagttgaacatgggagcttattgctaatttagagataggaaactgaagcataaagaattaatgacttactttaattactggaattcttctgcaacatttgacaaaactaaccttgaataaggcccactgtaatacgtagctctcttaaatataacacttaggactagaagattagaaactaccaatcccaactacgtaataggaaaatgtaggatcaaaaggcccatgtatataagtactgaccactgggccataatgttgcttctcaggctatatgcagtcctttagtcagaagtcaataggcctatttattaatattttacagaccatattacctggattaccagggactatctttgctgcagagatcaagggttaagatctatgggaagatacttatttttctgaggtccttatgtcctgtcatataattaaagactcaagagaatttatgtgaaatgctttctgtatgcccaaatctttagattaaaattatatagctgctcctgatgatggtcctgtcttgttttattgaactaggacttgggtatgaaaactttcatgggctagtgagaccaggaaatcaactagcttttaaagcttgatttgtgtctaacaattgtagtgttagattagaggttgaagtacaaagccaaaaagctattaagagtttactttccaaagagttttgatagccctgcttgagatgatttttatctaaatagaaaagcctggctgcttgtcagcaacactttatttccctgttatgttcttatcctttggcattgagctagatacaaaccctactcttctctcttccttctggattggtccatttgtttatctcattcaataaatatttgccaagcacctcct

SEQ ID NO: 114950 - DNA, 5925 bp, Homo sapiens
  Payload ID: 2444
  Gene Symbol: CTNND1
  Gene Name: catenin (cadherin-associated protein), delta 1
  Uniprot ID: O60716
  ENST ID: ENST00000530748
  CDS Start-End: 398-3055
ctgccagatcagtttgtcaccacccaggctcccttgcctttggctgggtgcaacttccattttaggtgttggatctgagggggaaaaaaaagagagagggagagagagagaaagaagagcaggaaagatcccgaaaggaggaagaggtggcgaaaaatcaactgccctgctggatttgtctttctcagcaccttggcgaagccttgggtttctttcttaaaggactgatttttagaactccacatttgaggtggagtcgaccgccagcatcttggcctctgtgaaggaacaagaggcccagtttgagaagctgacccgggcgctggaggaggaacggcgccacgtctcggcgcagctggaacgcgtccgggtctcaccacaagatgccaacccactcatggccaacggcacactcacccgccggcatcagaacggccggtttgtgggcgatgctgaccttgaaagacagaaattttcagatttgaaactcaacggaccccaggatcacagtcaccttctatatagcaccatccccaggatgcaggagccggggcagattgtggagacctacacggaggaggatcctgagggagccatgtctgtagtctctgtggagacctcagatgatgggaccactcggcgcacagagaccacggtcaagaaagtagtgaagactgtgacaacacggacagtacagccagtcgctatgggaccagacgggttgcctgtggatgcttcatcagtttctaacaactatatccagactttgggtcgtgatttccgcaagaatggcaatgggggacctggtccctatgtggggcaagctggcactgctacccttcctaggaacttccactaccctcctgatggttatagtcgccactatgaagatggttatccaggtggcagtgataactatggcagtctgtcccgggtgacccgcattgaggagcggtataggcccagcatggaaggctaccgggcacctagtagacaggatgtgtatgggccccaaccccaggttcgggtaggtgggagcagcgtggatctgcatcgctttcatccagagccttatgggctagaggatgaccagcgtagtatgggctatgatgacctggattatggtatgatgtctgattatggcactgcccgtcggactgggacaccctctgaccctcgtcggcgcctcaggagctatgaagacatgattggtgaggaggtgccatcggatcaatactactgggctcctttggcccagcatgagcgaggaagtttagcaagcttggatagcctgcgcaaaggagggcctccacctcctaattggagacagccagagctgccagaggtgatcgccatgcttggattccgcttggatgctgtcaagtccaatgcagctgcatacctgcaacacttatgctaccgcaatgacaaggtgaagactgacgtgcggaagctcaagggcatcccagtactggtgggattgttagaccatcccaaaaaggaagtgcaccttggagcctgtggagctctcaagaatatctcttttggacgtgaccaggataacaagattgccataaaaaactgtgatggtgtgcctgcccttgtgcgattgcttcgaaaggctcgtgatatggaccttactgaagttattaccggaaccctgtggaatctttcatcccatgactcaatcaaaatggagattgtggaccatgcactgcatgccttgacagatgaagtgatcattcctcattctggttgggagcgggaacctaatgaagactgtaagccacgccacattgagtgggaatcggtgctcaccaacacagctggctgccttaggaatgtaagctcagagaggagtgaagctcgccggaaacttcgggaatgtgatggtttagttgatgccctcattttcattgttcaggctgagattgggcagaaggattcagacagcaagcttgtagagaactgtgtttgccttcttcggaacttatcatatcaagttcaccgggagatcccacaggcagagcgttaccaagaggcagctcccaatgttgccaacaatactgggccacatgctgccagttgctttggggccaagaagggcaaagatgagtggttctccagagggaaaaaacctatagaggatccagcaaacgatacagtggatttccctaaaagaacgagtccagctcgaggctatgagctcttatttcagccagaggtggttcggatatacatctcacttcttaaggagagcaagactcctgccatcctagaagcctcagctggagctatccagaacttgtgtgctgggcgctggacgtatggtcgatacatccgctctgctctgcgtcaagagaaggctctttctgccatagctgacctcctgactaatgaacatgaacgggtggtgaaagctgcatctggagcactgagaaacctggctgtggatgctcgcaacaaagaattaattggtaaacatgctattcctaacttggtaaagaatctgccaggaggacagcagaactcctcttggaatttctctgaggacactgtcatctctattttgaacactatcaacgaggttatcgctgagaacttggaggctgccaaaaagcttcgagagacacagggtattgagaagctggtgttgatcaacaaatcagggaaccgctcagaaaaagaagttcgagcagcagcacttgtattacagacaatctggggatataaggaactgcggaagccactggaaaaagaaggatggaagaaatcagactttcaggtgaatctaaacaatgcttcccgaagccagagcagtcattcatatgatgatagtactctccctctcattgaccggaaccaaaaatcagataagaaacctgatcgggaagaaattcagatgagcaatatgggatcaaacacaaaatcactagataacaactattccacaccaaatgagagaggagaccacaatagaacactggatcgatcgggggatctaggcgacatggagccattgaagggaacaacacccttgatgcagaagatttagcaccactatctccgttccatctgggcttatatgtacttttattttttggtggtgaaattgactgatgattttcctttttcttcgctggactattgtgccaactgccaggctgcctcctgcccttacagccctaagtggctgccttctttccatcaactcccaacttcttcctgtgaagtttaattgtctcaacgcctccccctcccccattccctccatttttctcccaagaaacctgactcaattatttgcatattttgagaaactgctgcagattagttctttttgccagttttccctggaactcctggccttttgtggaggggagggatggagagaataggaatcttcactagaagccgtgggaagaattggaagttacatgctgtatatgcaatgtccagcagtctgataaactgacgattcttaatcaagatttttttcctgatggggaagggacttttattttcttttagagaggggaaagtgtgagctcttcccttattcctaatggctatttttgaagcaaagaaggccagcaacattggcacatgccacctggcaaaggacccttgagtaagtgaaggtctcctaaaactgggattaagaaaccttgctctcctcatctccaaggcagggaccatcaagaacctacagactccatctcttctgcaagcctcatgccaaccctgggctattgctgctgccccttaaacacaggctgtccttaacccacctctcctgccctgtgatatgtctgctgagttggcctggccatttccaagaggctgtagaaaggggagaatgtcaaggaagacttttggtagagaaggagcagaaagatgtgtttttgggaagaagaagacctctaggaggagctagtaggaatgtacatgaagcaattagtctgaaactggcttccccactcccccgtttctccttttcctatccttataggcctgtcccttgcctctgccctggattggttggcaaactaaaggacttgatgtacataactcctgtcccttttcccttacaaggtggggattgcccctggctttgcctcttctttgtgcctttggcctggggtgcatctcctcccgcccttccatgtgcctttctttgcctctgcagtctcatttctcataattttgcaaattatattttgttgctttcttacctactattggccctaaatagcagaaagaagagaagtgaccgagagaacctcagattcttcattgaggattggtatagccatgatttcagtcatagcaagcttttgctcaacagcatatgggtgggattttgcaaaaatcctattctgatgaatctcaaagtaaggctggtaagagaagtgagtggtgtgactcttactccttaggtgcccagaatttaccatcatctctgaaggagttacagggaagtggtctccccaattctcccctccctccagtattgccccctctcactttagcatatattaattagcaggttgggctagagaaatcagctgctatgcgggttgattattattattatttctaatccttttccttatttgccttctactccccttaatctaatctaaaagctctgttccatgcaactggagttccttatccctctcttccccttcccttatatattgaggctatggggtaggagaaaagtgcacaacccaccaccccctttactcgtgcattaaaatttcttatttacccttttcccccttcccatttcttcccactttcatctaccttttctggcaaaaaggagccttttgctctctgtgaccctaagagcacactgcacagggaaaattgccccatccagacctggctccactcttgatctctcttgtcctcttctgctcttttcctggtgctcttttttctcggtggggtgtgggtaatagaacagccgtgggcttttggggacctttaacttttttttctctcttttgtttataaaaaacactaaacattcaattccagagaaccaaaaatcccaccttcccaccgaacactactaaggggcttgtgttctgctccataccttttctcttttctttctgtcttgttaatgcttttaaaaacaaatgagttttttatataaataaagtttttaaagtgtgtatgtggggggtctgtgtcatttcttcacttcaagctgttatttcttccctgctttgcatctttgttacttccttatgtatcagtgtcctttccagagcaaccagaaggaggttataccaggatttattttgagctcagccccaactctttatcaagcaacattcttgttaactatatgtgaaacattttttcttctgaagattcttaaaaattgaatgtggctgaagttgaacatgggagcttattgctaatttagagataggaaactgaagcataaagaattaatgacttactttaattactggaattcttctgcaacatttgacaaaactaaccttgaataaggcccactgtaatacgtagctctcttaaatataacacttaggactagaagattagaaactaccaatcccaactacgtaataggaaaatgtaggatcaaaaggcccatgtatataagtactgaccactgggccataatgttgcttctcaggctatatgcagtcctttagtcagaagtcaataggcctatttattaatattttacagaccatattacctggattaccagggactatctttgctgcagagatcaagggttaagatctatgggaagatacttatttttctgaggtccttatgtcctgtcatataattaaagactcaagagaatttatgtgaaatgctttctgtatgcccaaatctttagattaaaattatatagctgctcct

SEQ ID NO: 114951 - DNA, 4990 bp, Homo sapiens
  Payload ID: 2444
  Gene Symbol: CTNND1
  Gene Name: catenin (cadherin-associated protein), delta 1
  Uniprot ID: O60716
  ENST ID: ENST00000533667
  CDS Start-End: 264-2120
ctgccagatcagtttgtcaccacccaggctcccttgcctttggctgggtgcaacttccattttaggtgttggatctgagggggaaaaaaaagagagagggagagagagagaaagaagagcaggaaagatcccgaaaggaggaagaggtggcgaaaaatcaactgccctgctggatttgtctttctcagcaccttggcgaagccttgggtttctttcttaaaggactgatttttagaactccacatttgaggagctatgaagacatgattggtgaggaggtgccatcggatcaatactactgggctcctttggcccagcatgagcgaggaagtttagcaagcttggatagcctgcgcaaaggagggcctccacctcctaattggagacagccagagctgccagaggtgatcgccatgcttggattccgcttggatgctgtcaagtccaatgcagctgcatacctgcaacacttatgctaccgcaatgacaaggtgaagactgacgtgcggaagctcaagggcatcccagtactggtgggattgttagaccatcccaaaaaggaagtgcaccttggagcctgtggagctctcaagaatatctcttttggacgtgaccaggataacaagattgccataaaaaactgtgatggtgtgcctgcccttgtgcgattgcttcgaaaggctcgtgatatggaccttactgaagttattaccggaaccctgtggaatctttcatcccatgactcaatcaaaatggagattgtggaccatgcactgcatgccttgacagatgaagtgatcattcctcattctggttgggagcgggaacctaatgaagactgtaagccacgccacattgagtgggaatcggtgctcaccaacacagctggctgccttaggaatgtaagctcagagaggagtgaagctcgccggaaacttcgggaatgtgatggtttagttgatgccctcattttcattgttcaggctgagattgggcagaaggattcagacagcaagcttgtagagaactgtgtttgccttcttcggaacttatcatatcaagttcaccgggagatcccacaggcagagcgttaccaagaggcagctcccaatgttgccaacaatactgggccacatgctgccagttgctttggggccaagaagggcaaagggaaaaaacctatagaggatccagcaaacgatacagtggatttccctaaaagaacgagtccagctcgaggctatgagctcttatttcagccagaggtggttcggatatacatctcacttcttaaggagagcaagactcctgccatcctagaagcctcagctggagctatccagaacttgtgtgctgggcgctggacgtatggtcgatacatccgctctgctctgcgtcaagagaaggctctttctgccatagctgacctcctgactaatgaacatgaacgggtggtgaaagctgcatctggagcactgagaaacctggctgtggatgctcgcaacaaagaattaattggtaaacatgctattcctaacttggtaaagaatctgccaggaggacagcagaactcctcttggaatttctctgaggacactgtcatctctattttgaacactatcaacgaggttatcgctgagaacttggaggctgccaaaaagcttcgagagacacagggtattgagaagctggtgttgatcaacaaatcagggaaccgctcagaaaaagaagttcgagcagcagcacttgtattacagacaatctggggatataaggaactgcggaagccactggaaaaagaaggatggaagaaatcagactttcaggtgaatctaaacaatgcttcccgaagccagagcagtcattcatatgatgatagtactctccctctcattgaccggaaccaaaaatcagataacaactattccacaccaaatgagagaggagaccacaatagaacactggatcgatcgggggatctaggcgacatggagccattgaagggaacaacacccttgatgcaggacgaggggcaggaatctctggaggaagagttggatgtgttggttttggatgatgaggggggccaagtgtcttacccctccatgcagaagatttagcaccactatctccgttccatctgggcttatatgtacttttattttttggtggtgaaattgactgatgattttcctttttcttcgctggactattgtgccaactgccaggctgcctcctgcccttacagccctaagtggctgccttctttccatcaactcccaacttcttcctgtgaagtttaattgtctcaacgcctccccctcccccattccctccatttttctcccaagaaacctgactcaattatttgcatattttgagaaactgctgcagattagttctttttgccagttttccctggaactcctggccttttgtggaggggagggatggagagaataggaatcttcactagaagccgtgggaagaattggaagttacatgctgtatatgcaatgtccagcagtctgataaactgacgattcttaatcaagatttttttcctgatggggaagggacttttattttcttttagagaggggaaagtgtgagctcttcccttattcctaatggctatttttgaagcaaagaaggccagcaacattggcacatgccacctggcaaaggacccttgagtaagtgaaggtctcctaaaactgggattaagaaaccttgctctcctcatctccaaggcagggaccatcaagaacctacagactccatctcttctgcaagcctcatgccaaccctgggctattgctgctgccccttaaacacaggctgtccttaacccacctctcctgccctgtgatatgtctgctgagttggcctggccatttccaagaggctgtagaaaggggagaatgtcaaggaagacttttggtagagaaggagcagaaagatgtgtttttgggaagaagaagacctctaggaggagctagtaggaatgtacatgaagcaattagtctgaaactggcttccccactcccccgtttctccttttcctatccttataggcctgtcccttgcctctgccctggattggttggcaaactaaaggacttgatgtacataactcctgtcccttttcccttacaaggtggggattgcccctggctttgcctcttctttgtgcctttggcctggggtgcatctcctcccgcccttccatgtgcctttctttgcctctgcagtctcatttctcataattttgcaaattatattttgttgctttcttacctactattggccctaaatagcagaaagaagagaagtgaccgagagaacctcagattcttcattgaggattggtatagccatgatttcagtcatagcaagcttttgctcaacagcatatgggtgggattttgcaaaaatcctattctgatgaatctcaaagtaaggctggtaagagaagtgagtggtgtgactcttactccttaggtgcccagaatttaccatcatctctgaaggagttacagggaagtggtctccccaattctcccctccctccagtattgccccctctcactttagcatatattaattagcaggttgggctagagaaatcagctgctatgcgggttgattattattattatttctaatccttttccttatttgccttctactccccttaatctaatctaaaagctctgttccatgcaactggagttccttatccctctcttccccttcccttatatattgaggctatggggtaggagaaaagtgcacaacccaccaccccctttactcgtgcattaaaatttcttatttacccttttcccccttcccatttcttcccactttcatctaccttttctggcaaaaaggagccttttgctctctgtgaccctaagagcacactgcacagggaaaattgccccatccagacctggctccactcttgatctctcttgtcctcttctgctcttttcctggtgctcttttttctcggtggggtgtgggtaatagaacagccgtgggcttttggggacctttaacttttttttctctcttttgtttataaaaaacactaaacattcaattccagagaaccaaaaatcccaccttcccaccgaacactactaaggggcttgtgttctgctccataccttttctcttttctttctgtcttgttaatgcttttaaaaacaaatgagttttttatataaataaagtttttaaagtgtgtatgtggggggtctgtgtcatttcttcacttcaagctgttatttcttccctgctttgcatctttgttacttccttatgtatcagtgtcctttccagagcaaccagaaggaggttataccaggatttattttgagctcagccccaactctttatcaagcaacattcttgttaactatatgtgaaacattttttcttctgaagattcttaaaaattgaatgtggctgaagttgaacatgggagcttattgctaatttagagataggaaactgaagcataaagaattaatgacttactttaattactggaattcttctgcaacatttgacaaaactaaccttgaataaggcccactgtaatacgtagctctcttaaatataacacttaggactagaagattagaaactaccaatcccaactacgtaataggaaaatgtaggatcaaaaggcccatgtatataagtactgaccactgggccataatgttgcttctcaggctatatgcagtcctttagtcagaagtcaataggcctatttattaatattttacagaccatattacctggattaccagggactatctttgctgcagagatcaagggttaagatctatgggaagatacttatttttctgaggtccttatgtcctgtcatataattaaagactcaagagaatttatgtgaaatgctttctgtatgcccaaatctttagattaaaattatatagctgctcct

SEQ ID NO: 114952 - DNA, 5727 bp, Homo sapiens
  Payload ID: 2444
  Gene Symbol: CTNND1
  Gene Name: catenin (cadherin-associated protein), delta 1
  Uniprot ID: O60716
  ENST ID: ENST00000529986
  CDS Start-End: 359-2857
ctgccagatcagtttgtcaccacccaggctcccttgcctttggctgggtgcaacttccattttaggtgttggatctgagggggaaaaaaaagagagagggagagagagagaaagaagagcaggaaagatcccgaaaggaggaagaggtggcgaaaaatcaactgccctgctggatttgtctttctcagcaccttggcgaagccttgggtttctttcttaaaggactgatttttagaactccacatttgagaacggccggtttgtgggcgatgctgaccttgaaagacagaaattttcagatttgaaactcaacggaccccaggatcacagtcaccttctatatagcaccatccccaggatgcaggagccggggcagattgtggagacctacacggaggaggatcctgagggagccatgtctgtagtctctgtggagacctcagatgatgggaccactcggcgcacagagaccacggtcaagaaagtagtgaagactgtgacaacacggacagtacagccagtcgctatgggaccagacgggttgcctgtggatgcttcatcagtttctaacaactatatccagactttgggtcgtgatttccgcaagaatggcaatgggggacctggtccctatgtggggcaagctggcactgctacccttcctaggaacttccactaccctcctgatggttatagtcgccactatgaagatggttatccaggtggcagtgataactatggcagtctgtcccgggtgacccgcattgaggagcggtataggcccagcatggaaggctaccgggcacctagtagacaggatgtgtatgggccccaaccccaggttcgggtaggtgggagcagcgtggatctgcatcgctttcatccagagccttatgggctagaggatgaccagcgtagtatgggctatgatgacctggattatggtatgatgtctgattatggcactgcccgtcggactgggacaccctctgaccctcgtcggcgcctcaggagctatgaagacatgattggtgaggaggtgccatcggatcaatactactgggctcctttggcccagcatgagcgaggaagtttagcaagcttggatagcctgcgcaaaggagggcctccacctcctaattggagacagccagagctgccagaggtgatcgccatgcttggattccgcttggatgctgtcaagtccaatgcagctgcatacctgcaacacttatgctaccgcaatgacaaggtgaagactgacgtgcggaagctcaagggcatcccagtactggtgggattgttagaccatcccaaaaaggaagtgcaccttggagcctgtggagctctcaagaatatctcttttggacgtgaccaggataacaagattgccataaaaaactgtgatggtgtgcctgcccttgtgcgattgcttcgaaaggctcgtgatatggaccttactgaagttattaccggaaccctgtggaatctttcatcccatgactcaatcaaaatggagattgtggaccatgcactgcatgccttgacagatgaagtgatcattcctcattctggttgggagcgggaacctaatgaagactgtaagccacgccacattgagtgggaatcggtgctcaccaacacagctggctgccttaggaatgtaagctcagagaggagtgaagctcgccggaaacttcgggaatgtgatggtttagttgatgccctcattttcattgttcaggctgagattgggcagaaggattcagacagcaagcttgtagagaactgtgtttgccttcttcggaacttatcatatcaagttcaccgggagatcccacaggcagagcgttaccaagaggcagctcccaatgttgccaacaatactgggccacatgctgccagttgctttggggccaagaagggcaaagggaaaaaacctatagaggatccagcaaacgatacagtggatttccctaaaagaacgagtccagctcgaggctatgagctcttatttcagccagaggtggttcggatatacatctcacttcttaaggagagcaagactcctgccatcctagaagcctcagctggagctatccagaacttgtgtgctgggcgctggacgtatggtcgatacatccgctctgctctgcgtcaagagaaggctctttctgccatagctgacctcctgactaatgaacatgaacgggtggtgaaagctgcatctggagcactgagaaacctggctgtggatgctcgcaacaaagaattaattggtaaacatgctattcctaacttggtaaagaatctgccaggaggacagcagaactcctcttggaatttctctgaggacactgtcatctctattttgaacactatcaacgaggttatcgctgagaacttggaggctgccaaaaagcttcgagagacacagggtattgagaagctggtgttgatcaacaaatcagggaaccgctcagaaaaagaagttcgagcagcagcacttgtattacagacaatctggggatataaggaactgcggaagccactggaaaaagaaggatggaagaaatcagactttcaggtgaatctaaacaatgcttcccgaagccagagcagtcattcatatgatgatagtactctccctctcattgaccggaaccaaaaatcagataagaaacctgatcgggaagaaattcagatgagcaatatgggatcaaacacaaaatcactagataacaactattccacaccaaatgagagaggagaccacaatagaacactggatcgatcgggggatctaggcgacatggagccattgaagggaacaacacccttgatgcagaagatttagcaccactatctccgttccatctgggcttatatgtacttttattttttggtggtgaaattgactgatgattttcctttttcttcgctggactattgtgccaactgccaggctgcctcctgcccttacagccctaagtggctgccttctttccatcaactcccaacttcttcctgtgaagtttaattgtctcaacgcctccccctcccccattccctccatttttctcccaagaaacctgactcaattatttgcatattttgagaaactgctgcagattagttctttttgccagttttccctggaactcctggccttttgtggaggggagggatggagagaataggaatcttcactagaagccgtgggaagaattggaagttacatgctgtatatgcaatgtccagcagtctgataaactgacgattcttaatcaagatttttttcctgatggggaagggacttttattttcttttagagaggggaaagtgtgagctcttcccttattcctaatggctatttttgaagcaaagaaggccagcaacattggcacatgccacctggcaaaggacccttgagtaagtgaaggtctcctaaaactgggattaagaaaccttgctctcctcatctccaaggcagggaccatcaagaacctacagactccatctcttctgcaagcctcatgccaaccctgggctattgctgctgccccttaaacacaggctgtccttaacccacctctcctgccctgtgatatgtctgctgagttggcctggccatttccaagaggctgtagaaaggggagaatgtcaaggaagacttttggtagagaaggagcagaaagatgtgtttttgggaagaagaagacctctaggaggagctagtaggaatgtacatgaagcaattagtctgaaactggcttccccactcccccgtttctccttttcctatccttataggcctgtcccttgcctctgccctggattggttggcaaactaaaggacttgatgtacataactcctgtcccttttcccttacaaggtggggattgcccctggctttgcctcttctttgtgcctttggcctggggtgcatctcctcccgcccttccatgtgcctttctttgcctctgcagtctcatttctcataattttgcaaattatattttgttgctttcttacctactattggccctaaatagcagaaagaagagaagtgaccgagagaacctcagattcttcattgaggattggtatagccatgatttcagtcatagcaagcttttgctcaacagcatatgggtgggattttgcaaaaatcctattctgatgaatctcaaagtaaggctggtaagagaagtgagtggtgtgactcttactccttaggtgcccagaatttaccatcatctctgaaggagttacagggaagtggtctccccaattctcccctccctccagtattgccccctctcactttagcatatattaattagcaggttgggctagagaaatcagctgctatgcgggttgattattattattatttctaatccttttccttatttgccttctactccccttaatctaatctaaaagctctgttccatgcaactggagttccttatccctctcttccccttcccttatatattgaggctatggggtaggagaaaagtgcacaacccaccaccccctttactcgtgcattaaaatttcttatttacccttttcccccttcccatttcttcccactttcatctaccttttctggcaaaaaggagccttttgctctctgtgaccctaagagcacactgcacagggaaaattgccccatccagacctggctccactcttgatctctcttgtcctcttctgctcttttcctggtgctcttttttctcggtggggtgtgggtaatagaacagccgtgggcttttggggacctttaacttttttttctctcttttgtttataaaaaacactaaacattcaattccagagaaccaaaaatcccaccttcccaccgaacactactaaggggcttgtgttctgctccataccttttctcttttctttctgtcttgttaatgcttttaaaaacaaatgagttttttatataaataaagtttttaaagtgtgtatgtggggggtctgtgtcatttcttcacttcaagctgttatttcttccctgctttgcatctttgttacttccttatgtatcagtgtcctttccagagcaaccagaaggaggttataccaggatttattttgagctcagccccaactctttatcaagcaacattcttgttaactatatgtgaaacattttttcttctgaagattcttaaaaattgaatgtggctgaagttgaacatgggagcttattgctaatttagagataggaaactgaagcataaagaattaatgacttactttaattactggaattcttctgcaacatttgacaaaactaaccttgaataaggcccactgtaatacgtagctctcttaaatataacacttaggactagaagattagaaactaccaatcccaactacgtaataggaaaatgtaggatcaaaaggcccatgtatataagtactgaccactgggccataatgttgcttctcaggctatatgcagtcctttagtcagaagtcaataggcctatttattaatattttacagaccatattacctggattaccagggactatctttgctgcagagatcaagggttaagatctatgggaagatacttatttttctgaggtccttatgtcctgtcatataattaaagactcaagagaatttatgtgaaatgctttctgtatgcccaaatctttagattaaaattatatagctgctcct

SEQ ID NO: 114953 - DNA, 5814 bp, Homo sapiens
  Payload ID: 2444
  Gene Symbol: CTNND1
  Gene Name: catenin (cadherin-associated protein), delta 1
  Uniprot ID: O60716
  ENST ID: ENST00000530094
  CDS Start-End: 359-2944
ctgccagatcagtttgtcaccacccaggctcccttgcctttggctgggtgcaacttccattttaggtgttggatctgagggggaaaaaaaagagagagggagagagagagaaagaagagcaggaaagatcccgaaaggaggaagaggtggcgaaaaatcaactgccctgctggatttgtctttctcagcaccttggcgaagccttgggtttctttcttaaaggactgatttttagaactccacatttgagaacggccggtttgtgggcgatgctgaccttgaaagacagaaattttcagatttgaaactcaacggaccccaggatcacagtcaccttctatatagcaccatccccaggatgcaggagccggggcagattgtggagacctacacggaggaggatcctgagggagccatgtctgtagtctctgtggagacctcagatgatgggaccactcggcgcacagagaccacggtcaagaaagtagtgaagactgtgacaacacggacagtacagccagtcgctatgggaccagacgggttgcctgtggatgcttcatcagtttctaacaactatatccagactttgggtcgtgatttccgcaagaatggcaatgggggacctggtccctatgtggggcaagctggcactgctacccttcctaggaacttccactaccctcctgatggttatagtcgccactatgaagatggttatccaggtggcagtgataactatggcagtctgtcccgggtgacccgcattgaggagcggtataggcccagcatggaaggctaccgggcacctagtagacaggatgtgtatgggccccaaccccaggttcgggtaggtgggagcagcgtggatctgcatcgctttcatccagagccttatgggctagaggatgaccagcgtagtatgggctatgatgacctggattatggtatgatgtctgattatggcactgcccgtcggactgggacaccctctgaccctcgtcggcgcctcaggagctatgaagacatgattggtgaggaggtgccatcggatcaatactactgggctcctttggcccagcatgagcgaggaagtttagcaagcttggatagcctgcgcaaaggagggcctccacctcctaattggagacagccagagctgccagaggtgatcgccatgcttggattccgcttggatgctgtcaagtccaatgcagctgcatacctgcaacacttatgctaccgcaatgacaaggtgaagactgacgtgcggaagctcaagggcatcccagtactggtgggattgttagaccatcccaaaaaggaagtgcaccttggagcctgtggagctctcaagaatatctcttttggacgtgaccaggataacaagattgccataaaaaactgtgatggtgtgcctgcccttgtgcgattgcttcgaaaggctcgtgatatggaccttactgaagttattaccggaaccctgtggaatctttcatcccatgactcaatcaaaatggagattgtggaccatgcactgcatgccttgacagatgaagtgatcattcctcattctggttgggagcgggaacctaatgaagactgtaagccacgccacattgagtgggaatcggtgctcaccaacacagctggctgccttaggaatgtaagctcagagaggagtgaagctcgccggaaacttcgggaatgtgatggtttagttgatgccctcattttcattgttcaggctgagattgggcagaaggattcagacagcaagcttgtagagaactgtgtttgccttcttcggaacttatcatatcaagttcaccgggagatcccacaggcagagcgttaccaagaggcagctcccaatgttgccaacaatactgggccacatgctgccagttgctttggggccaagaagggcaaagggaaaaaacctatagaggatccagcaaacgatacagtggatttccctaaaagaacgagtccagctcgaggctatgagctcttatttcagccagaggtggttcggatatacatctcacttcttaaggagagcaagactcctgccatcctagaagcctcagctggagctatccagaacttgtgtgctgggcgctggacgtatggtcgatacatccgctctgctctgcgtcaagagaaggctctttctgccatagctgacctcctgactaatgaacatgaacgggtggtgaaagctgcatctggagcactgagaaacctggctgtggatgctcgcaacaaagaattaattggtaaacatgctattcctaacttggtaaagaatctgccaggaggacagcagaactcctcttggaatttctctgaggacactgtcatctctattttgaacactatcaacgaggttatcgctgagaacttggaggctgccaaaaagcttcgagagacacagggtattgagaagctggtgttgatcaacaaatcagggaaccgctcagaaaaagaagttcgagcagcagcacttgtattacagacaatctggggatataaggaactgcggaagccactggaaaaagaaggatggaagaaatcagactttcaggtgaatctaaacaatgcttcccgaagccagagcagtcattcatatgatgatagtactctccctctcattgaccggaaccaaaaatcagataagaaacctgatcgggaagaaattcagatgagcaatatgggatcaaacacaaaatcactagataacaactattccacaccaaatgagagaggagaccacaatagaacactggatcgatcgggggatctaggcgacatggagccattgaagggaacaacacccttgatgcaggacgaggggcaggaatctctggaggaagagttggatgtgttggttttggatgatgaggggggccaagtgtcttacccctccatgcagaagatttagcaccactatctccgttccatctgggcttatatgtacttttattttttggtggtgaaattgactgatgattttcctttttcttcgctggactattgtgccaactgccaggctgcctcctgcccttacagccctaagtggctgccttctttccatcaactcccaacttcttcctgtgaagtttaattgtctcaacgcctccccctcccccattccctccatttttctcccaagaaacctgactcaattatttgcatattttgagaaactgctgcagattagttctttttgccagttttccctggaactcctggccttttgtggaggggagggatggagagaataggaatcttcactagaagccgtgggaagaattggaagttacatgctgtatatgcaatgtccagcagtctgataaactgacgattcttaatcaagatttttttcctgatggggaagggacttttattttcttttagagaggggaaagtgtgagctcttcccttattcctaatggctatttttgaagcaaagaaggccagcaacattggcacatgccacctggcaaaggacccttgagtaagtgaaggtctcctaaaactgggattaagaaaccttgctctcctcatctccaaggcagggaccatcaagaacctacagactccatctcttctgcaagcctcatgccaaccctgggctattgctgctgccccttaaacacaggctgtccttaacccacctctcctgccctgtgatatgtctgctgagttggcctggccatttccaagaggctgtagaaaggggagaatgtcaaggaagacttttggtagagaaggagcagaaagatgtgtttttgggaagaagaagacctctaggaggagctagtaggaatgtacatgaagcaattagtctgaaactggcttccccactcccccgtttctccttttcctatccttataggcctgtcccttgcctctgccctggattggttggcaaactaaaggacttgatgtacataactcctgtcccttttcccttacaaggtggggattgcccctggctttgcctcttctttgtgcctttggcctggggtgcatctcctcccgcccttccatgtgcctttctttgcctctgcagtctcatttctcataattttgcaaattatattttgttgctttcttacctactattggccctaaatagcagaaagaagagaagtgaccgagagaacctcagattcttcattgaggattggtatagccatgatttcagtcatagcaagcttttgctcaacagcatatgggtgggattttgcaaaaatcctattctgatgaatctcaaagtaaggctggtaagagaagtgagtggtgtgactcttactccttaggtgcccagaatttaccatcatctctgaaggagttacagggaagtggtctccccaattctcccctccctccagtattgccccctctcactttagcatatattaattagcaggttgggctagagaaatcagctgctatgcgggttgattattattattatttctaatccttttccttatttgccttctactccccttaatctaatctaaaagctctgttccatgcaactggagttccttatccctctcttccccttcccttatatattgaggctatggggtaggagaaaagtgcacaacccaccaccccctttactcgtgcattaaaatttcttatttacccttttcccccttcccatttcttcccactttcatctaccttttctggcaaaaaggagccttttgctctctgtgaccctaagagcacactgcacagggaaaattgccccatccagacctggctccactcttgatctctcttgtcctcttctgctcttttcctggtgctcttttttctcggtggggtgtgggtaatagaacagccgtgggcttttggggacctttaacttttttttctctcttttgtttataaaaaacactaaacattcaattccagagaaccaaaaatcccaccttcccaccgaacactactaaggggcttgtgttctgctccataccttttctcttttctttctgtcttgttaatgcttttaaaaacaaatgagttttttatataaataaagtttttaaagtgtgtatgtggggggtctgtgtcatttcttcacttcaagctgttatttcttccctgctttgcatctttgttacttccttatgtatcagtgtcctttccagagcaaccagaaggaggttataccaggatttattttgagctcagccccaactctttatcaagcaacattcttgttaactatatgtgaaacattttttcttctgaagattcttaaaaattgaatgtggctgaagttgaacatgggagcttattgctaatttagagataggaaactgaagcataaagaattaatgacttactttaattactggaattcttctgcaacatttgacaaaactaaccttgaataaggcccactgtaatacgtagctctcttaaatataacacttaggactagaagattagaaactaccaatcccaactacgtaataggaaaatgtaggatcaaaaggcccatgtatataagtactgaccactgggccataatgttgcttctcaggctatatgcagtcctttagtcagaagtcaataggcctatttattaatattttacagaccatattacctggattaccagggactatctttgctgcagagatcaagggttaagatctatgggaagatacttatttttctgaggtccttatgtcctgtcatataattaaagactcaagagaatttatgtgaaatgctttctgtatgcccaaatctttagattaaaattatatagctgctcct

SEQ ID NO: 114954 - DNA, 5481 bp, Homo sapiens
  Payload ID: 2445
  Gene Symbol: CTNND2
  Gene Name: catenin (cadherin-associated protein), delta 2
  Uniprot ID: Q9UQB3
  ENST ID: ENST00000304623
  CDS Start-End: 191-3868
gcgtcgggagccgcctctcgcccgcggcgctcgcccctgccgcccgccagcatcccttgtcccgcggccgcgctcagacaacaaaagcggaagatgctgcagttgggcaaggtcaggaccttgccctgaagccgggcggcgccgcgcacgcctcttcccggactgaggagctgtcgccggcggagggtgcatgtttgcgaggaagccgccgggcgccgcgcctttgggagctatgcctgttccagaccagccttcatcagcctcagagaagacgagttccctgagccccggcttaaacacctccaacggggatggctctgaaacagaaaccacctctgccatcctcgcctcagtcaaagaacaggaattacagtttgaaaggctgacccgagagctggaggctgaacggcagatcgtagccagccagctggagcgatgcaagctcggatccgagactggcagcatgagcagcatgagttcagcagaagagcagtttcagtggcagtcacaagatggtcaaaaagatatcgaagatgagcttacaacaggtctcgagctggtggactcctgtattaggtcactacaggaatcaggaatacttgacccacaggattattctacaggtgaaaggcccagcctgctctcccagagtgcacttcagctcaattccaaacctgaagggtctttccagtatccggccagctaccatagcaaccagaccctggccctgggggaaaccaccccttcacagctcccggcccgaggcacacaagcccgagctacgggccagagcttcagccagggcacgaccagccgcgccggccacctggcggggcccgagcccgcgccgccgccgccgccgccgccgcgggagccgttcgcgcccagcctgggcagcgccttccacctgcccgacgcgccgcccgccgccgccgccgccgcgctctactactccagctccacgctgcccgcgccgccgcgcgggggctccccgctggccgcgccccagggcggttcgcccaccaagctgcagcgcggcggctcggcccccgagggcgccacctacgccgcgccgcgcggctcctcgcccaagcagtcgcccagccgcctggccaagtcctacagcaccagctcgcccatcaacatcgtcgtgtcctcggccggcctgtccccgatccgcgtgacctcgccccccaccgtgcagtccaccatctcctcctcgcccatccaccagctgagctccaccatcggcacgtacgccaccctgtcgcccaccaagcgcctggtccacgcgtccgagcagtacagcaagcactcgcaggagctgtatgccacggccaccctccagaggccgggcagcctggcagctggttcccgagcctcatacagcagccagcatgggcacctgggcccagagttgcgggccctgcagtccccagaacaccacatagatcccatctatgaagaccgcgtctatcagaagccccctatgaggagtctcagccagagccagggggaccctctgccgccagcacacaccggcacctaccgcacgagcacagccccatcttcccctggtgtcgactccgtccccttgcagcgcacaggcagccagcacggcccacagaatgccgccgcggccaccttccagagggccagctatgccgccggcccagcctccaattacgcggacccctaccgacagctgcagtattgtccctctgttgagtctccatacagcaaatccggccctgctctcccgcctgaaggcaccttggccaggtccccgtccattgatagcattcagaaagatcccagagaatttggatggagagacccggaactgccggaagtgattcagatgttgcagcaccagtttccctcggtccagtctaacgcggcagcctacttgcaacacctctgttttggagacaacaaaattaaagccgagataaggagacaaggaggcatccagctcctggtggacctgttggatcatcggatgaccgaagtccaccgtagtgcctgtggagctctgagaaacctggtgtatgggaaggccaacgatgataacaaaattgccctgaaaaactgtggtggcatcccagcactggtgaggttactccgcaagacgactgacctggagatccgggagctggtcacaggagtcctttggaacctctcctcatgcgatgcactcaaaatgccaatcatccaggatgccctagcagtactgaccaacgcggtgattatcccccactcaggctgggaaaattcgcctcttcaggatgatcggaaaatacagctgcattcatcacaggtgctgcgtaacgccaccgggtgcctaaggaatgttagttcggccggagaggaggcccgcagaaggatgagagagtgtgatgggcttacggatgccttgctgtacgtgatccagtctgcgctggggagcagtgagatcgatagcaagaccgttgaaaactgtgtgtgcattttaaggaacctctcgtaccggctggcggcagaaacgtctcagggacagcacatgggcacggacgagctggacgggctactctgtggcgaggccaatggcaaggatgctgagagctctgggtgctggggcaagaagaagaagaaaaagaaatcccaagatcagtgggatggagtaggacctcttccagactgtgctgaaccaccaaaagggatccagatgctgtggcacccatcaatagtcaaaccctacctcacactgctctctgagtgctcaaatccagacacgctggaaggggcggcaggcgccctgcagaacttggctgcagggagctggaagtggtcagtatatatccgagccgctgtccgaaaagagaaaggcctgcccatcctcgtggagctgctccgaatagacaatgaccgtgtggtgtgcgcggtggccactgcgctgcggaacatggccttggacgtcagaaataaggagctcatcggcaaatacgccatgcgagacctagtccacaggcttccaggagggaacaacagcaacaacactgcaagcaaggccatgtcggatgacacagtgacagctgtctgctgcacactgcacgaagtgattaccaagaacatggagaacgccaaggccttacgggatgccggtggcatcgagaagttggtcggcatctccaaaagcaaaggagataaacactctccaaaagtggtcaaggctgcatctcaggtcctcaacagcatgtggcagtaccgagatctgaggagtctctacaaaaaggatggatggtcacaataccactttgtagcctcgtcttcaaccatcgagagggaccggcaaaggccctactcctcctcccgcacgccctccatctcccctgtgcgcgtgtctcccaacaaccgctcagcaagtgccccagcttcacctcgggaaatgatcagcctcaaagaaaggaaaacagactacgagtgcaccggcagcaacgccacctaccacggagctaaaggcgaacacacttccaggaaagatgccatgacagctcaaaacactggaatttcaactttgtataggaattcttatggtgcgcccgctgaagacatcaaacacaaccaggtttcagcacagccagtcccacaggagcccagcagaaaagattacgagacctaccagccatttcagaattccacaagaaattacgatgagtccttcttcgaggaccaggtccaccatcgccctcccgccagcgagtacaccatgcacctgggtctcaagtccaccggcaactacgttgacttctactcagctgcccgtccctacagtgaactgaactatgaaacgagccactacccggcctcccccgactcctgggtgtgaggagcagggcacaggcgctccgggaacagtgcatgtgcatgcataccacaagacatttctttctgttttgtttttttctcctgcaaatttagtttgttaaagcctgttccataggaaggctgtgataaccagtaaggaaatattaagagctattttagaaagctaaatgaatcgcaagttaacttggaaatcagtagaaagctaaagtgatcctaaatatgacagtgggcagcacctttctagcgtgagctgtagagtaacgagaagtgctttatactgaacgtggttgatgggaggagagacgaggcattcgggccggtggggcgtaagggttatcgttaagcacaagacacagaatagtttacacactgtgtgggggacggcttctcacgctttgtttactctcttcatccgttgtgactctaggcttcaggttgcattggggttcctctgtacagcaagatgtttcttgccttttgttaatgcattgttgtaaagtatttgatgtacattacagattaaagaagaaaagcgcgttgtgtatattacaccaatgccgccgtgtttcctcatctatggttctaaatattgcttcaatttcaaacttttgaaagatgtatggatttccagtttttctttactttctcccagtatgttttaacaaaaaaaaaaaaaagcaggaaaaaaggaatatttagcagtattgttcgttctgatatgtgaatttgtttgtgacaactaaacaaggcattcagcagtttctgacaattaacatacatcattccacactccttgtcaacaaagtgctttttcactgcctaaaattttagatgtagatatttgaaatagattttttcatttataccagttttctttatgatgatacagtgttaaaagaaaataaattacaattgatctgtcatccatatttgctaagaatgtctatttccaagaacctatatcttacaaaatacacattcttgcttgtgtgtctgtgtgtgtgggtgtatgtatgtccacgtactagaaaaattacctgtgtgagattttattttgacagaagctatttcatttgctgttcatcttgtacaaactttgtttttggttttttagtataaatgtacatcagtttgttccttttgtactgtatctattcttctgaccatctagtgactcaggatattaggccagttgaagtggagttataggattttcacacattcacgcatacttggatatcaaccctctctacaggtccgtttccttacacattttatcccctcagaacacgataaaccatggccaattcagtttcactttggggccaattacttgaagtatccacagaaaatgtaaactgctcgccttattcccccaaactttttgttcatgtggcagggagcagtacacaactatggaatagattattaaaactgaacttgaagctaacgttagaatagtggttaacagagctaagaaataaggctaaccatcgaaaagaacatgggccgcgggtaaactagctttgctctttagatgcaagtggctgaggccaataggtgcctagtaaatgttaactgttcttggaaaaaataaaaacatcagtaacaaaa

SEQ ID NO: 114955 - DNA, 1962 bp, Homo sapiens
  Payload ID: 2445
  Gene Symbol: CTNND2
  Gene Name: catenin (cadherin-associated protein), delta 2
  ENST ID: ENST00000458100
  CDS Start-End: 480-1442
cgtgatccagtctgcgctggggagcagtgagatcgatagcaagaccgttgaaaactgtgtgtgcattttaaggaacctctcgtaccggctggcggcagaaacgtctcagggacagcacatgggcacggacgagctggacgggctactctgtggcgaggccaatggcaaggatgctgagagctctgggtgctggggcaagaagaagaagaaaaagaaatcccaagatcagtgggatggagtaggacctcttccagactgtgctgaaccaccaaaagggatccagatgctgtggcacccatcaatagtcaaaccctacctcacactgctctctgagtgctcaaatccagacacgctggaaggggcggcaggcgccctgcagaacttggctgcagggagctggaagtggtcagtatatatccgagccgctgtccgaaaagagaaaggcctgcccatcctcgtggagctgctccgaatagacaatgaccgtgtggtgtgcggtggccactgcgctgcggaacatggccttggacgtcagaaataaggagctcatcggcaaatacgccatgcgagacctagtccacaggcttccaggagggaacaacagcaacaacactgcaagcaaggccatgtcggatgacacagtgacagctgtctgctgcacactgcacgaagtgattaccaagaacatggagaacgccaaggccttacgggatgccggtggcatcgagaagttggtcggcatctccaaaagcaaaggagataaacactctccaaaagtggtcaaggctgcatctcaggtcctcaacagcatgtggcagtaccgagatctgaggagtctctacaaaaaggatggatggtcacaataccactttgtagcctcgtcttcaaccatcgagagggaccggcaaaggccctactcctcctcccgcacgccctccatctcccctgtgcgcgtgtctcccaacaaccgctcagcaagtgccccagcttcacctcgggaaatgatcagcctcaaagaaaggaaaacagactacgagtgcaccggcagcaacgccacctaccacggagctaaaggcgaacacacttccaggaaagatgccatgacagctcaaaacactggaatttcaactttgtataggaattcttatggtgcgcccgctgaagacatcaaacacaaccaggtttcagcacagccagtcccacaggagcccagcagaaaagattacgagacctaccagccatttcagaattccacaagaaattacgatgagtccttcttcgaggaccaggtccaccatcgccctcccgccagcgagtacaccatgcacctgggtctcaagtccaccggcaactacgttgacttctactcagctgcccgtccctacagtgaactgaactatgaaacgagccactacccggcctcccccgactcctgggtgtgaggagcagggcacaggcgctccgggaacagtgcatgtgcatgcataccacaagacatttctttctgttttgtttttttctcctgcaaatttagtttgttaaagcctgttccataggaaggctgtgataaccagtaaggaaatattaagagctattttagaaagctaaatgaatcgcaagttaacttggaaatcagtagaaagctaaagtgatcctaaatatgacagtgggcagcacctttctagcgtgagctgtagagtaacgagaagtgctttatactgaacgtggttgatgggaggagagacgaggcattcgggccggtggggcgtaagggttatcgttaagcacaagacacagaatagtttacacactgtgtgggggacggcttctcacgctttgtttactctcttcatccgttgtgactctaggcttcaggttgcattggggttcctctgtacagcaagatgtttcttgccttttgttaatgcattgttgtaaagtatttgatgtacattacagatt

SEQ ID NO: 114956 - DNA, 3567 bp, Homo sapiens
  Payload ID: 2445
  Gene Symbol: CTNND2
  Gene Name: catenin (cadherin-associated protein), delta 2
  ENST ID: ENST00000504499
  CDS Start-End: 191-886
gcgtcgggagccgcctctcgcccgcggcgctcgcccctgccgcccgccagcatcccttgtcccgcggccgcgctcagacaacaaaagcggaagatgctgcagttgggcaaggtcaggaccttgccctgaagccgggcggcgccgcgcacgcctcttcccggactgaggagctgtcgccggcggagggtgcatgtttgcgaggaagccgccgggcgccgcgcctttgggagctatgcctgttccagaccagccttcatcagcctcagagaagacgagttccctgagccccggcttaaacacctccaacggggatggctctgaaacagaaaccacctctgccatcctcgcctcagtcaaagaacaggaattacagtttgaaaggctgacccgagagctggaggctgaacggcagatcgtagccagccagctggagcgatgcaagctcggatccgagactggcagcatgagcagcatgagttcagcagaagagcagtttcagtggcagtcacaagatggtcaaaaagatatcgaagatgagcttacaacaggtctcgagctggtggactcctgtattaggtcactacaggaatcaggaatacttgacccacaggattattctacaggtgaaaggcccagcctgctctcccagagtgcacttcagctcaattccaaacctgaagggtctttccagtatccggccagctaccatagcaaccagaccctggccctgggggaaaccaccccttcacagctcccggcccgaggcacacaagcccgagctacgggccagagcttcagccagctggttcccgagcctcatacagcagccagcatgggcacctgggcccagagttgcgggccctgcagtccccagaacaccacatagatcccatctatgaagaccgcgtctatcagaagccccctatgaggagtctcagccagagccagggggaccctctgccgccagcacacaccggcacctaccgcacgagcacagccccatcttcccctggtgtcgactccgtccccttgcagcgcacaggcagccagcacggcccacagaatgccgccgcggccaccttccagagggccagctatgccgccggcccagcctccaattacgcggacccctaccgacagctgcagtattgtccctctgttgagtctccatacagcaaatccggccctgctctcccgcctgaaggcaccttggccaggtccccgtccattgatagcattcagaaagatcccagagaatttggatggagagacccggaactgccggaagtgattcagatgttgcagcaccagtttccctcggtccagtctaacgcggcagcctacttgcaacacctctgttttggagacaacaaaattaaagccgagataaggagacaaggaggcatccagctcctggtggacctgttggatcatcggatgaccgaagtccaccgtagtgcctgtggagctctgagaaacctggtgtatgggaaggccaacgatgataacaaaattgccctgaaaaactgtggtggcatcccagcactggtgaggttactccgcaagacgactgacctggagatccgggagctggtcacaggagtcctttggaacctctcctcatgcgatgcactcaaaatgccaatcatccaggatgccctagcagtactgaccaacgcggtgattatcccccactcaggctgggaaaattcgcctcttcaggatgatcggaaaatacagctgcattcatcacaggtgctgcgtaacgccaccgggtgcctaaggaatgttagttcggccggagaggaggcccgcagaaggatgagagagtgtgatgggcttacggatgccttgctgtacgtgatccagtctgcgctggggagcagtgagatcgatagcaagaccgttgaaaactgtgtgtgcattttaaggaacctctcgtaccggctggcggcagaaacgtctcagggacagcacatgggcacggacgagctggacgggctactctgtggcgaggccaatggcaaggatgctgagagctctgggtgctggggcaagaagaagaagaaaaagaaatcccaagatcagtgggatggagtaggacctcttccagactgtgctgaaccaccaaaagggatccagatgctgtggcacccatcaatagtcaaaccctacctcacactgctctctgagtgctcaaatccagacacgctggaaggggcggcaggcgccctgcagaacttggctgcagggagctggaagtggtcagtatatatccgagccgctgtccgaaaagagaaaggcctgcccatcctcgtggagctgctccgaatagacaatgaccgtgtggtgtgcgcggtggccactgcgctgcggaacatggccttggacgtcagaaataaggagctcatcggcaaatacgccatgcgagacctagtccacaggcttccaggagggaacaacagcaacaacactgcaagcaaggccatgtcggatgacacagtgacagctgtctgctgcacactgcacgaagtgattaccaagaacatggagaacgccaaggccttacgggatgccggtggcatcgagaagttggtcggcatctccaaaagcaaaggagataaacactctccaaaagtggtcaaggctgcatctcaggtcctcaacagcatgtggcagtaccgagatctgaggagtctctacaaaaaggatggatggtcacaataccactttgtagcctcgtcttcaaccatcgagagggaccggcaaaggccctactcctcctcccgcacgccctccatctcccctgtgcgcgtgtctcccaacaaccgctcagcaagtgccccagcttcacctcgggaaatgatcagcctcaaagaaaggaaaacagactacgagtgcaccggcagcaacgccacctaccacggagctaaaggcgaacacacttccaggaaagatgccatgacagctcaaaacactggaatttcaactttgtataggaattcttatggtgcgcccgctgaagacatcaaacacaaccaggtttcagcacagccagtcccacaggagcccagcagaaaagattacgagacctaccagccatttcagaattccacaagaaattacgatgagtccttcttcgaggaccaggtccaccatcgccctcccgccagcgagtacaccatgcacctgggtctcaagtccaccggcaactacgttgacttctactcagctgcccgtccctacagtgaactgaactatgaaacgagccactacccggcctcccccgactcctgggtgtgaggagcagggcacaggcgctccgggaacagtgcatgtgcatgcataccacaagacatttctttctgttttgtttttttctcctgcaaatttagtttgttaaagcctgttccataggaaggctgtgataaccagtaaggaaatattaagagctattttagaaagctaaatgaatcgcaagttaacttggaaatcagtagaaagctaaagtgatcctaaatatgacagtgggcagcacctttctagcgtgagctgtagagtaacgag

SEQ ID NO: 114957 - DNA, 3818 bp, Homo sapiens
  Payload ID: 2445
  Gene Symbol: CTNND2
  Gene Name: catenin (cadherin-associated protein), delta 2
  ENST ID: ENST00000513588
  CDS Start-End: 128-2866
gcggccgcgctcagacaacaaaagcggaagatgctgcagttgggcaaggtcaggaccttgccctgaagccgggcggcgccgcgcacgcctcttcccggactgaggagctgtcgccggcggagggtgcatgtttgcgaggaagccgccgggcgccgcgcctttgggagctatgcctgttccagaccagccttcatcagcctcagagaagacgagttccctgagccccggcttaaacacctccaacggggatggctctgaaacagaaaccacctctgccatcctcgcctcagtcaaagaacaggaattacagtttgaaaggctgacccgagagctggaggctgaacggcagatcgtagccagccagctggagcgatgcaagctcggatccgagactggcagcatgagcagcatgagttcagcagaagagcagtttcagtggcagtcacaagatggtcaaaaagatatcgaagatgagcttacaacaggtctcgagctggtggactcctgtattaggtcactacaggaatcaggaatacttgacccacaggattattctacaggtgaaactggttcccgagcctcatacagcagccagcatgggcacctgggcccagagttgcgggccctgcagtccccagaacaccacatagatcccatctatgaagaccgcgtctatcagaagccccctatgaggagtctcagccagagccagggggaccctctgccgccagcacacaccggcacctaccgcacgagcacagccccatcttcccctggtgtcgactccgtccccttgcagcgcacaggcagccagcacggcccacagaatgccgccgcggccaccttccagagggccagctatgccgccggcccagcctccaattacgcggacccctaccgacagctgcagtattgtccctctgttgagtctccatacagcaaatccggccctgctctcccgcctgaaggcaccttggccaggtccccgtccattgatagcattcagaaagatcccagagaatttggatggagagacccggaactgccggaagtgattcagatgttgcagcaccagtttccctcggtccagtctaacgcggcagcctacttgcaacacctctgttttggagacaacaaaattaaagccgagataaggagacaaggaggcatccagctcctggtggacctgttggatcatcggatgaccgaagtccaccgtagtgcctgtggagctctgagaaacctggtgtatgggaaggccaacgatgataacaaaattgccctgaaaaactgtggtggcatcccagcactggtgaggttactccgcaagacgactgacctggagatccgggagctggtcacaggagtcctttggaacctctcctcatgcgatgcactcaaaatgccaatcatccaggatgccctagcagtactgaccaacgcggtgattatcccccactcaggctgggaaaattcgcctcttcaggatgatcggaaaatacagctgcattcatcacaggtgctgcgtaacgccaccgggtgcctaaggaatgttagttcggccggagaggaggcccgcagaaggatgagagagtgtgatgggcttacggatgccttgctgtacgtgatccagtctgcgctggggagcagtgagatcgatagcaagaccgttgaaaactgtgtgtgcattttaaggaacctctcgtaccggctggcggcagaaacgtctcagggacagcacatgggcacggacgagctggacgggctactctgtggcgaggccaatggcaaggatgctgagagctctgggtgctggggcaagaagaagaagaaaaagaaatcccaagatcagtgggatggagtaggacctcttccagactgtgctgaaccaccaaaagggatccagatgctgtggcacccatcaatagtcaaaccctacctcacactgctctctgagtgctcaaatccagacacgctggaaggggcggcaggcgccctgcagaacttggctgcagggagctggaagggctgggctgaggatgtggcaggcatggcatatgccctacgttcactgccagagggggctccctgcctgccacagtggtcagtatatatccgagccgctgtccgaaaagagaaaggcctgcccatcctcgtggagctgctccgaatagacaatgaccgtgtggtgtgcgcggtggccactgcgctgcggaacatggccttggacgtcagaaataaggagctcatcggcaaatacgccatgcgagacctagtccacaggcttccaggagggaacaacagcaacaacactgcaagcaaggccatgtcggatgacacagtgacagctgtctgctgcacactgcacgaagtgattaccaagaacatggagaacgccaaggccttacgggatgccggtggcatcgagaagttggtcggcatctccaaaagcaaaggagataaacactctccaaaagtggtcaaggctgcatctcaggtcctcaacagcatgtggcagtaccgagatctgaggagtctctacaaaaaggatggatggtcacaataccactttgtagcctcgtcttcaaccatcgagagggaccggcaaaggccctactcctcctcccgcacgccctccatctcccctgtgcgcgtgtctcccaacaaccgctcagcaagtgccccagcttcacctcgggaaatgatcagcctcaaagaaaggaaaacagactacgagtgcaccggcagcaacgccacctaccacggagctaaaggcgaacacacttccaggaaagatgccatgacaggagcacattctgcctccatgtgcagaccctacaagggaacacctcagcgctgctcctgagacgtttcctgaacgggagaacctaactcattacatggactctagctcaaaacactggaatttcaactttgtataggaattcttatggtgcgcccgctgaagacatcaaacacaaccaggtttcagcacagccagtcccacaggagcccagcagaaaagattacgagacctaccagccatttcagaattccacaagaaattacgatgagtccttcttcgaggaccaggtccaccatcgccctcccgccagcgagtacaccatgcacctgggtctcaagtccaccggcaactacgttgacttctactcagctgcccgtccctacagtgaactgaactatgaaacgagccactacccggcctcccccgactcctgggtgtgaggagcagggcacaggcgctccgggaacagtgcatgtgcatgcataccacaagacatttctttctgttttgtttttttctcctgcaaatttagtttgttaaagcctgttccataggaaggctgtgataaccagtaaggaaatattaagagctattttagaaagctaaatgaatcgcaagttaacttggaaatcagtagaaagctaaagtgatcctaaatatgacagtgggcagcacctttctagcgtgagctgtagagtaacgagaagtgctttatactgaacgtggttgatgggaggagagacgaggcattcgggccggtggggcgtaagggttatcgttaagcacaagacacagaatagtttacacactgtgtgggggacggcttctcacgctttgtttactctcttcatccgttgtgactctaggcttcaggttgcattggggttcctctgtacagcaagatgtttcttgccttttgttaatgcattgttgtaaagtatttgatgtacattacagattaaagaagaaaagcgcgttgtgtatattacaccaatgccgccgtgtttcctca

SEQ ID NO: 114958 - DNA, 704 bp, Homo sapiens
  Payload ID: 2445
  Gene Symbol: CTNND2
  Gene Name: catenin (cadherin-associated protein), delta 2
  ENST ID: ENST00000502551
  CDS Start-End: 77-704
cacaggtttcgggggcttctgcgtgctgacaatagacagccaggctccagaaagcgccgcctgaaagccaggagctatgcctgttccagaccagccttcatcagcctcagagaagacgagttccctgagccccggcttaaacacctccaacggggatggctctgaaacagaaaccacctctgccatcctcgcctcagtcaaagaacaggaattacagtttgaaaggctgacccgagagctggaggctgaacggcagatcgtagccagccagctggagcgatgcaagctcggatccgagactggcagcatgagcagcatgagttcagcagaagagcagtttcagtggcagtcacaagatggtcaaaaagatatcgaagatgagcttacaacaggtctcgagctggtggactcctgtattaggtcactacaggaatcaggaatacttgacccacaggattattctacaggtgaaactggttcccgagcctcatacagcagccagcatgggcacctgggcccagagttgcgggccctgcagtccccagaacaccacatagatcccatctatgaagaccgcgtctatcagaagccccctatgaggagtctcagccagagccagggggaccctctgccgccagcacacaccggcacctaccgcacgagcacagccccatcttcccctggtgtcgactccgtccccttgc

SEQ ID NO: 114959 - DNA, 727 bp, Homo sapiens
  Payload ID: 2445
  Gene Symbol: CTNND2
  Gene Name: catenin (cadherin-associated protein), delta 2
  ENST ID: ENST00000508761
  CDS Start-End: 220-727
attacgatgtttggctagaacaaaatggaaagacttagtcatatgcgtccatggccgtgtcttcaggctcccgcggcttgccagaccctgagcccccttggtctatatttagcggcttcccagcaagcctttgcagccggcttcacaggtttcgggggcttctgcgtgctgacaatagacagccaggctccagaaagcgccgcctgaaagccaggagctatgcctgttccagaccagccttcatcagcctcagagaagacgagttccctgagccccggcttaaacacctccaacggggatggctctgaaacagaaaccacctctgccatcctcgcctcagtcaaagaacaggaattacagtttgaaaggctgacccgagagctggaggctgaacggcagatcgtagccagccagctggagcgatgcaagctcggatccgagactggcagcatgagcagcatgagttcagcagaagagcagtttcagtggcagtcacaagatggtcaaaaagatatcgaagatgagcttacaacaggtctcgagctggtggactcctgtattaggtcactacaggaatcaggaatacttgacccacaggattattctacaggtgaaaggcccagcctgctctcccagagtgcacttcagctcaattccaaacctgaagggtctttccagtatccggccagctaccatagcaaccagaccctggccctgggggaaacca

SEQ ID NO: 114960 - DNA, 4336 bp, Homo sapiens
  Payload ID: 2445
  Gene Symbol: CTNND2
  Gene Name: catenin (cadherin-associated protein), delta 2
  ENST ID: ENST00000511377
  CDS Start-End: 374-3778
actgtttgcgagtgaaagcagaaattaccataggataattcagcgtcctgactttttcgaggctgttcttcactcccttctcggtttttgagctgctctgtggttccttttagccgtggtgcagggagggaggagggaggtgggtaggatgccaggaaccgcctgctccacagcctggggaaggagggaagagtaacccttcatctttgggactagtcgtcttgtttgcctagactacagttttcaagtatttaaggaccatttatttcaaaaggaattacagtttgaaaggctgacccgagagctggaggctgaacggcagatcgtagccagccagctggagcgatgcaagctcggatccgagactggcagcatgagcagcatgagttcagcagaagagcagtttcagtggcagtcacaagatggtcaaaaagatatcgaagatgagcttacaacaggtctcgagctggtggactcctgtattaggtcactacaggaatcaggaatacttgacccacaggattattctacaggtgaaaggcccagcctgctctcccagagtgcacttcagctcaattccaaacctgaagggtctttccagtatccggccagctaccatagcaaccagaccctggccctgggggaaaccaccccttcacagctcccggcccgaggcacacaagcccgagctacgggccagagcttcagccagggcacgaccagccgcgccggccacctggcggggcccgagcccgcgccgccgccgccgccgccgccgcgggagccgttcgcgcccagcctgggcagcgccttccacctgcccgacgcgccgcccgccgccgccgccgccgcgctctactactccagctccacgctgcccgcgccgccgcgcgggggctccccgctggccgcgccccagggcggttcgcccaccaagctgcagcgcggcggctcggcccccgagggcgccacctacgccgcgccgcgcggctcctcgcccaagcagtcgcccagccgcctggccaagtcctacagcaccagctcgcccatcaacatcgtcgtgtcctcggccggcctgtccccgatccgcgtgacctcgccccccaccgtgcagtccaccatctcctcctcgcccatccaccagctgagctccaccatcggcacgtacgccaccctgtcgcccaccaagcgcctggtccacgcgtccgagcagtacagcaagcactcgcaggagctgtatgccacggccaccctccagaggccgggcagcctggcagctggttcccgagcctcatacagcagccagcatgggcacctgggcccagagttgcgggccctgcagtccccagaacaccacatagatcccatctatgaagaccgcgtctatcagaagccccctatgaggagtctcagccagagccagggggaccctctgccgccagcacacaccggcacctaccgcacgagcacagccccatcttcccctggtgtcgactccgtccccttgcagcgcacaggcagccagcacggcccacagaatgccgccgcggccaccttccagagggccagctatgccgccggcccagcctccaattacgcggacccctaccgacagctgcagtattgtccctctgttgagtctccatacagcaaatccggccctgctctcccgcctgaaggcaccttggccaggtccccgtccattgatagcattcagaaagatcccagagaatttggatggagagacccggaactgccggaagtgattcagatgttgcagcaccagtttccctcggtccagtctaacgcggcagcctacttgcaacacctctgttttggagacaacaaaattaaagccgagataaggagacaaggaggcatccagctcctggtggacctgttggatcatcggatgaccgaagtccaccgtagtgcctgtggagctctgagaaacctggtgtatgggaaggccaacgatgataacaaaattgccctgaaaaactgtggtggcatcccagcactggtgaggttactccgcaagacgactgacctggagatccgggagctggtcacaggagtcctttggaacctctcctcatgcgatgcactcaaaatgccaatcatccaggatgccctagcagtactgaccaacgcggtgattatcccccactcaggctgggaaaattcgcctcttcaggatgatcggaaaatacagctgcattcatcacaggtgctgcgtaacgccaccgggtgcctaaggaatgttagttcggccggagaggaggcccgcagaaggatgagagagtgtgatgggcttacggatgccttgctgtacgtgatccagtctgcgctggggagcagtgagatcgatagcaagaccgttgaaaactgtgtgtgcattttaaggaacctctcgtaccggctggcggcagaaacgtctcagggacagcacatgggcacggacgagctggacgggctactctgtggcgaggccaatggcaaggatgctgagagctctgggtgctggggcaagaagaagaagaaaaagaaatcccaagatcagtgggatggagtaggacctcttccagactgtgctgaaccaccaaaagggatccagatgctgtggcacccatcaatagtcaaaccctacctcacactgctctctgagtgctcaaatccagacacgctggaaggggcggcaggcgccctgcagaacttggctgcagggagctggaagtggtcagtatatatccgagccgctgtccgaaaagagaaaggcctgcccatcctcgtggagctgctccgaatagacaatgaccgtgtggtgtgcgcggtggccactgcgctgcggaacatggccttggacgtcagaaataaggagctcatcggcaaatacgccatgcgagacctagtccacaggcttccaggagggaacaacagcaacaacactgcaagcaaggccatgtcggatgacacagtgacagctgtctgctgcacactgcacgaagtgattaccaagaacatggagaacgccaaggccttacgggatgccggtggcatcgagaagttggtcggcatctccaaaagcaaaggagataaacactctccaaaagtggtcaaggctgcatctcaggtcctcaacagcatgtggcagtaccgagatctgaggagtctctacaaaaaggatggatggtcacaataccactttgtagcctcgtcttcaaccatcgagagggaccggcaaaggccctactcctcctcccgcacgccctccatctcccctgtgcgcgtgtctcccaacaaccgctcagcaagtgccccagcttcacctcgggaaatgatcagcctcaaagaaaggaaaacagactacgagtgcaccggcagcaacgccacctaccacggagctaaaggcgaacacacttccaggaaagatgccatgacagctcaaaacactggaatttcaactttgtataggaattcttatggtgcgcccgctgaagacatcaaacacaaccaggtttcagcacagccagtcccacaggagcccagcagaaaagattacgagacctaccagccatttcagaattccacaagaaattacgatgagtccttcttcgaggaccaggtccaccatcgccctcccgccagcgagtacaccatgcacctgggtctcaagtccaccggcaactacgttgacttctactcagctgcccgtccctacagtgaactgaactatgaaacgagccactacccggcctcccccgactcctgggtgtgaggagcagggcacaggcgctccgggaacagtgcatgtgcatgcataccacaagacatttctttctgttttgtttttttctcctgcaaatttagtttgttaaagcctgttccataggaaggctgtgataaccagtaaggaaatattaagagctattttagaaagctaaatgaatcgcaagttaacttggaaatcagtagaaagctaaagtgatcctaaatatgacagtgggcagcacctttctagcgtgagctgtagagtaacgagaagtgctttatactgaacgtggttgatgggaggagagacgaggcattcgggccggtggggcgtaagggttatcgttaagcacaagacacagaatagtttacacactgtgtgggggacggcttctcacgctttgtttactctcttcatccgttgtgactctaggcttcaggttgcattggggttcctctgtacagcaagatgtttcttgccttttgttaatgcattgttgtaaagtatttgatgtacattacagattaaagaagaaaagcgcgttgtgtatattacaccaatgcc

SEQ ID NO: 114961 - DNA, 720 bp, Homo sapiens
  Payload ID: 2445
  Gene Symbol: CTNND2
  Gene Name: catenin (cadherin-associated protein), delta 2
  ENST ID: ENST00000513598
  CDS Start-End: 177-720
gggactagtcgtcttgtttgcctagactacagttttcaagtatttaaggaccatttatttcaaaaggtacagtaaaggaattacagtttgaaaggctgacccgagagctggaggctgaacggcagatcgtagccagccagctggagcgatgcaagctcggatccgagactggcagcatgagcagcatgagttcagcagaagagcagtttcagtggcagtcacaagatggtcaaaaagatatcgaagatgagcttacaacaggtctcgagctggtggactcctgtattaggtcactacaggaatcaggaatacttgacccacaggattattctacaggtgaaaggcccagcctgctctcccagagtgcacttcagctcaattccaaacctgaagggtctttccagtatccggccagctaccatagcaaccagaccctggccctgggggaaaccaccccttcacagctcccggcccgaggcacacaagcccgagctacgggccagagcttcagccagggcacgaccagccgcgccggccacctggcggggcccgagcccgcgccgccgccgccgccgccgccgcgggagccgttcgcgcccagcctgggcagcgccttccacctgcccgacgcgccgcccgccgccgccgccgccgcgctctactactccagctccacgctgcccgcgccgccgcgcgggggctccccgctggccgcgcccc

SEQ ID NO: 114962 - DNA, 2982 bp, Homo sapiens
  Payload ID: 2445
  Gene Symbol: CTNND2
  Gene Name: catenin (cadherin-associated protein), delta 2
  ENST ID: ENST00000503622
  CDS Start-End: 203-2869
agcctggggaaggagggaagagtaacccttcatctttgggactagtcgtcttgtttgcctagactacagttttcaagtatttaaggaccatttatttcaaaaggaattacagtttgaaaggctgacccgagagctggaggctgaacggcagatcgtagccagccagctggagcgatgcaagctcggatccgagactggcagcatgagcagcatgagttcagcagaagagcagtttcagtggcagtcacaagatggtcaaaaagatatcgaagatgagcttacaacaggtctcgagctggtggactcctgtattaggtcactacaggaatcaggaatacttgacccacaggattattctacaggtgaaactggttcccgagcctcatacagcagccagcatgggcacctgggcccagagttgcgggccctgcagtccccagaacaccacatagatcccatctatgaagaccgcgtctatcagaagccccctatgaggagtctcagccagagccagggggaccctctgccgccagcacacaccggcacctaccgcacgagcacagccccatcttcccctggtgtcgactccgtccccttgcagcgcacaggcagccagcacggcccacagaatgccgccgcggccaccttccagagggccagctatgccgccggcccagcctccaattacgcggacccctaccgacagctgcagtattgtccctctgttgagtctccatacagcaaatccggccctgctctcccgcctgaaggcaccttggccaggtccccgtccattgatagcattcagaaagatcccagagaatttggatggagagacccggaactgccggaagtgattcagatgttgcagcaccagtttccctcggtccagtctaacgcggcagcctacttgcaacacctctgttttggagacaacaaaattaaagccgagataaggagacaaggaggcatccagctcctggtggacctgttggatcatcggatgaccgaagtccaccgtagtgcctgtggagctctgagaaacctggtgtatgggaaggccaacgatgataacaaaattgccctgaaaaactgtggtggcatcccagcactggtgaggttactccgcaagacgactgacctggagatccgggagctggtcacaggagtcctttggaacctctcctcatgcgatgcactcaaaatgccaatcatccaggatgccctagcagtactgaccaacgcggtgattatcccccactcaggctgggaaaattcgcctcttcaggatgatcggaaaatacagctgcattcatcacaggtgctgcgtaacgccaccgggtgcctaaggaatgttagttcggccggagaggaggcccgcagaaggatgagagagtgtgatgggcttacggatgccttgctgtacgtgatccagtctgcgctggggagcagtgagatcgatagcaagaccgttgaaaactgtgtgtgcattttaaggaacctctcgtaccggctggcggcagaaacgtctcagggacagcacatgggcacggacgagctggacgggctactctgtggcgaggccaatggcaaggatgctgagagctctgggtgctggggcaagaagaagaagaaaaagaaatcccaagatcagtgggatggagtaggacctcttccagactgtgctgaaccaccaaaagggatccagatgctgtggcacccatcaatagtcaaaccctacctcacactgctctctgagtgctcaaatccagacacgctggaaggggcggcaggcgccctgcagaacttggctgcagggagctggaagtggtcagtatatatccgagccgctgtccgaaaagagaaaggcctgcccatcctcgtggagctgctccgaatagacaatgaccgtgtggtgtgcgcggtggccactgcgctgcggaacatggccttggacgtcagaaataaggagctcatcggcaaatacgccatgcgagacctagtccacaggcttccaggagggaacaacagcaacaacactgcaagcaaggccatgtcggatgacacagtgacagctgtctgctgcacactgcacgaagtgattaccaagaacatggagaacgccaaggccttacgggatgccggtggcatcgagaagttggtcggcatctccaaaagcaaaggagataaacactctccaaaagtggtcaaggctgcatctcaggtcctcaacagcatgtggcagtaccgagatctgaggagtctctacaaaaaggatggatggtcacaataccactttgtagcctcgtcttcaaccatcgagagggaccggcaaaggccctactcctcctcccgcacgccctccatctcccctgtgcgcgtgtctcccaacaaccgctcagcaagtgccccagcttcacctcgggaaatgatcagcctcaaagaaaggaaaacagactacgagtgcaccggcagcaacgccacctaccacggagctaaaggcgaacacacttccaggaaagatgccatgacagctcaaaacactggaatttcaactttgtataggaattcttatggtgcgcccgctgaagacatcaaacacaaccaggtttcagcacagccagtcccacaggagcccagcagaaaagattacgagacctaccagccatttcagaattccacaagaaattacgatgagtccttcttcgaggaccaggtccaccatcgccctcccgccagcgagtacaccatgcacctgggtctcaagtccaccggcaactacgttgacttctactcagctgcccgtccctacagtgaactgaactatgaaacgagccactacccggcctcccccgactcctgggtgtgaggagcagggcacaggcgctccgggaacagtgcatgtgcatgcataccacaagacatttctttctgttttgtttttttctcctgcaaatttagtttgttaaagcctgttccata

SEQ ID NO: 114963 - DNA, 451 bp, Homo sapiens
  Payload ID: 2446
  Gene Symbol: CTNNBIP1
  Gene Name: catenin, beta interacting protein 1
  Uniprot ID: Q9NSA3
  ENST ID: ENST00000377256
  CDS Start-End: 147-392
tgtgggtgcaggtttcctgggcttgccagacacacagggcggcaccttcctacttctgcccagccacagccctcccctcacagttgagcacctgtttgcctgaagttaatttccagaagcaggagtccccagagccaggcagggggatgaaccgcgagggagctcccgggaagagtccggaggagatgtacattcagcagaaggtccgagtgctgctcatgctgcggaagatgggatcaaacctgacagccagcgaggaggagttcctgcgcacctatgcaggggtggtcaacagccagctcagccagctgcctccgcactccatcgaccagggtgcagaggacgtggtgatggcgttttccaggtcggagacggaagaccggaggcagtagctgcaaagcccttggaacaccctggatgctgttgagggccaagagatctgtgtggctcc

SEQ ID NO: 114964 - DNA, 852 bp, Homo sapiens
  Payload ID: 2446
  Gene Symbol: CTNNBIP1
  Gene Name: catenin, beta interacting protein 1
  Uniprot ID: Q9NSA3
  ENST ID: ENST00000377258
  CDS Start-End: 339-584
gtggctactctcctgagcttgtctgtggtggctttaaccttgaacaaaccctccagggtttgtgggtggattcctattgtatcaggtgctgtattttcccctcttctggagcaagtgcgtcttttctgatcttccttcccttcagctccagctgccactgtccttgccttcagactggacaaggccttgtgacccatcaggagtttttgtcccgataccgtttcccacaggcggcaccttcctacttctgcccagccacagccctcccctcacagttgagcacctgtttgcctgaagttaatttccagaagcaggagtccccagagccaggcagggggatgaaccgcgagggagctcccgggaagagtccggaggagatgtacattcagcagaaggtccgagtgctgctcatgctgcggaagatgggatcaaacctgacagccagcgaggaggagttcctgcgcacctatgcaggggtggtcaacagccagctcagccagctgcctccgcactccatcgaccagggtgcagaggacgtggtgatggcgttttccaggtcggagacggaagaccggaggcagtagctgcaaagcccttggaacaccctggatgctgttgagggccaagagatctgtgtggctcctgggccggctgagtggcagcagccccccttgccccacctcccccttcccctacccaaccctgccctgccccaccccacctcacagctactcagtggggctggcatcaagggagacaccagtggtgcgtttataattggcttaaagggatggacttgtgattggctgcaggaagaaacttttttattttttaaatcttgaccaacagaaa

SEQ ID NO: 114965 - DNA, 3000 bp, Homo sapiens
  Payload ID: 2446
  Gene Symbol: CTNNBIP1
  Gene Name: catenin, beta interacting protein 1
  Uniprot ID: Q9NSA3
  ENST ID: ENST00000377263
  CDS Start-End: 313-558
accgcggtgactctcggagcgggaggcggaggctgaggcggccgctcctgctgctgctactgccgccgccgcagcggctgctcgggctgagcacgccccggaacaggccgccgcgcgctgcgcgccggacccgctgcccctgccggcccggccgggtcgggcggcccagggaccgacagacttgacaacggtgacagcactggggcggcaccttcctacttctgcccagccacagccctcccctcacagttgagcacctgtttgcctgaagttaatttccagaagcaggagtccccagagccaggcagggggatgaaccgcgagggagctcccgggaagagtccggaggagatgtacattcagcagaaggtccgagtgctgctcatgctgcggaagatgggatcaaacctgacagccagcgaggaggagttcctgcgcacctatgcaggggtggtcaacagccagctcagccagctgcctccgcactccatcgaccagggtgcagaggacgtggtgatggcgttttccaggtcggagacggaagaccggaggcagtagctgcaaagcccttggaacaccctggatgctgttgagggccaagagatctgtgtggctcctgggccggctgagtggcagcagccccccttgccccacctcccccttcccctacccaaccctgccctgccccaccccacctcacagctactcagtggggctggcatcaagggagacaccagtggtgcgtttataattggcttaaagggatggacttgtgattggctgcaggaagaaacttttttattttttaaatcttgaccaacagaaaccttttatttttatttctgactcttattttttaaaaaatttgcgcctcggtatctggcttccctggaagctctccgagctctggtgctttagttaggtcatttttttagaaatgtgaagaggtctgattggctgcttaaactggaaaggatctgtgattggctggttaatgggaaacggtttttttctttggctgcaggtgttctgctgatatcaacagcttccctattttgaatgcagaaaacagggtctgggacattagtcgttatatttgacttgaaaagaaagaaaccaagtgcgctttgcaatatttattacacaaagaacttgctgctgccttcacatttggggtttgtgtttgattggctttcgatgcgtgtgtttggtttcccattggttcacctgtgactcctgttgccatggattcacccccctctgctgccggctctgggcctgagggtccacctggagagtacatttgctttaatgagtgcacctgcctccaccagcaaggggaccccgagaaccctgagcagggtccacagctggaaagttgggcccctgaggagctttgtgtcgtcttgaacgagcagcccagggcctagaggtaaccgttaggcgggatttatgtgcactgcctgcatgagctggcaaccagccagcgtcccttggtgagaaagggattgctgaggcaccgtccaggccccaccggccaggccgcgcccagcagaggcgtactacccagctctgtcctcttggccatccttctgtgtaccacttcctgaggcctcattttgggggtcatcttggaaaggggaggagcttctcccagtgtgagaccccaaagactctggaggtcatctggcggaggtctctgggagcccagaacccacataaaagccccagcttggctcacaaggcccaggagacctccagctaaacaccaacccctgacctaccccagccaggctcctacctgtctgctgccagcacagtaggtcccggccagctctggagttctctcatcggaggcccatgccctccactccactgcctttggaagggtctctctccaggtcagcctggaagggacagtatcgtttgtttatgaaatgccactgggacagctggctgggccttcaccaagcaagtcccttcagactggcccttaagccaaactcaggcccagaattgcagttcagaatggcagtcctggaggcagggggtgaggggcaggtctagtgttcctgcaccaaacctaagtccttccacctgccacccccttccctgggagggaggtggtcctcctatctccctggctcactggcaggtgtgggatctggggagagcggctggagaaagatgcagtcctcaggaagggggccgccaccctcccctatgctggtagatgctgaggcccctaggtgcccagggccagtgggaccctctcagaaccaaatctttcccctttctcggggcttggggctcgggccgtaggggctcctgagtgtcatgaagtgcacaggagccaaatgaccgagccctggagagccccatggtgggtaggtggttcgtgctgtgctctggcaccatcagcctgttccagaaggaggattcgagcatcaggctaagaccctgtgtcctccaccatgcactcacccctagccctggttagctgacagtcagctgtggggaacacagctacaaccctaccctggcagggacctgagagcatctcaggaggggcagcgcatgtgtgcatgtgctgtgtgagtgagcacacccgtgtgcacactcatacacatgtgcacacacacgcactctccccgctcaggggcctggaggtctggctgagcccctggggaaaggtgagttctttcatctccctcctccaggtcggagtgcctggagtcaggtgtcgaggccacattgctggctgccccctctttgtagctcctataaagggcccacacctggtggatacctggttgagtgtgtggtctctgccccagcctgtccttgtcacgatcacaggccttgcttttgtaacaatgatgaccccggcctgtctcatcttctgaagaggaaaagtcaaagtgttgctgtggctccatatttcaactaaaaatatatctgttggagaaagaaattaacaataaagaattttcataggtt

SEQ ID NO: 114966 - DNA, 1206 bp, Homo sapiens
  Payload ID: 2446
  Gene Symbol: CTNNBIP1
  Gene Name: catenin, beta interacting protein 1
  Uniprot ID: Q9NSA3
  ENST ID: ENST00000400904
  CDS Start-End: 352-597
agcccgcgcggagccagatgccgccccctccgccggtccctcccccggcggcctggcgcctccctccctccccaccgcggtgactctcggagcgggaggcggaggctgaggcggccgctcctgctgctgctactgccgccgccgcagcggctgctcgggctgagcacgccccggaacaggccgccgcgcgctgcgcgccggacccgctgcccctgccggcccggccgggtcgggcggcccagggcggcaccttcctacttctgcccagccacagccctcccctcacagttgagcacctgtttgcctgaagttaatttccagaagcaggagtccccagagccaggcagggggatgaaccgcgagggagctcccgggaagagtccggaggagatgtacattcagcagaaggtccgagtgctgctcatgctgcggaagatgggatcaaacctgacagccagcgaggaggagttcctgcgcacctatgcaggggtggtcaacagccagctcagccagctgcctccgcactccatcgaccagggtgcagaggacgtggtgatggcgttttccaggtcggagacggaagaccggaggcagtagctgcaaagcccttggaacaccctggatgctgttgagggccaagagatctgtgtggctcctgggccggctgagtggcagcagccccccttgccccacctcccccttcccctacccaaccctgccctgccccaccccacctcacagctactcagtggggctggcatcaagggagacaccagtggtgcgtttataattggcttaaagggatggacttgtgattggctgcaggaagaaacttttttattttttaaatcttgaccaacagaaaccttttatttttatttctgactcttattttttaaaaaatttgcgcctcggtatctggcttccctggaagctctccgagctctggtgctttagttaggtcatttttttagaaatgtgaagaggtctgattggctgcttaaactggaaaggatctgtgattggctggttaatgggaaacggtttttttctttggctgcaggtgttctgctgatatcaacagcttccctattttgaatgcagaaaacagggtctgggacattagtcgttatatttgacttgaaaagaaagaaaccaagtgcgctttgcaatatttattacacaaagaacttgctgctgccttca

SEQ ID NO: 114967 - DNA, 1925 bp, Homo sapiens
  Payload ID: 2447
  Gene Symbol: CTNNBL1
  Gene Name: catenin, beta like 1
  Uniprot ID: Q8WYA6
  ENST ID: ENST00000361383
  CDS Start-End: 118-1809
attggctctgcggctccgctcgccgcactttacggcagtgtggctggagccgcggctgacgggcccgcggtctgggcgtgagtgcagggaagtggagtatttgctgggccgggtaccatggacgtgggcgaacttctgagctaccagcccaataggggcacaaaacgtccccgggatgatgaagaggaggagcagaagatgcgtcggaaacaaactggtactcgagaacgcggccgctatcgggaagaagaaatgactgtggtggaggaagcggatgatgacaaaaaaaggctgctgcagattattgacagagatggggaagaggaagaggaagaggaggagccattggatgaaagctcagtgaagaaaatgatcctcacatttgaaaagagatcatataaaaaccaagaattgcggattaagtttccagacaatccagagaagttcatggaatccgagctggacctaaatgacatcattcaggagatgcacgtggtggccaccatgccagacctgtaccaccttctggtggagctgaatgctgtacagtcgcttctcggcttgctcggacacgataatacagatgtgtccatagctgtggtcgatttgcttcaggaattaacagatatagacaccctccatgagagtgaagagggagcagaagtgctcatcgatgctctggtggatgggcaggtggtagcactgctggtacagaatctggagcgcctggatgagtctgtgaaagaggaggcagatggcgtccacaacactctggctattgtggaaaacatggctgagttccggcctgagatgtgtacagagggtgcccagcagggtcttctacagtggctgttgaagaggctgaaggcaaagatgccttttgatgccaacaaactgtattgcagtgaagtgctggccatattgctccaggacaatgatgaaaacagggaattgcttggggagctggatggaatcgatgtgcttcttcagcagttatccgtgtttaaaagacacaatcccagcacggctgaggagcaggagatgatggagaatctgtttgattccctctgctcctgtctaatgcttagttccaatcgtgagcgcttcctgaagggcgagggtcttcagctgatgaatctcatgctcagggaaaagaagatctcccggagcagtgccctgaaagtgctggaccatgccatgattggccccgaaggcacagacaactgccataagtttgttgacattcttggcttacgaaccatctttcccctctttatgaaatctcccaggaagatcaagaaagtgggaaccactgagaaggaacatgaagagcatgtctgttcgatcctggcttccctcctgcggaacctgagagggcagcagcggacccggcttctgaataaattcactgaaaatgacagtgagaaggttgacagactaatggagttgcattttaaatatctgggtgcaatgcaggtggcggacaagaagattgaaggggaaaaacacgacatggtccggcgaggagagatcatcgacaatgacaccgaggaggagttctacctccggcgcctggatgcggggctctttgttctccagcacatctgctacatcatggccgagatctgcaatgccaatgtcccccagattcgccagagggttcaccagatcctaaacatgcgaggaagctccatcaaaattgtcaggcatatcatcaaggagtatgcagagaacatcggggacggccggagcccggagttccgggagaacgagcaaaagcgcatcctgggcttgctggagaacttctagaggcaccttggccctgcgcatcatggactctctcagcttccctcccaggatcagtttctacacaactctgtgtggcttttggacaaattaaagctagttttggtatccccgggcca

SEQ ID NO: 114968 - DNA, 1130 bp, Homo sapiens
  Payload ID: 2447
  Gene Symbol: CTNNBL1
  Gene Name: catenin, beta like 1
  Uniprot ID: Q8WYA6
  ENST ID: ENST00000373469
  CDS Start-End: 79-1014
cgtgaaaaatttgtcctggggaaggaagcaagaccccttaacatttttctcatttctcctatttccccataggcaaagatgccttttgatgccaacaaactgtattgcagtgaagtgctggccatattgctccaggacaatgatgaaaacagggaattgcttggggagctggatggaatcgatgtgcttcttcagcagttatccgtgtttaaaagacacaatcccagcacggctgaggagcaggagatgatggagaatctgtttgattccctctgctcctgtctaatgcttagttccaatcgtgagcgcttcctgaagggcgagggtcttcagctgatgaatctcatgctcagggaaaagaagatctcccggagcagtgccctgaaagtgctggaccatgccatgattggccccgaaggcacagacaactgccataagtttgttgacattcttggcttacgaaccatctttcccctctttatgaaatctcccaggaagatcaagaaagtgggaaccactgagaaggaacatgaagagcatgtctgttcgatcctggcttccctcctgcggaacctgagagggcagcagcggacccggcttctgaataaattcactgaaaatgacagtgagaaggttgacagactaatggagttgcattttaaatatctgggtgcaatgcaggtggcggacaagaagattgaaggggaaaaacacgacatggtccggcgaggagagatcatcgacaatgacaccgaggaggagttctacctccggcgcctggatgcggggctctttgttctccagcacatctgctacatcatggccgagatctgcaatgccaatgtcccccagattcgccagagggttcaccagatcctaaacatgcgaggaagctccatcaaaattgtcaggcatatcatcaaggagtatgcagagaacatcggggacggccggagcccggagttccgggagaacgagcaaaagcgcatcctgggcttgctggagaacttctagaggcaccttggccctgcgcatcatggactctctcagcttccctcccaggatcagtttctacacaactctgtgtggcttttggacaaattaaagctagttttggtatccccgggcca

SEQ ID NO: 114969 - DNA, 1493 bp, Homo sapiens
  Payload ID: 2447
  Gene Symbol: CTNNBL1
  Gene Name: catenin, beta like 1
  Uniprot ID: Q8WYA6
  ENST ID: ENST00000373473
  CDS Start-End: 247-1377
gggaagagtgctgtggtgagtgagggattttgccatggagaaggagaaggacccatagcagtttgtcaggttcatggaatccgagctggacctaaatgacatcattcaggagatgcacgtggtggccaccatgccagacctgtaccaccttctggtggagctgaatgctgtacagtcgcttctcggcttgctcggacacgataatacagatatcctttcagatctgacctcagtaggagagctgacatggtggatgggcaggtggtagcactgctggtacagaatctggagcgcctggatgagtctgtgaaagaggaggcagatggcgtccacaacactctggctattgtggaaaacatggctgagttccggcctgagatgtgtacagagggtgcccagcagggtcttctacagtggctgttgaagaggctgaaggcaaagatgccttttgatgccaacaaactgtattgcagtgaagtgctggccatattgctccaggacaatgatgaaaacagggaattgcttggggagctggatggaatcgatgtgcttcttcagcagttatccgtgtttaaaagacacaatcccagcacggctgaggagcaggagatgatggagaatctgtttgattccctctgctcctgtctaatgcttagttccaatcgtgagcgcttcctgaagggcgagggtcttcagctgatgaatctcatgctcagggaaaagaagatctcccggagcagtgccctgaaagtgctggaccatgccatgattggccccgaaggcacagacaactgccataagtttgttgacattcttggcttacgaaccatctttcccctctttatgaaatctcccaggaagatcaagaaagtgggaaccactgagaaggaacatgaagagcatgtctgttcgatcctggcttccctcctgcggaacctgagagggcagcagcggacccggcttctgaataaattcactgaaaatgacagtgagaaggttgacagactaatggagttgcattttaaatatctgggtgcaatgcaggtggcggacaagaagattgaaggggaaaaacacgacatggtccggcgaggagagatcatcgacaatgacaccgaggaggagttctacctccggcgcctggatgcggggctctttgttctccagcacatctgctacatcatggccgagatctgcaatgccaatgtcccccagattcgccagagggttcaccagatcctaaacatgcgaggaagctccatcaaaattgtcaggcatatcatcaaggagtatgcagagaacatcggggacggccggagcccggagttccgggagaacgagcaaaagcgcatcctgggcttgctggagaacttctagaggcaccttggccctgcgcatcatggactctctcagcttccctcccaggatcagtttctacacaactctgtgtggcttttggacaaattaaagctagttttggtatccccgggcca

SEQ ID NO: 114970 - DNA, 2076 bp, Homo sapiens
  Payload ID: 2447
  Gene Symbol: CTNNBL1
  Gene Name: catenin, beta like 1
  Uniprot ID: Q8WYA6
  ENST ID: ENST00000405275
  CDS Start-End: 351-1961
gtccttttaccgcggtgtggccggctcgcttgtcgctcgcacttttgccctattggctctgcggctccgctcgccgcactttacggcagtgtggctggagccgcggctgacgggcccgcggtctgggcgtgagtgcagggaagtggagtatttgctgggccgggtaccatggacgtgggcgaacttctgagctaccaggggcatggatggagacacgcacacacacaggcaataggcctcaagattattggcgagtaaaggcatctatctattatcgtgaagcctactctgagctttgacccaataggggcacaaaacgtccccgggatgatgaagaggaggagcagaagatgcgtcggaaacaaactggtactcgagaacgcggccgctatcgggaagaagaaatgactgtggtggaggaagcggatgatgacaaaaaaaggctgctgcagattattgacagagatggggaagaggaagaggaagaggaggagccattggatgaaagctcagtgaagaaaatgatcctcacatttgaaaagagatcatataaaaaccaagaattgcggattaagtttccagacaatccagagaagttcatggaatccgagctggacctaaatgacatcattcaggagatgcacgtggtggccaccatgccagacctgtaccaccttctggtggagctgaatgctgtacagtcgcttctcggcttgctcggacacgataatacagatgtgtccatagctgtggtcgatttgcttcaggaattaacagatatagacaccctccatgagagtgaagagggagcagaagtgctcatcgatgctctggtggatgggcaggtggtagcactgctggtacagaatctggagcgcctggatgagtctgtgaaagaggaggcagatggcgtccacaacactctggctattgtggaaaacatggctgagttccggcctgagatgtgtacagagggtgcccagcagggtcttctacagtggctgttgaagaggctgaaggcaaagatgccttttgatgccaacaaactgtattgcagtgaagtgctggccatattgctccaggacaatgatgaaaacagggaattgcttggggagctggatggaatcgatgtgcttcttcagcagttatccgtgtttaaaagacacaatcccagcacggctgaggagcaggagatgatggagaatctgtttgattccctctgctcctgtctaatgcttagttccaatcgtgagcgcttcctgaagggcgagggtcttcagctgatgaatctcatgctcagggaaaagaagatctcccggagcagtgccctgaaagtgctggaccatgccatgattggccccgaaggcacagacaactgccataagtttgttgacattcttggcttacgaaccatctttcccctctttatgaaatctcccaggaagatcaagaaagtgggaaccactgagaaggaacatgaagagcatgtctgttcgatcctggcttccctcctgcggaacctgagagggcagcagcggacccggcttctgaataaattcactgaaaatgacagtgagaaggttgacagactaatggagttgcattttaaatatctgggtgcaatgcaggtggcggacaagaagattgaaggggaaaaacacgacatggtccggcgaggagagatcatcgacaatgacaccgaggaggagttctacctccggcgcctggatgcggggctctttgttctccagcacatctgctacatcatggccgagatctgcaatgccaatgtcccccagattcgccagagggttcaccagatcctaaacatgcgaggaagctccatcaaaattgtcaggcatatcatcaaggagtatgcagagaacatcggggacggccggagcccggagttccgggagaacgagcaaaagcgcatcctgggcttgctggagaacttctagaggcaccttggccctgcgcatcatggactctctcagcttccctcccaggatcagtttctacacaactctgtgtggcttttggacaaattaaagctagttttggtatccccgggcc

SEQ ID NO: 114971 - DNA, 778 bp, Homo sapiens
  Payload ID: 2447
  Gene Symbol: CTNNBL1
  Gene Name: catenin, beta like 1
  ENST ID: ENST00000447935
  CDS Start-End: 280-778
actttacggcagtgtggctggagccgcggctgacgggcccgcggtctgggcgtgagtgcagggaagtggagtatttgctgggccgggtaccatggacgtgggcgaacttctgagctaccaggagggtcattgcgaggagcagtagagctgcactgccgaatgtcgtagccactagccacataggctgttgattgcttgaaatgtgactagtctgaattgagaaatactcccaataggggcacaaaacgtccccgggatgatgaagaggaggagcagaagatgcgtcggaaacaaactggtactcgagaacgcggccgctatcgggaagaagaaatgactgtggtggaggaagcggatgatgacaaaaaaaggctgctgcagattattgacagagatggggaagaggaagaggaagaggaggagccattggatgaaagctcagtgaagaaaatgatcctcacatttgaaaagagatcatataaaaaccaagaattgcggattaagtttccagacaatccagagaagttcatggaatccgagctggacctaaatgacatcattcaggagatgcacgtggtggccaccatgccagacctgtaccaccttctggtggagctgaatgctgtacagtcgcttctcggcttgctcggacacgataatacagatgtgtccatagctgtggtcgatttgcttcaggaattaacagatatagacaccctccatgagagtgaagagggagcagaagtgctcatcgatgctctggtggatgggcaggtgg

SEQ ID NO: 114972 - DNA, 1990 bp, Homo sapiens
  Payload ID: 2447
  Gene Symbol: CTNNBL1
  Gene Name: catenin, beta like 1
  ENST ID: ENST00000621317
  CDS Start-End: 169-1875
gtccttttaccgcggtgtggccggctcgcttgtcgctcgcacttttgccctattggctctgcggctccgctcgccgcactttacggcagtgtggctggagccgcggctgacgggcccgcggtctgggcgtgagtgcagggaagtggagtatttgctgggccgggtaccatggacgtgggcgaacttctgagctaccagcccaataggggcacaaaacgtccccgggatgatgaagaggaggagcagaagatgcgtcggaaacaaactggtactcgagaacgcggccgctatcgggaagaagaaatgactgtggtggaggaagcggatgatgacaaaaaaaggctgctgcagattattgacagagatggggaagaggaagaggaagaggaggagccattggatgaaagctcagtgaagaaaatgatcctcacatttgaaaagagatcatataaaaaccaagaattgcggattaagtttccagacaatccagagaagttcatggaatccgagctggacctaaatgacatcattcaggagatgcacgtggtggccaccatgccagacctgtaccaccttctggtggagctgaatgctgtacagtcgcttctcggcttgctcggacacgataatacagatatcctttcagatctgacctcagttgctgtggtcgatttgcttcaggaattaacagatatagacaccctccatgagagtgaagagggagcagaagtgctcatcgatgctctggtggatgggcaggtggtagcactgctggtacagaatctggagcgcctggatgagtctgtgaaagaggaggcagatggcgtccacaacactctggctattgtggaaaacatggctgagttccggcctgagatgtgtacagagggtgcccagcagggtcttctacagtggctgttgaagaggctgaaggcaaagatgccttttgatgccaacaaactgtattgcagtgaagtgctggccatattgctccaggacaatgatgaaaacagggaattgcttggggagctggatggaatcgatgtgcttcttcagcagttatccgtgtttaaaagacacaatcccagcacggctgaggagcaggagatgatggagaatctgtttgattccctctgctcctgtctaatgcttagttccaatcgtgagcgcttcctgaagggcgagggtcttcagctgatgaatctcatgctcagggaaaagaagatctcccggagcagtgccctgaaagtgctggaccatgccatgattggccccgaaggcacagacaactgccataagtttgttgacattcttggcttacgaaccatctttcccctctttatgaaatctcccaggaagatcaagaaagtgggaaccactgagaaggaacatgaagagcatgtctgttcgatcctggcttccctcctgcggaacctgagagggcagcagcggacccggcttctgaataaattcactgaaaatgacagtgagaaggttgacagactaatggagttgcattttaaatatctgggtgcaatgcaggtggcggacaagaagattgaaggggaaaaacacgacatggtccggcgaggagagatcatcgacaatgacaccgaggaggagttctacctccggcgcctggatgcggggctctttgttctccagcacatctgctacatcatggccgagatctgcaatgccaatgtcccccagattcgccagagggttcaccagatcctaaacatgcgaggaagctccatcaaaattgtcaggcatatcatcaaggagtatgcagagaacatcggggacggccggagcccggagttccgggagaacgagcaaaagcgcatcctgggcttgctggagaacttctagaggcaccttggccctgcgcatcatggactctctcagcttccctcccaggatcagtttctacacaactctgtgtggcttttggacaaattaaagctagttttggtatccccgggcc

SEQ ID NO: 114973 - DNA, 1958 bp, Homo sapiens
  Payload ID: 2447
  Gene Symbol: CTNNBL1
  Gene Name: catenin, beta like 1
  Uniprot ID: Q8WYA6
  ENST ID: ENST00000628103
  CDS Start-End: 244-1854
tgacgggcccgcggtctgggcgtgagtgcagggaagtggagtatttgctgggccgggtaccatggacgtgggcgaacttctgagctaccaggggcatggatggagacacgcacacacacaggcaataggcctcaagattattggcgagtaaaggcatctatctattatcgtgaagcctactctgagctttgacccaataggggcacaaaacgtccccgggatgatgaagaggaggagcagaagatgcgtcggaaacaaactggtactcgagaacgcggccgctatcgggaagaagaaatgactgtggtggaggaagcggatgatgacaaaaaaaggctgctgcagattattgacagagatggggaagaggaagaggaagaggaggagccattggatgaaagctcagtgaagaaaatgatcctcacatttgaaaagagatcatataaaaaccaagaattgcggattaagtttccagacaatccagagaagttcatggaatccgagctggacctaaatgacatcattcaggagatgcacgtggtggccaccatgccagacctgtaccaccttctggtggagctgaatgctgtacagtcgcttctcggcttgctcggacacgataatacagatgtgtccatagctgtggtcgatttgcttcaggaattaacagatatagacaccctccatgagagtgaagagggagcagaagtgctcatcgatgctctggtggatgggcaggtggtagcactgctggtacagaatctggagcgcctggatgagtctgtgaaagaggaggcagatggcgtccacaacactctggctattgtggaaaacatggctgagttccggcctgagatgtgtacagagggtgcccagcagggtcttctacagtggctgttgaagaggctgaaggcaaagatgccttttgatgccaacaaactgtattgcagtgaagtgctggccatattgctccaggacaatgatgaaaacagggaattgcttggggagctggatggaatcgatgtgcttcttcagcagttatccgtgtttaaaagacacaatcccagcacggctgaggagcaggagatgatggagaatctgtttgattccctctgctcctgtctaatgcttagttccaatcgtgagcgcttcctgaagggcgagggtcttcagctgatgaatctcatgctcagggaaaagaagatctcccggagcagtgccctgaaagtgctggaccatgccatgattggccccgaaggcacagacaactgccataagtttgttgacattcttggcttacgaaccatctttcccctctttatgaaatctcccaggaagatcaagaaagtgggaaccactgagaaggaacatgaagagcatgtctgttcgatcctggcttccctcctgcggaacctgagagggcagcagcggacccggcttctgaataaattcactgaaaatgacagtgagaaggttgacagactaatggagttgcattttaaatatctgggtgcaatgcaggtggcggacaagaagattgaaggggaaaaacacgacatggtccggcgaggagagatcatcgacaatgacaccgaggaggagttctacctccggcgcctggatgcggggctctttgttctccagcacatctgctacatcatggccgagatctgcaatgccaatgtcccccagattcgccagagggttcaccagatcctaaacatgcgaggaagctccatcaaaattgtcaggcatatcatcaaggagtatgcagagaacatcggggacggccggagcccggagttccgggagaacgagcaaaagcgcatcctgggcttgctggagaacttctagaggcaccttggccctgcgcatcatggactctctcagcttccctcccaggatcagtttctacacaactctgtgtggcttttggacaaattaaagctagttttggt

SEQ ID NO: 114974 - DNA, 745 bp, Homo sapiens
  Payload ID: 2448
  Gene Symbol: CAMP
  Gene Name: cathelicidin antimicrobial peptide
  ENST ID: ENST00000296435
  CDS Start-End: 157-678
gtcctgtgaagcaatagccaggggctaaagcaaaccccagcccacaccctggcaggcagccagggatgggtggatcaggaaggctcctggttgggcttttgcatcaggctcaggctgggcataaaggaggctcctgtgggctagagggaggcagacatggggaccatgaagacccaaagggatggccactccctggggcggtggtcactggtgctcctgctgctgggcctggtgatgcctctggccatcattgcccaggtcctcagctacaaggaagctgtgcttcgtgctatagatggcatcaaccagcggtcctcggatgctaacctctaccgcctcctggacctggaccccaggcccacgatggatggggacccagacacgccaaagcctgtgagcttcacagtgaaggagacagtgtgccccaggacgacacagcagtcaccagaggattgtgacttcaagaaggacgggctggtgaagcggtgtatggggacagtgaccctcaaccaggccaggggctcctttgacatcagttgtgataaggataacaagagatttgccctgctgggtgatttcttccggaaatctaaagagaagattggcaaagagtttaaaagaattgtccagagaatcaaggattttttgcggaatcttgtacccaggacagagtcctagtgtgtgccctaccctggctcaggcttctgggctctgagaaataaactatgagagcaatttcctcagg

SEQ ID NO: 114975 - DNA, 1898 bp, Homo sapiens
  Payload ID: 2449
  Gene Symbol: CTSA
  Gene Name: cathepsin A
  Uniprot ID: P10619
  ENST ID: ENST00000191018
  CDS Start-End: 86-1528
cgggcgcctcctggagagcaaggacgcgggggagcagaggtgagctggcaccggaggctggaggggatccccgagcccgggatcgatgatccgagccgcgccgccgccgctgttcctgctgctgctgctgctgctgctgctagtgtcctgggcgtcccgaggcgaggcagcccccgaccaggacgagatccagcgcctccccgggctggccaagcagccgtctttccgccagtactccggctacctcaaaggctccggctccaagcacctccactactggtttgtggagtcccagaaggatcccgagaacagccctgtggtgctttggctcaatgggggtcccggctgcagctcactagatgggctcctcacagagcatggccccttcctggtccagccagatggtgtcaccctggagtacaacccctattcttggaatctgattgccaatgtgttatacctggagtccccagctggggtgggcttctcctactccgatgacaagttttatgcaactaatgacactgaggtcgcccagagcaattttgaggcccttcaagatttcttccgcctctttccggagtacaagaacaacaaacttttcctgaccggggagagctatgctggcatctacatccccaccctggccgtgctggtcatgcaggatcccagcatgaaccttcaggggctggctgtgggcaatggactctcctcctatgagcagaatgacaactccctggtctactttgcctactaccatggccttctggggaacaggctttggtcttctctccagacccactgctgctctcaaaacaagtgtaacttctatgacaacaaagacctggaatgcgtgaccaatcttcaggaagtggcccgcatcgtgggcaactctggcctcaacatctacaatctctatgccccgtgtgctggaggggtgcccagccattttaggtatgagaaggacactgttgtggtccaggatttgggcaacatcttcactcgcctgccactcaagcggatgtggcatcaggcactgctgcgctcaggggataaagtgcgcatggaccccccctgcaccaacacaacagctgcttccacctacctcaacaacccgtacgtgcggaaggccctcaacatcccggagcagctgccacaatgggacatgtgcaactttctggtaaacttacagtaccgccgtctctaccgaagcatgaactcccagtatctgaagctgcttagctcacagaaataccagatcctattatataatggagatgtagacatggcctgcaatttcatgggggatgagtggtttgtggattccctcaaccagaagatggaggtgcagcgccggccctggttagtgaagtacggggacagcggggagcagattgccggcttcgtgaaggagttctcccacatcgcctttctcacgatcaagggcgccggccacatggttcccaccgacaagcccctcgctgccttcaccatgttctcccgcttcctgaacaagcagccatactgatgaccacagcaaccagctccacggcctgatgcagcccctcccagcctctcccgctaggagagtcctcttctaagcaaagtgcccctgcaggccgggttctgccgccaggactgcccccttcccagagccctgtacatcccagactgggcccagggtctcccatagacagcctgggggcaagttagcactttattcccgcagcagttcctgaatggggtggcctggccccttctctgcttaaagaatgccctttatgatgcactgattccatcccaggaacccaacagagctcaggacagcccacagggaggtggtggacggactgtaattgatagattgattatggaattaaattgggtacagcttcaaa

SEQ ID NO: 114976 - DNA, 1820 bp, Homo sapiens
  Payload ID: 2449
  Gene Symbol: CTSA
  Gene Name: cathepsin A
  ENST ID: ENST00000354880
  CDS Start-End: 5-1450
acacatgacttccagtccccgggcgcctcctggagagcaaggacgcgggggagcagagatgatccgagccgcgccgccgccgctgttcctgctgctgctgctgctgctgctgctagtgtcctgggcgtcccgaggcgaggcagcccccgaccaggacgagatccagcgcctccccgggctggccaagcagccgtctttccgccagtactccggctacctcaaaggctccggctccaagcacctccactactggtttgtggagtcccagaaggatcccgagaacagccctgtggtgctttggctcaatgggggtcccggctgcagctcactagatgggctcctcacagagcatggccccttcctgattgccaatgtgttatacctggagtccccagctggggtgggcttctcctactccgatgacaagttttatgcaactaatgacactgaggtcgcccagagcaattttgaggcccttcaagatttcttccgcctctttccggagtacaagaacaacaaacttttcctgaccggggagagctatgctggcatctacatccccaccctggccgtgctggtcatgcaggatcccagcatgaaccttcaggggctggctgtgggcaatggactctcctcctatgagcagaatgacaactccctggtctactttgcctactaccatggccttctggggaacaggctttggtcttctctccagacccactgctgctctcaaaacaagtgtaacttctatgacaacaaagacctggaatgcgtgaccaatcttcaggaagtggcccgcatcgtgggcaactctggcctcaacatctacaatctctatgccccgtgtgctggaggggtgcccagccattttaggtatgagaaggacactgttgtggtccaggatttgggcaacatcttcactcgcctgccactcaagcggatgtggcatcaggcactgctgcgctcaggggataaagtgcgcatggaccccccctgcaccaacacaacagctgcttccacctacctcaacaacccgtacgtgcggaaggccctcaacatcccggagcagctgccacaatgggacatgtgcaactttctggtaaacttacagtaccgccgtctctaccgaagcatgaactcccagtatctgaagctgcttagctcacagaaataccagatcctattatataatggagatgtagacatggcctgcaatttcatgggggatgagtggtttgtggattccctcaaccagaagatggaggtgcagcgccggccctggttagtgaagtacggggacagcggggagcagattgccggcttcgtgaaggagttctcccacatcgcctttctcacgatcaagggcgccggccacatggttcccaccgacaagcccctcgctgccttcaccatgttctcccgcttcctgaacaagcagccatactgatgaccacagcaaccagctccacggcctgatgcagcccctcccagcctctcccgctaggagagtcctcttctaagcaaagtgcccctgcaggccgggttctgccgccaggactgcccccttcccagagccctgtacatcccagactgggcccagggtctcccatagacagcctgggggcaagttagcactttattcccgcagcagttcctgaatggggtggcctggccccttctctgcttaaagaatgccctttatgatgcactgattccatcccaggaacccaacagagctcaggacagcccacagggaggtggtggacggactgtaattgatagattgattatggaattaaattgggtacagcttcaaa

SEQ ID NO: 114977 - DNA, 1972 bp, Homo sapiens
  Payload ID: 2449
  Gene Symbol: CTSA
  Gene Name: cathepsin A
  Uniprot ID: P10619
  ENST ID: ENST00000372459
  CDS Start-End: 194-1636
agaggtgagctggcaccggaggctggaggggatccccgagcccgggatcggtgcgcggcagaggaggctcgcgggtgggagctggcgctggggccggggcttccctcgcggaggcgccgccagcaactccccgggggctgctgcacggaagcgctgaggagcgagtcaacagcccctctgctgcctcccgtagatgatccgagccgcgccgccgccgctgttcctgctgctgctgctgctgctgctgctagtgtcctgggcgtcccgaggcgaggcagcccccgaccaggacgagatccagcgcctccccgggctggccaagcagccgtctttccgccagtactccggctacctcaaaggctccggctccaagcacctccactactggtttgtggagtcccagaaggatcccgagaacagccctgtggtgctttggctcaatgggggtcccggctgcagctcactagatgggctcctcacagagcatggccccttcctggtccagccagatggtgtcaccctggagtacaacccctattcttggaatctgattgccaatgtgttatacctggagtccccagctggggtgggcttctcctactccgatgacaagttttatgcaactaatgacactgaggtcgcccagagcaattttgaggcccttcaagatttcttccgcctctttccggagtacaagaacaacaaacttttcctgaccggggagagctatgctggcatctacatccccaccctggccgtgctggtcatgcaggatcccagcatgaaccttcaggggctggctgtgggcaatggactctcctcctatgagcagaatgacaactccctggtctactttgcctactaccatggccttctggggaacaggctttggtcttctctccagacccactgctgctctcaaaacaagtgtaacttctatgacaacaaagacctggaatgcgtgaccaatcttcaggaagtggcccgcatcgtgggcaactctggcctcaacatctacaatctctatgccccgtgtgctggaggggtgcccagccattttaggtatgagaaggacactgttgtggtccaggatttgggcaacatcttcactcgcctgccactcaagcggatgtggcatcaggcactgctgcgctcaggggataaagtgcgcatggaccccccctgcaccaacacaacagctgcttccacctacctcaacaacccgtacgtgcggaaggccctcaacatcccggagcagctgccacaatgggacatgtgcaactttctggtaaacttacagtaccgccgtctctaccgaagcatgaactcccagtatctgaagctgcttagctcacagaaataccagatcctattatataatggagatgtagacatggcctgcaatttcatgggggatgagtggtttgtggattccctcaaccagaagatggaggtgcagcgccggccctggttagtgaagtacggggacagcggggagcagattgccggcttcgtgaaggagttctcccacatcgcctttctcacgatcaagggcgccggccacatggttcccaccgacaagcccctcgctgccttcaccatgttctcccgcttcctgaacaagcagccatactgatgaccacagcaaccagctccacggcctgatgcagcccctcccagcctctcccgctaggagagtcctcttctaagcaaagtgcccctgcaggccgggttctgccgccaggactgcccccttcccagagccctgtacatcccagactgggcccagggtctcccatagacagcctgggggcaagttagcactttattcccgcagcagttcctgaatggggtggcctggccccttctctgcttaaagaatgccctttatgatgcactgattccatcccaggaacccaacagagctcaggacagcccacagggaggtggtggacggactgtaattgataga

SEQ ID NO: 114978 - DNA, 2149 bp, Homo sapiens
  Payload ID: 2449
  Gene Symbol: CTSA
  Gene Name: cathepsin A
  ENST ID: ENST00000372484
  CDS Start-End: 283-1779
gcaatgatggtgaccgcaaggcgaccttgtaaggcatttcccccctgactcccttccccgagcctctgcccgggggtcctagcgccgctttctcagccatcccgcctacaacttagccgtccacaacaggatcatctgatcgcgtgcgcccgggctacgatctgcgaggcccgcggaccttgacccggcattgaccgccaccgccccccaggtccgtagggaccaaagaaggggcgggaggaagactgtcacgtggcgccggagttcacgtgactcgtacacatgacttccagtccccgggcgcctcctggagagcaaggacgcgggggagcagagatgatccgagccgcgccgccgccgctgttcctgctgctgctgctgctgctgctgctagtgtcctgggcgtcccgaggcgaggcagcccccgaccaggacgagatccagcgcctccccgggctggccaagcagccgtctttccgccagtactccggctacctcaaaggctccggctccaagcacctccactactggtttgtggagtcccagaaggatcccgagaacagccctgtggtgctttggctcaatgggggtcccggctgcagctcactagatgggctcctcacagagcatggccccttcctggtccagccagatggtgtcaccctggagtacaacccctattcttggaatctgattgccaatgtgttatacctggagtccccagctggggtgggcttctcctactccgatgacaagttttatgcaactaatgacactgaggtcgcccagagcaattttgaggcccttcaagatttcttccgcctctttccggagtacaagaacaacaaacttttcctgaccggggagagctatgctggcatctacatccccaccctggccgtgctggtcatgcaggatcccagcatgaaccttcaggggctggctgtgggcaatggactctcctcctatgagcagaatgacaactccctggtctactttgcctactaccatggccttctggggaacaggctttggtcttctctccagacccactgctgctctcaaaacaagtgtaacttctatgacaacaaagacctggaatgcgtgaccaatcttcaggaagtggcccgcatcgtgggcaactctggcctcaacatctacaatctctatgccccgtgtgctggaggggtgcccagccattttaggtatgagaaggacactgttgtggtccaggatttgggcaacatcttcactcgcctgccactcaagcggatgtggcatcaggcactgctgcgctcaggggataaagtgcgcatggaccccccctgcaccaacacaacagctgcttccacctacctcaacaacccgtacgtgcggaaggccctcaacatcccggagcagctgccacaatgggacatgtgcaactttctggtaaacttacagtaccgccgtctctaccgaagcatgaactcccagtatctgaagctgcttagctcacagaaataccagatcctattatataatggagatgtagacatggcctgcaatttcatgggggatgagtggtttgtggattccctcaaccagaagatggaggtgcagcgccggccctggttagtgaagtacggggacagcggggagcagattgccggcttcgtgaaggagttctcccacatcgcctttctcacgatcaagggcgccggccacatggttcccaccgacaagcccctcgctgccttcaccatgttctcccgcttcctgaacaagcagccatactgatgaccacagcaaccagctccacggcctgatgcagcccctcccagcctctcccgctaggagagtcctcttctaagcaaagtgcccctgcaggccgggttctgccgccaggactgcccccttcccagagccctgtacatcccagactgggcccagggtctcccatagacagcctgggggcaagttagcactttattcccgcagcagttcctgaatggggtggcctggccccttctctgcttaaagaatgccctttatgatgcactgattccatcccaggaacccaacagagctcaggacagcccacagggaggtggtggacggactgtaattgatagattgattatggaattaaattgggtacagcttcaaa

SEQ ID NO: 114979 - DNA, 606 bp, Homo sapiens
  Payload ID: 2449
  Gene Symbol: CTSA
  Gene Name: cathepsin A
  ENST ID: ENST00000419493
  CDS Start-End: 1-606
caagatttcttccgcctctttccggagtacaagaacaacaaacttttcctgaccggggagagctatgctggcatctacatccccaccctggccgtgctggtcatgcaggatcccagcatgaaccttcaggggctggctgtgggcaatggactctcctcctatgagcagaatgacaactccctggtctactttgcctactaccatggccttctggggaacaggctttggtcttctctccagacccactgctgctctcaaaacaagtgtaacttctatgacaacaaagacctggaatgcgtgaccaatcttcaggaagtggcccgcatcgtgggcaactctggcctcaacatctacaatctctatgccccgtgtgctggaggggtgcccagccattttaggacactgttgtggtccaggatttgggcaacatcttcactcgcctgccactcaagcggatgtggcatcaggcactgctgcgctcaggggataaagtgcgcatggaccccccctgcaccaacacaacagctgcttccacctacctcaacaacccgtacgtgcggaaggccctcaacatcccggagcagctgccacaatgggacatgtgca

SEQ ID NO: 114980 - DNA, 403 bp, Homo sapiens
  Payload ID: 2449
  Gene Symbol: CTSA
  Gene Name: cathepsin A
  ENST ID: ENST00000607482
  CDS Start-End: 75-403
agaggtgagctggcaccggaggctggaggggatccccgagcccgggatcggtgcgcggcagaggaggctcgcggatgatccgagccgcgccgccgccgctgttcctgctgctgctgctgctgctgctgctagtgtcctgggcgtcccgaggcgaggcagcccccgaccaggacgagatccagcgcctccccgggctggccaagcagccgtctttccgccagtactccggctacctcaaaggctccggctccaagcacctccactactggtttgtggagtcccagaaggatcccgagaacagccctgtggtgctttggctcaatgggggtcccggctgcagctcactagatgggctcctcacagagcatggccccttcctggtccagccagatggtgtcaccct

SEQ ID NO: 114981 - DNA, 584 bp, Homo sapiens
  Payload ID: 2449
  Gene Symbol: CTSA
  Gene Name: cathepsin A
  ENST ID: ENST00000606394
  CDS Start-End: 14-262
gtgactcgtacacatgacttccagtccccgggcgcctcctggagagcaaggacgcgggggagcagagatgatccgagccgcgccgccgccgctgttcctgctgctgctgctgctgctgctgctagtgtcctgggcgtcccgaggcgaggcagcccccgaccaggacgagatccagcgcctccccgggctggccaagcagccgtctttccgccagtactccggctacctcaaaggctccggctccaagcacctccactactgattgccaatgtgttatacctggagtccccagctggggtgggcttctcctactccgatgacaagttttatgcaactaatgacactgaggtcgcccagagcaattttgaggcccttcaagatttcttccgcctctttccggagtacaagaacaacaaacttttcctgaccggggagagctatgctggcatctacatccccaccctggccgtgctggtcatgcaggatcccagcatgaaccttcaggggctggctgtgggcaatggactctcctcctatgagcagaatgacaactccctggtctactttgcctactaccatggcct

SEQ ID NO: 114982 - DNA, 3056 bp, Homo sapiens
  Payload ID: 2449
  Gene Symbol: CTSA
  Gene Name: cathepsin A
  ENST ID: ENST00000606788
  CDS Start-End: 1183-1878
taaactagtgccggacagacgaaggcctagcacatgggctacggagccctagtagattccagtccccacactgagccaggaggggtcgctgcccagggatacctacagccatactcgagctggacaaggcgcacgctctttgtggaagcaaacacgtccaccaccgcgtagaggggctgcgcagctggcagtccccgggcgctcgggcccatgtcctcgccgttgatgatgatgtgcatgtcggccgtgccatcggggcgcgggcaaaagaggacacccaggcggctacggcgcgcggtcggaggcagcacgttcagctcatagagctggtccaagagatggctgtagagccctggccggctgcggcccaccaggcggtcccggggaatgcgaaactgctcaatgcgcagatatggttccacgaggagggttggaggtcggctgggggccgctgcctccgcctccgggcggccctcccggggcacgcggttgtggtggcgcgtgatggcgaagacccaggtgtggcccaggttgaccagatcgggcagagaaaactcgggaacgggggccagactggcggggtccagcgcggtcagaccgagacgcagatgtccgcaccagcccagctctttctcctcgatctcgaccaggaagacctggcccggggccagcggctcgcggctgaagcacacgccgtgggcgaagctctccacgcgtgtggcccgcgtcccagaggggtccacgcggatgttggcaccgtgcacccgatggaagcgggtgggagggggctccgggcgctcgagtccccagagtgcacccgaatccacgggctcggaggcagcagccatctctcggccatagggcaggccagctggcgccgggggctattttgggcggcgggcaatgatggtgaccgcaaggcgaccttgtaaggcatttcccccctgactcccttccccgagcctctgcccgggggtcctagcgccgctttctcagccatcccgcctacaacttagccgtccacaacaggatcatctgatcgcgtgcgcccgggctacgatctgcgaggcccgcggaccttgacccggcattgaccgccaccgccccccaggtccgtagggaccaaagaaggggcgggaggaagactgtcacgtggcgccggagttcacgtgactcgtacacatgacttccagtccccgggcgcctcctggagagcaaggacgcgggggagcagagatgatccgagccgcgccgccgccgctgttcctgctgctgctgctgctgctgctgctagtgtcctgggcgtcccgaggcgaggcagcccccgaccaggacgagatccagcgcctccccgggctggccaagcagccgtctttccgccagtactccggctacctcaaaggctccggctccaagcacctccactactggtttgtggagtcccagaaggatcccgagaacagccctgtggtgctttggctcaatgggggtcccggctgcagctcactagatgggctcctcacagagcatggccccttcctggtccagccagatggtgtcaccctggagtacaacccctattcttggaatctgattgccaatgtgttatacctggagtccccagctggggtgggcttctcctactccgatgacaagttttatgcaactaatgacactgaggtcgcccagagcaattttgaggcccttcaagatttcttccgcctctttccggagtacaagaacaacaaacttttcctgaccggggagagctatgctggcatctacatccccaccctggccgtgctggtcatgcaggatcccagcatgaaccttcaggtgcagggggctggctgtgggcaatggactctcctcctatgagcagaatgacaactccctggtctactttgcctactaccatggccttctggggaacaggctttggtcttctctccagacccactgctgctctcaaaacaagtgtaacttctatgacaacaaagacctggaatgcgtgaccaatcttcaggaagtggcccgcatcgtgggcaactctggcctcaacatctacaatctctatgccccgtgtgctggaggggtgcccagccattttaggtatgagaaggacactgttgtggtccaggatttgggcaacatcttcactcgcctgccactcaagcggatgtggcatcaggcactgctgcgctcaggggataaagtgcgcatggaccccccctgcaccaacacaacagctgcttccacctacctcaacaacccgtacgtgcggaaggccctcaacatcccggagcagctgccacaatgggacatgtgcaactttctggtaaacttacagtaccgccgtctctaccgaagcatgaactcccagtatctgaagctgcttagctcacagaaataccagatcctattatataatggagatgtagacatggcctgcaatttcatgggggatgagtggtttgtggattccctcaaccagaagatggaggtgcagcgccggccctggttagtgaagtacggggacagcggggagcagattgccggcttcgtgaaggagttctcccacatcgcctttctcacgatcaagggcgccggccacatggttcccaccgacaagcccctcgctgccttcaccatgttctcccgcttcctgaacaagcagccatactgatgaccacagcaaccagctccacggcctgatgcagcccctcccagcctctcccgctaggagagtcctcttctaagcaaagtgcccctgcaggccgggttctgccgccaggactgcccccttcccagagccctgtacatcccagactgggcccagggtctcccatagacagcctgggggcaagttagcactttattcccgcagcagttcctgaatggggtggcctggccccttctctgcttaaagaatgccctttatgatgcactgattccatcccaggaacccaacagagctcaggacagcccacagggaggtggtggacggactgtaattgatagattgattatggaattaaattgggtacagcttcaaa

SEQ ID NO: 114983 - DNA, 2028 bp, Homo sapiens
  Payload ID: 2450
  Gene Symbol: CTSB
  Gene Name: cathepsin B
  Uniprot ID: P07858
  ENST ID: ENST00000345125
  CDS Start-End: 224-1243
ggctccggcaaccgctccggcaacgccaaccgctccgctgcgcgcaggctgggctgcaggctctcggctgcagcgctgggtgtcttcaggcctatggagagcagcttgcgtgggctgggcctgcagtacctggtttgcatagatgattggcaggtgggcagcacggggaaggacctgtgagtggccaacctggttcaggtggatctaggatccggcttccaacatgtggcagctctgggcctccctctgctgcctgctggtgttggccaatgcccggagcaggccctctttccatcccctgtcggatgagctggtcaactatgtcaacaaacggaataccacgtggcaggccgggcacaacttctacaacgtggacatgagctacttgaagaggctatgtggtaccttcctgggtgggcccaagccaccccagagagttatgtttaccgaggacctgaagctgcctgcaagcttcgatgcacgggaacaatggccacagtgtcccaccatcaaagagatcagagaccagggctcctgtggctcctgctgggccttcggggctgtggaagccatctctgaccggatctgcatccacaccaatgcgcacgtcagcgtggaggtgtcggcggaggacctgctcacatgctgtggcagcatgtgtggggacggctgtaatggtggctatcctgctgaagcttggaacttctggacaagaaaaggcctggtttctggtggcctctatgaatcccatgtagggtgcagaccgtactccatccctccctgtgagcaccacgtcaacggctcccggcccccatgcacgggggagggagatacccccaagtgtagcaagatctgtgagcctggctacagcccgacctacaaacaggacaagcactacggatacaattcctacagcgtctccaatagcgagaaggacatcatggccgagatctacaaaaacggccccgtggagggagctttctctgtgtattcggacttcctgctctacaagtcaggagtgtaccaacacgtcaccggagagatgatgggtggccatgccatccgcatcctgggctggggagtggagaatggcacaccctactggctggttgccaactcctggaacactgactggggtgacaatggcttctttaaaatactcagaggacaggatcactgtggaatcgaatcagaagtggtggctggaattccacgcaccgatcagtactgggaaaagatctaatctgccgtgggcctgtcgtgccagtcctgggggcgagatcggggtagaaatgcattttattctttaagttcacgtaagatacaagtttcagacagggtctgaaggactggattggccaaacatcagacctgtcttccaaggagaccaagtcctggctacatcccagcctgtggttacagtgcagacaggccatgtgagccaccgctgccagcacagagcgtccttccccctgtagactagtgccgtagggagtacctgctgccccagctgactgtggccccctccgtgatccatccatctccagggagcaagacagagacgcaggaatggaaagcggagttcctaacaggatgaaagttcccccatcagttcccccagtacctccaagcaagtagctttccacatttgtcacagaaatcagaggagagacggtgttgggagccctttggagaacgccagtctcccaggccccctgcatctatcgagtttgcaatgtcacaacctctctgatcttgtgctcagcatgattctttaatagaagttttattttttcgtgcactctgctaatcatgtgggtgagccagtggaacagcgggagacctgtgctagttttacagattgcctccttatgacgcggctcaaaaggaaaccaagtggtcaggagttgtttctgacccactgatctctactaccacaaggaaaatagtttaggagaaaccagcttttactgtttttgaaaaattacagcttcaccctgtcaagttaacaaggaatgcctgtgccaa

SEQ ID NO: 114984 - DNA, 3875 bp, Homo sapiens
  Payload ID: 2450
  Gene Symbol: CTSB
  Gene Name: cathepsin B
  Uniprot ID: P07858
  ENST ID: ENST00000353047
  CDS Start-End: 255-1274
gggcggcggaaggtggcgggagggggtgggggctgggaagcaccgtgcgcgggcggcgggagggcccgggcggggctgcgcggtggtcacgtggggcggggccgggagggtacttagggccggggctggcccaggctacggcggctgcagggctccggcaaccgctccggcaacgccaaccgctccgctgcgcgcaggctgggctgcaggctctcggctgcagcgctgggtggatctaggatccggcttccaacatgtggcagctctgggcctccctctgctgcctgctggtgttggccaatgcccggagcaggccctctttccatcccctgtcggatgagctggtcaactatgtcaacaaacggaataccacgtggcaggccgggcacaacttctacaacgtggacatgagctacttgaagaggctatgtggtaccttcctgggtgggcccaagccaccccagagagttatgtttaccgaggacctgaagctgcctgcaagcttcgatgcacgggaacaatggccacagtgtcccaccatcaaagagatcagagaccagggctcctgtggctcctgctgggccttcggggctgtggaagccatctctgaccggatctgcatccacaccaatgcgcacgtcagcgtggaggtgtcggcggaggacctgctcacatgctgtggcagcatgtgtggggacggctgtaatggtggctatcctgctgaagcttggaacttctggacaagaaaaggcctggtttctggtggcctctatgaatcccatgtagggtgcagaccgtactccatccctccctgtgagcaccacgtcaacggctcccggcccccatgcacgggggagggagatacccccaagtgtagcaagatctgtgagcctggctacagcccgacctacaaacaggacaagcactacggatacaattcctacagcgtctccaatagcgagaaggacatcatggccgagatctacaaaaacggccccgtggagggagctttctctgtgtattcggacttcctgctctacaagtcaggagtgtaccaacacgtcaccggagagatgatgggtggccatgccatccgcatcctgggctggggagtggagaatggcacaccctactggctggttgccaactcctggaacactgactggggtgacaatggcttctttaaaatactcagaggacaggatcactgtggaatcgaatcagaagtggtggctggaattccacgcaccgatcagtactgggaaaagatctaatctgccgtgggcctgtcgtgccagtcctgggggcgagatcggggtagaaatgcattttattctttaagttcacgtaagatacaagtttcagacagggtctgaaggactggattggccaaacatcagacctgtcttccaaggagaccaagtcctggctacatcccagcctgtggttacagtgcagacaggccatgtgagccaccgctgccagcacagagcgtccttccccctgtagactagtgccgtagggagtacctgctgccccagctgactgtggccccctccgtgatccatccatctccagggagcaagacagagacgcaggaatggaaagcggagttcctaacaggatgaaagttcccccatcagttcccccagtacctccaagcaagtagctttccacatttgtcacagaaatcagaggagagacggtgttgggagccctttggagaacgccagtctcccaggccccctgcatctatcgagtttgcaatgtcacaacctctctgatcttgtgctcagcatgattctttaatagaagttttattttttcgtgcactctgctaatcatgtgggtgagccagtggaacagcgggagacctgtgctagttttacagattgcctccttatgacgcggctcaaaaggaaaccaagtggtcaggagttgtttctgacccactgatctctactaccacaaggaaaatagtttaggagaaaccagcttttactgtttttgaaaaattacagcttcaccctgtcaagttaacaaggaatgcctgtgccaataaaagttttctccaacttgaagtctactctgatgggatctcagatcctttgtcactgcctatagacttgtagctgctgtctctctttgtccctgcagagaatcacgtcctggaactgcatgttcttgcgactcttgggacttcatcttaacttctcgctgccccagccatgttttcaaccatggcatccctcccccaattagttccctgtcatcctcgtcaaccttctctgtaagtgcctggtaagcttgcccttgcttaagaactcaaaacatagctgtgctctatttttttgttgttgttgtgactgacagagtgagattccgtctcccaggctggagtgcagtggcgccttctcagctcactgcaacctgcagcctcctagattcaagcgattctcctgcttcagccttccgagtagctgggatgacaggcactcaccaatatgcctgggtaatttttgtatttttaagtacatacaggatttcaccatgttggccaggctagtttcaaactcccggcctcaggtggtctgcctgcctcagcctcccaaagtgttgggattacaggcgtgagccactgggccctgcctgtattttttatcagccacaaatccagcaacaagctgaggattcagctcataaaacaggcttggtgtcttggtgatctcacataaccaagatgctaccccgtggggaaccacatccccctggatgccctccagccttggtttgggctggagtcagggcctgtatacagtattttgaatttgtatgccactggtttgcattgctggtcaggaactctagtgctttgcatagccctggtttagaaacatgttatagcagttcttggtatagagcaaactagaagaaccagcaatcattccactgtcctgccaaggtacacctcagtactccccttcccaactgaagtggtatgaggctagctctttccaaaagcattcaagtttggcttctgatgtgactcagaatttaggaaccagatgctagatcaaataagctctgaaaatctgaggaacattgtaggaaaggtttgttaagcatctcttaagtgccatgatgagcataacagccggccgtcgtggctcacgcctgtaatcccagcactttgggaggccaaggtgggaggatgacaaggtcaggagttcaagaccagcctggccaacatgctgaaacctcacctctactaaaaatacaaaaattagctgggcatggtggcacatgcctgtaatcccagctacttgggaggctgaggcaggagaatcgcttgaacccgggaggcggaggttgcagtgagccaagacagtgccagtgcactccagcctcggtgacagcgcaaggctccgtctcaataattaaaaaaaaaaaaaaaaaaaaaaaggccgggcgcagtggctcaagcctgtaatcccagcactttgggaggctgaggcgggcagatcacctgaggtcaggagttttgagatcagccttggcaacacggtgaaaccccatctctactaaaaatacaaaattagccaagcatgctggcacatgcctgtaatcccagctactcgggaggctgaggtacgagaatcgcttgaacctgggaggcagaggatgcagtgagccgagatcacgccattgcactccagcctgggggacaagagtgaatctgtgtctcaccaaaaaaaaaaagaaaaagaaagatgcttaacaaaggttaccataagccacaaattcataaccacttatccttccagtttcaagtagaatatattcataacctcaataaagttctccctgctcccaaa

SEQ ID NO: 114985 - DNA, 2011 bp, Homo sapiens
  Payload ID: 2450
  Gene Symbol: CTSB
  Gene Name: cathepsin B
  Uniprot ID: P07858
  ENST ID: ENST00000453527
  CDS Start-End: 187-1206
ggctgcagggctccggcaaccgctccggcaacgccaaccgctccgctgcgcgcaggctgggctgcaggctctcggctgcagcgctgggtgtcttcaggcctatggagagcagcttgcgtgggctgggcctgcagtacctggtttgcatagatgattggcaggtggatctaggatccggcttccaacatgtggcagctctgggcctccctctgctgcctgctggtgttggccaatgcccggagcaggccctctttccatcccctgtcggatgagctggtcaactatgtcaacaaacggaataccacgtggcaggccgggcacaacttctacaacgtggacatgagctacttgaagaggctatgtggtaccttcctgggtgggcccaagccaccccagagagttatgtttaccgaggacctgaagctgcctgcaagcttcgatgcacgggaacaatggccacagtgtcccaccatcaaagagatcagagaccagggctcctgtggctcctgctgggccttcggggctgtggaagccatctctgaccggatctgcatccacaccaatgcgcacgtcagcgtggaggtgtcggcggaggacctgctcacatgctgtggcagcatgtgtggggacggctgtaatggtggctatcctgctgaagcttggaacttctggacaagaaaaggcctggtttctggtggcctctatgaatcccatgtagggtgcagaccgtactccatccctccctgtgagcaccacgtcaacggctcccggcccccatgcacgggggagggagatacccccaagtgtagcaagatctgtgagcctggctacagcccgacctacaaacaggacaagcactacggatacaattcctacagcgtctccaatagcgagaaggacatcatggccgagatctacaaaaacggccccgtggagggagctttctctgtgtattcggacttcctgctctacaagtcaggagtgtaccaacacgtcaccggagagatgatgggtggccatgccatccgcatcctgggctggggagtggagaatggcacaccctactggctggttgccaactcctggaacactgactggggtgacaatggcttctttaaaatactcagaggacaggatcactgtggaatcgaatcagaagtggtggctggaattccacgcaccgatcagtactgggaaaagatctaatctgccgtgggcctgtcgtgccagtcctgggggcgagatcggggtagaaatgcattttattctttaagttcacgtaagatacaagtttcagacagggtctgaaggactggattggccaaacatcagacctgtcttccaaggagaccaagtcctggctacatcccagcctgtggttacagtgcagacaggccatgtgagccaccgctgccagcacagagcgtccttccccctgtagactagtgccgtagggagtacctgctgccccagctgactgtggccccctccgtgatccatccatctccagggagcaagacagagacgcaggaatggaaagcggagttcctaacaggatgaaagttcccccatcagttcccccagtacctccaagcaagtagctttccacatttgtcacagaaatcagaggagagacggtgttgggagccctttggagaacgccagtctcccaggccccctgcatctatcgagtttgcaatgtcacaacctctctgatcttgtgctcagcatgattctttaatagaagttttattttttcgtgcactctgctaatcatgtgggtgagccagtggaacagcgggagacctgtgctagttttacagattgcctccttatgacgcggctcaaaaggaaaccaagtggtcaggagttgtttctgacccactgatctctactaccacaaggaaaatagtttaggagaaaccagcttttactgtttttgaaaaattacagcttcaccctgtcaagttaacaaggaatgcctgtgccaataaaagttttctccaacttg

SEQ ID NO: 114986 - DNA, 573 bp, Homo sapiens
  Payload ID: 2450
  Gene Symbol: CTSB
  Gene Name: cathepsin B
  ENST ID: ENST00000532656
  CDS Start-End: 362-573
agggccggggctggcccaggctacggcggctgcagggctccggcaaccgctccggcaacgccaaccgctccgctgcgcgcaggctgggctgcaggctctcggctgcagcgctgggctggtgtgcagtggtgcgaccacggctcacggcagcctcagccacccagatgtaagcgatctggttcccacctcagcctcccgagtagatacttctgaaaatagaaatgatgactctgggatgcaaacgttggctgtcctatgtataaggagatggcttttcacgctcccagtgactgaggaagtttctcccagatggcgctgctctgagcctggtgcagggtggatctaggatccggcttccaacatgtggcagctctgggcctccctctgctgcctgctggtgttggccaatgcccggagcaggccctctttccatcccctgtcggatgagctggtcaactatgtcaacaaacggaataccacgtggcaggccgggcacaacttctacaacgtggacatgagctacttgaagaggctatgtggtaccttcctgggtgggcccaagccaccccagag

SEQ ID NO: 114987 - DNA, 559 bp, Homo sapiens
  Payload ID: 2450
  Gene Symbol: CTSB
  Gene Name: cathepsin B
  ENST ID: ENST00000526645
  CDS Start-End: 152-559
agctcctaggttccttcgcagtgacagccactcttttctatttcacgctggcggccccttgagccccaacctggataccataggggaggagcagagaagccaggaacaccacagccctgggccaaggtggatctaggatccggcttccaacatgtggcagctctgggcctccctctgctgcctgctggtgttggccaatgcccggagcaggccctctttccatcccctgtcggatgagctggtcaactatgtcaacaaacggaataccacgtggcaggccgggcacaacttctacaacgtggacatgagctacttgaagaggctatgtggtaccttcctgggtgggcccaagccaccccagagagttatgtttaccgaggacctgaagctgcctgcaagcttcgatgcacgggaacaatggccacagtgtcccaccatcaaagagatcagagaccagggctcctgtggctcctgctgggccttcggggctgtggaagccatctctgaccggatctgcatccacaccaatgcgcacgtcagcgtggaggtgtcggcggag

SEQ ID NO: 114988 - DNA, 368 bp, Homo sapiens
  Payload ID: 2450
  Gene Symbol: CTSB
  Gene Name: cathepsin B
  ENST ID: ENST00000524654
  CDS Start-End: 272-368
gcctcacctaggtaacgctgattcctccacggaggatgtgcttctgagtggtccgttgggtgctgtgctgatgagcatcacccagcattttacgacacatgtgctgccccagagggctgggctcccgtcagagctcttttccactggctgggtgcggtggctcacacctgtaatcccagcactttgggaggctgaggccagtggatcacctgaggtcaggagttcgagaccagcctggctaacatggtggatctaggatccggcttccaacatgtggcagctctgggcctccctctgctgcctgctggtgttggccaatgcccggagcaggccctctttccatcccctgtcggatgagctggtcaact

SEQ ID NO: 114989 - DNA, 2009 bp, Homo sapiens
  Payload ID: 2450
  Gene Symbol: CTSB
  Gene Name: cathepsin B
  Uniprot ID: P07858
  ENST ID: ENST00000533455
  CDS Start-End: 220-1239
ggctggcccaggctacggcggctgcagggctccggcaaccgctccggcaacgccaaccgctccgctgcgcgcaggctgggctgcaggctctcggctgcagcgctgggctggtgtgcagtggtgcgaccacggctcacggcagcctcagccacccagatgtaagcgatctggttcccacctcagcctcccgagtagtggatctaggatccggcttccaacatgtggcagctctgggcctccctctgctgcctgctggtgttggccaatgcccggagcaggccctctttccatcccctgtcggatgagctggtcaactatgtcaacaaacggaataccacgtggcaggccgggcacaacttctacaacgtggacatgagctacttgaagaggctatgtggtaccttcctgggtgggcccaagccaccccagagagttatgtttaccgaggacctgaagctgcctgcaagcttcgatgcacgggaacaatggccacagtgtcccaccatcaaagagatcagagaccagggctcctgtggctcctgctgggccttcggggctgtggaagccatctctgaccggatctgcatccacaccaatgcgcacgtcagcgtggaggtgtcggcggaggacctgctcacatgctgtggcagcatgtgtggggacggctgtaatggtggctatcctgctgaagcttggaacttctggacaagaaaaggcctggtttctggtggcctctatgaatcccatgtagggtgcagaccgtactccatccctccctgtgagcaccacgtcaacggctcccggcccccatgcacgggggagggagatacccccaagtgtagcaagatctgtgagcctggctacagcccgacctacaaacaggacaagcactacggatacaattcctacagcgtctccaatagcgagaaggacatcatggccgagatctacaaaaacggccccgtggagggagctttctctgtgtattcggacttcctgctctacaagtcaggagtgtaccaacacgtcaccggagagatgatgggtggccatgccatccgcatcctgggctggggagtggagaatggcacaccctactggctggttgccaactcctggaacactgactggggtgacaatggcttctttaaaatactcagaggacaggatcactgtggaatcgaatcagaagtggtggctggaattccacgcaccgatcagtactgggaaaagatctaatctgccgtgggcctgtcgtgccagtcctgggggcgagatcggggtagaaatgcattttattctttaagttcacgtaagatacaagtttcagacagggtctgaaggactggattggccaaacatcagacctgtcttccaaggagaccaagtcctggctacatcccagcctgtggttacagtgcagacaggccatgtgagccaccgctgccagcacagagcgtccttccccctgtagactagtgccgtagggagtacctgctgccccagctgactgtggccccctccgtgatccatccatctccagggagcaagacagagacgcaggaatggaaagcggagttcctaacaggatgaaagttcccccatcagttcccccagtacctccaagcaagtagctttccacatttgtcacagaaatcagaggagagacggtgttgggagccctttggagaacgccagtctcccaggccccctgcatctatcgagtttgcaatgtcacaacctctctgatcttgtgctcagcatgattctttaatagaagttttattttttcgtgcactctgctaatcatgtgggtgagccagtggaacagcgggagacctgtgctagttttacagattgcctccttatgacgcggctcaaaaggaaaccaagtggtcaggagttgtttctgacccactgatctctactaccacaaggaaaatagtttaggagaaaccagcttttactgtttttgaaaaattacagcttcaccctgtcaagttaacaag

SEQ ID NO: 114990 - DNA, 570 bp, Homo sapiens
  Payload ID: 2450
  Gene Symbol: CTSB
  Gene Name: cathepsin B
  ENST ID: ENST00000532392
  CDS Start-End: 509-570
gcggctgcagggctccggcaaccgctccggcaacgccaaccgctccgctgcgcgcaggctgggctgcaggctctcggctgcagcgctgggatttgcctggccaactttctgcgcaagatcccacgcaattcctgggaccccagaagacaggtcctgttgaagaacaggaatctggcactgggtgggctggggaggaagccgcacggtgttaaatccataaacaggaagagaaaccagacagcgaaaccaagaggcgaatgggcgattggatgccggtggggagaaggccgggggcgcaccctgctcctggactccagtaaagggaggccgggcagagtccctggggcgccacctccccctcggtggagtctgactctctcacccaggctggagtgcagtggcaagatctcagctcactgcaactccgcttcctgtgttcaagccattctcctgcctcagtctctcaactagctgcgattacaggtggatctaggatccggcttccaacatgtggcagctctgggcctccctctgctgcctgctggtgttggccaatgcccggagcaggcc

SEQ ID NO: 114991 - DNA, 1436 bp, Homo sapiens
  Payload ID: 2450
  Gene Symbol: CTSB
  Gene Name: cathepsin B
  Uniprot ID: P07858
  ENST ID: ENST00000531089
  CDS Start-End: 226-1245
ggccggggctggcccaggctacggcggctgcagggctccggcaaccgctccggcaacgccaaccgctccgctgcgcgcaggctgggctgcaggctctcggctgcagcgctgggctggtgtgcagtggtgcgaccacggctcacggcagcctcagccacccagatgtaagcgatctggttcccacctcagcctcccgagtagtggatctaggatccggcttccaacatgtggcagctctgggcctccctctgctgcctgctggtgttggccaatgcccggagcaggccctctttccatcccctgtcggatgagctggtcaactatgtcaacaaacggaataccacgtggcaggccgggcacaacttctacaacgtggacatgagctacttgaagaggctatgtggtaccttcctgggtgggcccaagccaccccagagagttatgtttaccgaggacctgaagctgcctgcaagcttcgatgcacgggaacaatggccacagtgtcccaccatcaaagagatcagagaccagggctcctgtggctcctgctgggccttcggggctgtggaagccatctctgaccggatctgcatccacaccaatgcgcacgtcagcgtggaggtgtcggcggaggacctgctcacatgctgtggcagcatgtgtggggacggctgtaatggtggctatcctgctgaagcttggaacttctggacaagaaaaggcctggtttctggtggcctctatgaatcccatgtagggtgcagaccgtactccatccctccctgtgagcaccacgtcaacggctcccggcccccatgcacgggggagggagatacccccaagtgtagcaagatctgtgagcctggctacagcccgacctacaaacaggacaagcactacggatacaattcctacagcgtctccaatagcgagaaggacatcatggccgagatctacaaaaacggccccgtggagggagctttctctgtgtattcggacttcctgctctacaagtcaggagtgtaccaacacgtcaccggagagatgatgggtggccatgccatccgcatcctgggctggggagtggagaatggcacaccctactggctggttgccaactcctggaacactgactggggtgacaatggcttctttaaaatactcagaggacaggatcactgtggaatcgaatcagaagtggtggctggaattccacgcaccgatcagtactgggaaaagatctaatctgccgtgggcctgtcgtgccagtcctgggggcgagatcgggagaatcacgtcctggaactgcatgttcttgcgactcttgggacttcatcttaacttctcgctgccccagccatgttttcaaccatggcatccctcccccaattagttccctgtcatcctcgtcaaccttctctgtaagtgcctggtaa

SEQ ID NO: 114992 - DNA, 545 bp, Homo sapiens
  Payload ID: 2450
  Gene Symbol: CTSB
  Gene Name: cathepsin B
  ENST ID: ENST00000527215
  CDS Start-End: 341-545
gcggctgcagggctccggcaaccgctccggcaacgccaaccgctccgctgcgcgcaggctgggctgcaggctctcggctgcagcgctgggaagagaaaccagacagcgaaaccaagaggcgaatgggcgattggatgccggtggggagaaggccgggggcgcaccctgctcctggactccagtaaagggaggccgggcagagtccctggggcgccacctccccctcggctggtgtgcagtggtgcgaccacggctcacggcagcctcagccacccagatgtaagcgatctggttcccacctcagcctcccgagtagtggatctaggatccggcttccaacatgtggcagctctgggcctccctctgctgcctgctggtgttggccaatgcccggagcaggccctctttccatcccctgtcggatgagctggtcaactatgtcaacaaacggaataccacgtggcaggccgggcacaacttctacaacgtggacatgagctacttgaagaggctatgtggtaccttcctgggtgggcccaagccac

SEQ ID NO: 114993 - DNA, 556 bp, Homo sapiens
  Payload ID: 2450
  Gene Symbol: CTSB
  Gene Name: cathepsin B
  ENST ID: ENST00000528965
  CDS Start-End: 391-556
gaaggatttgcctggccaactttctgcgcaagatcccacgcaattcctgggaccccagaagacaggtcctgttgaagaacaggaatctggcactgggtgggctggggaggaagccgcacggtgttaaatccataaacaggaagagaaaccagacagcgaaaccaagaggcgaatgggcgattggatgccggtggggagaaggccgggggcgcaccctgctcctggactccagtaaagggaggccgggcagagtccctggggcgccacctccccctcggctggtgtgcagtggtgcgaccacggctcacggcagcctcagccacccagatgtaagcgatctggttcccacctcagcctcccgagtagtggatctaggatccggcttccaacatgtggcagctctgggcctccctctgctgcctgctggtgttggccaatgcccggagcaggccctctttccatcccctgtcggatgagctggtcaactatgtcaacaaacggaataccacgtggcaggccgggcacaacttctacaacgtggacatgagctacttga

SEQ ID NO: 114994 - DNA, 975 bp, Homo sapiens
  Payload ID: 2450
  Gene Symbol: CTSB
  Gene Name: cathepsin B
  ENST ID: ENST00000533572
  CDS Start-End: 466-975
caggaccgccgagggaggcgcctgcgaggaagagctcggccgggtccggagactgctgcctgggaccgcgctcccagcgcctgggcctcggtgtctccgggccaaactgccgacataatcgcatctgccggcatctattttcggtttatttccccctcattgcgaaggatttgcctggccaactttctgcgcaagatcccacgcaattcctgggaccccagaagacaggtcctgttgaagaacaggaatctggcactgggtgggctggggaggaagccgcacggtgttaaatccataaacaggaagagaaaccagacagcgaaaccaagaggcgaatgggcgattggatgccggtggggagaaggccgggggcgcaccctgctcctggactccagtaaagggaggccgggcagagtccctggggcgccacctccccctcggtggatctaggatccggcttccaacatgtggcagctctgggcctccctctgctgcctgctggtgttggccaatgcccggagcaggccctctttccatcccctgtcggatgagctggtcaactatgtcaacaaacggaataccacgtggcaggccgggcacaacttctacaacgtggacatgagctacttgaagaggctatgtggtaccttcctgggtgggcccaagccaccccagagagttatgtttaccgaggacctgaagctgcctgcaagcttcgatgcacgggaacaatggccacagtgtcccaccatcaaagagatcagagaccagggctcctgtggctcctgctgggccttcggggctgtggaagccatctctgaccggatctgcatccacaccaatgcgcacgtcagcgtggaggtgtcggcggaggacctgctcacatgctgtggcagcatgtgtggggacggctgtaatggtggctatcctgctgaagcttggaacttctggacaagaaaaggcctggtttctggt

SEQ ID NO: 114995 - DNA, 1989 bp, Homo sapiens
  Payload ID: 2450
  Gene Symbol: CTSB
  Gene Name: cathepsin B
  Uniprot ID: P07858
  ENST ID: ENST00000534510
  CDS Start-End: 215-1234
ggctggcccaggctacggcggctgcagggctccggcaaccgctccggcaacgccaaccgctccgctgcgcgcaggctgggctgcaggctctcggctgcagcgctggcacgctggcggccccttgagccccaacctggataccataggggaggagcagagaagccaggaacaccacagccctgggccaaggtggatctaggatccggcttccaacatgtggcagctctgggcctccctctgctgcctgctggtgttggccaatgcccggagcaggccctctttccatcccctgtcggatgagctggtcaactatgtcaacaaacggaataccacgtggcaggccgggcacaacttctacaacgtggacatgagctacttgaagaggctatgtggtaccttcctgggtgggcccaagccaccccagagagttatgtttaccgaggacctgaagctgcctgcaagcttcgatgcacgggaacaatggccacagtgtcccaccatcaaagagatcagagaccagggctcctgtggctcctgctgggccttcggggctgtggaagccatctctgaccggatctgcatccacaccaatgcgcacgtcagcgtggaggtgtcggcggaggacctgctcacatgctgtggcagcatgtgtggggacggctgtaatggtggctatcctgctgaagcttggaacttctggacaagaaaaggcctggtttctggtggcctctatgaatcccatgtagggtgcagaccgtactccatccctccctgtgagcaccacgtcaacggctcccggcccccatgcacgggggagggagatacccccaagtgtagcaagatctgtgagcctggctacagcccgacctacaaacaggacaagcactacggatacaattcctacagcgtctccaatagcgagaaggacatcatggccgagatctacaaaaacggccccgtggagggagctttctctgtgtattcggacttcctgctctacaagtcaggagtgtaccaacacgtcaccggagagatgatgggtggccatgccatccgcatcctgggctggggagtggagaatggcacaccctactggctggttgccaactcctggaacactgactggggtgacaatggcttctttaaaatactcagaggacaggatcactgtggaatcgaatcagaagtggtggctggaattccacgcaccgatcagtactgggaaaagatctaatctgccgtgggcctgtcgtgccagtcctgggggcgagatcggggtagaaatgcattttattctttaagttcacgtaagatacaagtttcagacagggtctgaaggactggattggccaaacatcagacctgtcttccaaggagaccaagtcctggctacatcccagcctgtggttacagtgcagacaggccatgtgagccaccgctgccagcacagagcgtccttccccctgtagactagtgccgtagggagtacctgctgccccagctgactgtggccccctccgtgatccatccatctccagggagcaagacagagacgcaggaatggaaagcggagttcctaacaggatgaaagttcccccatcagttcccccagtacctccaagcaagtagctttccacatttgtcacagaaatcagaggagagacggtgttgggagccctttggagaacgccagtctcccaggccccctgcatctatcgagtttgcaatgtcacaacctctctgatcttgtgctcagcatgattctttaatagaagttttattttttcgtgcactctgctaatcatgtgggtgagccagtggaacagcgggagacctgtgctagttttacagattgcctccttatgacgcggctcaaaaggaaaccaagtggtcaggagttgtttctgacccactgatctctactaccacaaggaaaatagtttaggagaaaccagcttttactgtttttgaaaaattacagcttcaccc

SEQ ID NO: 114996 - DNA, 580 bp, Homo sapiens
  Payload ID: 2450
  Gene Symbol: CTSB
  Gene Name: cathepsin B
  ENST ID: ENST00000527243
  CDS Start-End: 150-580
aaaatagaaatgatgactctgggatgcaaacgttggctgtcctatgtataaggagatggcttttcacgctcccagtgactgaggaagtttctcccagatggcgctgctctgagcctggtgcagggtggatctaggatccggcttccaacatgtggcagctctgggcctccctctgctgcctgctggtgttggccaatgcccggagcaggccctctttccatcccctgtcggatgagctggtcaactatgtcaacaaacggaataccacgtggcaggccgggcacaacttctacaacgtggacatgagctacttgaagaggctatgtggtaccttcctgggtgggcccaagccaccccagagagttatgtttaccgaggacctgaagctgcctgcaagcttcgatgcacgggaacaatggccacagtgtcccaccatcaaagagatcagagaccagggctcctgtggctcctgctgggccttcggggctgtggaagccatctctgaccggatctgcatccacaccaatgcgcacgtcagcgtggaggtgtcggcggaggacctgctcacatgctgtggcag

SEQ ID NO: 114997 - DNA, 561 bp, Homo sapiens
  Payload ID: 2450
  Gene Symbol: CTSB
  Gene Name: cathepsin B
  ENST ID: ENST00000530296
  CDS Start-End: 67-561
gtcttaaggattaaagctgtttggggagtgtctggaggagggtggatctaggatccggcttccaacatgtggcagctctgggcctccctctgctgcctgctggtgttggccaatgcccggagcaggccctctttccatcccctgtcggatgagctggtcaactatgtcaacaaacggaataccacgtggcaggccgggcacaacttctacaacgtggacatgagctacttgaagaggctatgtggtaccttcctgggtgggcccaagccaccccagagagttatgtttaccgaggacctgaagctgcctgcaagcttcgatgcacgggaacaatggccacagtgtcccaccatcaaagagatcagagaccagggctcctgtggctcctgctgggccttcggggctgtggaagccatctctgaccggatctgcatccacaccaatgcgcacgtcagcgtggaggtgtcggcggaggacctgctcacatgctgtggcagcatgtgtggggacggctgtaatggtggctatcctgctgaagcttggaacttctggacaagaaaa

SEQ ID NO: 114998 - DNA, 1389 bp, Homo sapiens
  Payload ID: 2450
  Gene Symbol: CTSB
  Gene Name: cathepsin B
  Uniprot ID: P07858
  ENST ID: ENST00000530640
  CDS Start-End: 138-1157
ggccggggctggcccaggctacggcggctgcagggctccggcaaccgctccggcaacgccaaccgctccgctgcgcgcaggctgggctgcaggctctcggctgcagcgctgggtggatctaggatccggcttccaacatgtggcagctctgggcctccctctgctgcctgctggtgttggccaatgcccggagcaggccctctttccatcccctgtcggatgagctggtcaactatgtcaacaaacggaataccacgtggcaggccgggcacaacttctacaacgtggacatgagctacttgaagaggctatgtggtaccttcctgggtgggcccaagccaccccagagagttatgtttaccgaggacctgaagctgcctgcaagcttcgatgcacgggaacaatggccacagtgtcccaccatcaaagagatcagagaccagggctcctgtggctcctgctgggccttcggggctgtggaagccatctctgaccggatctgcatccacaccaatgcgcacgtcagcgtggaggtgtcggcggaggacctgctcacatgctgtggcagcatgtgtggggacggctgtaatggtggctatcctgctgaagcttggaacttctggacaagaaaaggcctggtttctggtggcctctatgaatcccatgtagggtgcagaccgtactccatccctccctgtgagcaccacgtcaacggctcccggcccccatgcacgggggagggagatacccccaagtgtagcaagatctgtgagcctggctacagcccgacctacaaacaggacaagcactacggatacaattcctacagcgtctccaatagcgagaaggacatcatggccgagatctacaaaaacggccccgtggagggagctttctctgtgtattcggacttcctgctctacaagtcaggagtgtaccaacacgtcaccggagagatgatgggtggccatgccatccgcatcctgggctggggagtggagaatggcacaccctactggctggttgccaactcctggaacactgactggggtgacaatggcttctttaaaatactcagaggacaggatcactgtggaatcgaatcagaagtggtggctggaattccacgcaccgatcagtactgggaaaagatctaatctgccgtgggcctgtcgtgccagtcctgggggcgagatcgggagaatcacgtcctggaactgcatgttcttgcgactcttgggacttcatcttaacttctcgctgccccagccatgttttcaaccatggcatccctcccccaattagttccctgtcatcctcgtcaaccttctctgtaagtgcctggtaagcttgcccttgcttaagaactcaaaacatagctgtgctcta

SEQ ID NO: 114999 - DNA, 764 bp, Homo sapiens
  Payload ID: 2450
  Gene Symbol: CTSB
  Gene Name: cathepsin B
  ENST ID: ENST00000534382
  CDS Start-End: 553-764
aattttttgtatttttactagagacggggtttcaccgtgttagccaggataatcttgatctcctgacctcgtgatccgcccgcctcggcctcccaaagtgctgggattacaggcgtgagccactgcacccggctactgccttcttactgtcgccacagcctggataaaatacgattcttctgagccttttttttttttttaatacagagtttcactcttgttgcctaggctggagtgcaatagtgcgatctctggtcaccgcaacctccgcctcccgggttcaagcgattctcctgcttcagtctcccgagtagctgggattactgacacgcgccaccacgcccggctagttttgtatttttagtagagacggggtttctccatgttggtcaggatggtctcgaactcccgacctcaggtgactcaccggcctcggcctcccaaaatgctgggattacaggcgtgagccaccgaacccagcccctctgagcctcttgaatacaactggggtcatgcctgctttgcaggtggatctaggatccggcttccaacatgtggcagctctgggcctccctctgctgcctgctggtgttggccaatgcccggagcaggccctctttccatcccctgtcggatgagctggtcaactatgtcaacaaacggaataccacgtggcaggccgggcacaacttctacaacgtggacatgagctacttgaagaggctatgtggtaccttcctgggtgggcccaagccaccccagag

SEQ ID NO: 115000 - DNA, 540 bp, Homo sapiens
  Payload ID: 2450
  Gene Symbol: CTSB
  Gene Name: cathepsin B
  ENST ID: ENST00000505496
  CDS Start-End: 237-540
gcgcgcaggctgggctgcaggctctcggctgcagcgctgggctggtgtgcagtggtgcgaccacggctcacggcagcctcagccacccagatgtaagcgatctggttcccacctcagcctcccgagtacacgctggcggccccttgagccccaacctggataccataggggaggagcagagaagccaggaacaccacagccctgggccaaggtggatctaggatccggcttccaacatgtggcagctctgggcctccctctgctgcctgctggtgttggccaatgcccggagcaggccctctttccatcccctgtcggatgagctggtcaactatgtcaacaaacggaataccacgtggcaggccgggcacaacttctacaacgtggacatgagctacttgaagaggctatgtggtaccttcctgggtgggcccaagccaccccagagagttatgtttaccgaggacctgaagctgcctgcaagcttcgatgcacgggaacaatggccacagtgtcccaccatcaaagagatcagagacc

SEQ ID NO: 115001 - DNA, 557 bp, Homo sapiens
  Payload ID: 2450
  Gene Symbol: CTSB
  Gene Name: cathepsin B
  ENST ID: ENST00000531502
  CDS Start-End: 282-557
acttagggccggggctggcccaggctacggcggctgcagggctccggcaaccgctccggcaacgccaaccgctccgctgcgcgcaggctgggctgcaggctctcggctgcagcgctgggaagagaaaccagacagcgaaaccaagaggcgaatgggcgattggatgccggtggggagaaggccgggggcgcaccctgctcctggactccagtaaagggaggccgggcagagtccctggggcgccacctccccctcggtggatctaggatccggcttccaacatgtggcagctctgggcctccctctgctgcctgctggtgttggccaatgcccggagcaggccctctttccatcccctgtcggatgagctggtcaactatgtcaacaaacggaataccacgtggcaggccgggcacaacttctacaacgtggacatgagctacttgaagaggctatgtggtaccttcctgggtgggcccaagccaccccagagagttatgtttaccgaggacctgaagctgcctgcaagcttcgatgcacgggaacaatggccacag

SEQ ID NO: 115002 - DNA, 573 bp, Homo sapiens
  Payload ID: 2450
  Gene Symbol: CTSB
  Gene Name: cathepsin B
  ENST ID: ENST00000524500
  CDS Start-End: 278-573
aaccgctccggcaacgccaaccgctccgctgcgcgcaggctgggctgcaggctctcggctgcagcgctggggtcttgctttgtctcccaggctggtgtgcagtggtgcgaccacggctcacggcagcctcagccacccagatgtaagcgatctggttcccacctcagcctcccgagtagtgtcttcaggcctatggagagcagcttgcgtgggctgggcctgcagtacctggtttgcatagatgattggcaggtggatctaggatccggcttccaacatgtggcagctctgggcctccctctgctgcctgctggtgttggccaatgcccggagcaggccctctttccatcccctgtcggatgagctggtcaactatgtcaacaaacggaataccacgtggcaggccgggcacaacttctacaacgtggacatgagctacttgaagaggctatgtggtaccttcctgggtgggcccaagccaccccagagagttatgtttaccgaggacctgaagctgcctgcaagcttcgatgcacgggaacaatggccacagtgtcccaccatcaaagagat

SEQ ID NO: 115003 - DNA, 524 bp, Homo sapiens
  Payload ID: 2450
  Gene Symbol: CTSB
  Gene Name: cathepsin B
  ENST ID: ENST00000534149
  CDS Start-End: 95-524
ccttctcctcttagaaatcctgacgcagctcctaggttccttcgcagtgacagccactcttttctatttgtggatctaggatccggcttccaacatgtggcagctctgggcctccctctgctgcctgctggtgttggccaatgcccggagcaggccctctttccatcccctgtcggatgagctggtcaactatgtcaacaaacggaataccacgtggcaggccgggcacaacttctacaacgtggacatgagctacttgaagaggctatgtggtaccttcctgggtgggcccaagccaccccagagagttatgtttaccgaggacctgaagctgcctgcaagcttcgatgcacgggaacaatggccacagtgtcccaccatcaaagagatcagagaccagggctcctgtggctcctgctgggccttcggggctgtggaagccatctctgaccggatctgcatccacaccaatgcgcacgtcagcgtggaggtgtcggcggaggacctgctcacatgctgtggca

SEQ ID NO: 115004 - DNA, 633 bp, Homo sapiens
  Payload ID: 2450
  Gene Symbol: CTSB
  Gene Name: cathepsin B
  ENST ID: ENST00000534636
  CDS Start-End: 109-633
aaccgctccgctgcgcgcaggctgggctgcaggctctcggctgcagcgctgggtgagtgctggggacccggggccaccgcagcgtggatctaggatccggcttccaacatgtggcagctctgggcctccctctgctgcctgctggtgttggccaatgcccggagcaggccctctttccatcccctgtcggatgagctggtcaactatgtcaacaaacggaataccacgtggcaggccgggcacaacttctacaacgtggacatgagctacttgaagaggctatgtggtaccttcctgggtgggcccaagccaccccagagagttatgtttaccgaggacctgaagctgcctgcaagcttcgatgcacgggaacaatggccacagtgtcccaccatcaaagagatcagagaccagggctcctgtggctcctgctgggccttcggggctgtggaagccatctctgaccggatctgcatccacaccaatgcgcacgtcagcgtggaggtgtcggcggaggacctgctcacatgctgtggcagcatgtgtggggacggctgtaatggtggctatcctgctgaagcttggaacttctggacaagaaaaggcctggtttctggtggcctctatgaatcc

SEQ ID NO: 115005 - DNA, 1855 bp, Homo sapiens
  Payload ID: 2450
  Gene Symbol: CTSB
  Gene Name: cathepsin B
  ENST ID: ENST00000531551
  CDS Start-End: 154-486
gcgcgcaggctgggctgcaggctctcggctgcagcgctgggctggtgtgcagtggtgcgaccacggctcacggcagcctcagccacccagatgtaagcgatctggttcccacctcagcctcccgagtagtggatctaggatccggcttccaacatgtggcagctctgggcctccctctgctgcctgctggtgttggccaatgcccggagcaggccctctttccatcccctgtcggatgagctggtcaactatgtcaacaaacggaataccacgtggcaggccgggcacaacttctacaacgtggacatgagctacttgaagaggctatgtggtaccttcctgggtgggcccaagccaccccagagagttatgtttaccgaggacctgaagctgcctgcaagcttcgatgcacgggaacaatggccacagtgtcccaccatcaaagagatcagagaccagggctcctgtggctcctgctggctgtaatggtggctatcctgctgaagcttggaacttctggacaagaaaaggcctggtttctggtggcctctatgaatcccatgtagggtgcagaccgtactccatccctccctgtgagcaccacgtcaacggctcccggcccccatgcacgggggagggagatacccccaagtgtagcaagatctgtgagcctggctacagcccgacctacaaacaggacaagcactacggatacaattcctacagcgtctccaatagcgagaaggacatcatggccgagatctacaaaaacggccccgtggagggagctttctctgtgtattcggacttcctgctctacaagtcaggagtgtaccaacacgtcaccggagagatgatgggtggccatgccatccgcatcctgggctggggagtggagaatggcacaccctactggctggttgccaactcctggaacactgactggggtgacaatggcttctttaaaatactcagaggacaggatcactgtggaatcgaatcagaagtggtggctggaattccacgcaccgatcagtactgggaaaagatctaatctgccgtgggcctgtcgtgccagtcctgggggcgagatcggggtagaaatgcattttattctttaagttcacgtaagatacaagtttcagacagggtctgaaggactggattggccaaacatcagacctgtcttccaaggagaccaagtcctggctacatcccagcctgtggttacagtgcagacaggccatgtgagccaccgctgccagcacagagcgtccttccccctgtagactagtgccgtagggagtacctgctgccccagctgactgtggccccctccgtgatccatccatctccagggagcaagacagagacgcaggaatggaaagcggagttcctaacaggatgaaagttcccccatcagttcccccagtacctccaagcaagtagctttccacatttgtcacagaaatcagaggagagacggtgttgggagccctttggagaacgccagtctcccaggccccctgcatctatcgagtttgcaatgtcacaacctctctgatcttgtgctcagcatgattctttaatagaagttttattttttcgtgcactctgctaatcatgtgggtgagccagtggaacagcgggagacctgtgctagttttacagattgcctccttatgacgcggctcaaaaggaaaccaagtggtcaggagttgtttctgacccactgatctctactaccacaaggaaaatagtttaggagaaaccagcttttactgtttttgaaaaattacagcttcaccctgtcaagttaacaaggaatgcctgtgccaataaaagttttctccaa

SEQ ID NO: 115006 - DNA, 560 bp, Homo sapiens
  Payload ID: 2450
  Gene Symbol: CTSB
  Gene Name: cathepsin B
  ENST ID: ENST00000526195
  CDS Start-End: 115-560
ctcctcttagaaatcctgacgcagctcctaggttccttcgcagtgacagccactcttttctatttgtacgtagctgtagtgttttgtgggtggatctaggatccggcttccaacatgtggcagctctgggcctccctctgctgcctgctggtgttggccaatgcccggagcaggccctctttccatcccctgtcggatgagctggtcaactatgtcaacaaacggaataccacgtggcaggccgggcacaacttctacaacgtggacatgagctacttgaagaggctatgtggtaccttcctgggtgggcccaagccaccccagagagttatgtttaccgaggacctgaagctgcctgcaagcttcgatgcacgggaacaatggccacagtgtcccaccatcaaagagatcagagaccagggctcctgtggctcctgctgggccttcggggctgtggaagccatctctgaccggatctgcatccacaccaatgcgcacgtcagcgtggaggtgtcggcggaggacctgctcacatgctgtggcagcatgtgtggggacgg

SEQ ID NO: 115007 - DNA, 660 bp, Homo sapiens
  Payload ID: 2450
  Gene Symbol: CTSB
  Gene Name: cathepsin B
  ENST ID: ENST00000526481
  CDS Start-End: 1-231
tcaggagtgtaccaacacgtcaccggagagatgatgggtggccatgccatccgcatcctgggctggggagtggagaatggcacaccctactggctggttgccaactcctggaacactgactggggtgacaatggcttctttaaaatactcagaggacaggatcactgtggaatcgaatcagaagtggtggctggaattccacgcaccgatcagtactgggaaaagatctaatctgccgtgggcctgtcgtgccagtcctgggggcgagatcgggagaatcacgtcctggaactgcatgttcttgcgactcttgggacttcatcttaacttctcgctgccccagccatgttttcaaccatggcatccctcccccaattagttccctgtcatcctcgtcaaccttctctgtaagtgcctggtaagcttgcccttgcttaagaactcaaaacatagctgtgctctatttttttgttgttgttgtgactgacagagtgagattcccctgggggacaagagtgaatctgtgtctcaccaaaaaaaaaaagaaaaagaaagatgcttaacaaaggttaccataagccacaaattcataaccacttatccttccagtttcaagtagaatatattcataacctcaataaagttctccctgctcccaaa

SEQ ID NO: 115008 - DNA, 1921 bp, Homo sapiens
  Payload ID: 2451
  Gene Symbol: CTSC
  Gene Name: cathepsin C
  Uniprot ID: P53634
  ENST ID: ENST00000227266
  CDS Start-End: 116-1507
ggtttccgggccggcgtagctatttcaaggcgcgcgcctcgtggtggactcaccgctagcccgcagcgctcggcttcctggtaattcttcacctcttttctcagctccctgcagcatgggtgctgggccctccttgctgctcgccgccctcctgctgcttctctccggcgacggcgccgtgcgctgcgacacacctgccaactgcacctatcttgacctgctgggcacctgggtcttccaggtgggctccagcggttcccagcgcgatgtcaactgctcggttatgggaccacaagaaaaaaaagtagtggtgtaccttcagaagctggatacagcatatgatgaccttggcaattctggccatttcaccatcatttacaaccaaggctttgagattgtgttgaatgactacaagtggtttgccttttttaagtataaagaagagggcagcaaggtgaccacttactgcaacgagacaatgactgggtgggtgcatgatgtgttgggccggaactgggcttgtttcaccggaaagaaggtgggaactgcctctgagaatgtgtatgtcaacatagcacaccttaagaattctcaggaaaagtattctaataggctctacaagtatgatcacaactttgtgaaagctatcaatgccattcagaagtcttggactgcaactacatacatggaatatgagactcttaccctgggagatatgattaggagaagtggtggccacagtcgaaaaatcccaaggcccaaacctgcaccactgactgctgaaatacagcaaaagattttgcatttgccaacatcttgggactggagaaatgttcatggtatcaattttgtcagtcctgttcgaaaccaagcatcctgtggcagctgctactcatttgcttctatgggtatgctagaagcgagaatccgtatactaaccaacaattctcagaccccaatcctaagccctcaggaggttgtgtcttgtagccagtatgctcaaggctgtgaaggcggcttcccataccttattgcaggaaagtacgcccaagattttgggctggtggaagaagcttgcttcccctacacaggcactgattctccatgcaaaatgaaggaagactgctttcgttattactcctctgagtaccactatgtaggaggtttctatggaggctgcaatgaagccctgatgaagcttgagttggtccatcatgggcccatggcagttgcttttgaagtatatgatgacttcctccactacaaaaaggggatctaccaccacactggtctaagagaccctttcaacccctttgagctgactaatcatgctgttctgcttgtgggctatggcactgactcagcctctgggatggattactggattgttaaaaacagctggggcaccggctggggtgagaatggctacttccggatccgcagaggaactgatgagtgtgcaattgagagcatagcagtggcagccacaccaattcctaaattgtagggtatgccttccagtatttcataatgatctgcatcagttgtaaaggggaattggtatattcacagactgtagactttcagcagcaatctcagaagcttacaaatagatttccatgaagatatttgtcttcagaattaaaactgcccttaattttaatatacctttcaatcggccactggccatttttttctaagtattcaattaagtgggaattttctggaagatggtcagctatgaagtaatagagtttgcttaatcatttgtaattcaaacatgctatattttttaaaatcaatgtgaaaacatagacttatttttaaattgtaccaatcacaagaaaataatggcaataattatcaaaacttttaaaatagatgctcatatttttaaaataaagttttaaaaataactgca

SEQ ID NO: 115009 - DNA, 6125 bp, Homo sapiens
  Payload ID: 2451
  Gene Symbol: CTSC
  Gene Name: cathepsin C
  Uniprot ID: P53634
  ENST ID: ENST00000524463
  CDS Start-End: 90-503
aaggcgcgcgcctcgtggtggactcaccgctagcccgcagcgctcggcttcctggtaattcttcacctcttttctcagctccctgcagcatgggtgctgggccctccttgctgctcgccgccctcctgctgcttctctccggcgacggcgccgtgcgctgcgacacacctgccaactgcacctatcttgacctgctgggcacctgggtcttccaggtgggctccagcggttcccagcgcgatgtcaactgctcggttatgggaccacaagaaaaaaaagtagtggtgtaccttcagaagctggatacagcatatgatgaccttggcaattctggccatttcaccatcatttacaaccaaggctttgagattgtgttgaatgactacaagtggtttgccttttttaaggatgtcactgattttatcagtcatttgttcatgcagctgggaactgtggggatatatgatttgccacatctgaggaacaaactggttattaaatagagcatctgttgagggactcttttaaaaccacagccatgaacagacgttggggctaagagacagagcagcctgcgacagtgtggacctacctgtagcagctagcaaaggcctctagcagctacagtcccttctggagtctttatttgcatgcaaaatgcaaaggagtcctggtgacctacctccaaggcagctgccctcctgaacactcccttggaaaacagtaaacatcattttggaatgtgaacaaccagagactacacaggagaaaggaaaaaaaaattctgaagatgcaaaatcttgggtggcttcaccgttcagttttttaataaaaggaacaatatacaacacgttgttctttttctcttttgaaatcccttctattacagtgatttttttctaagattgtcaggatttgaagtgtatgttttgttttattcacagcgtaaattttattcacagtttaactgtctgcctgagtgtctttcctttctctaattaccttgaggaacccaagagcctgttgtaaggagaaaataaggcccttggatctcttgagattcacagatataagttattgaagggaagatggtcctatggaggacatatttaaagaagggaaaaaagaggctttctcagatatgtcagactgctatagtatacttctacagattatagacctccagtacctctggccagaaagatggtatcgtaaacaccctattttttttcttttcttttttcattaggtacaagctttgtgctaagaagttgacatactataagctacaaaagttctgtaaagtagatataactagtttcattttatagatagagaaaattaatctcttacagtgctaagctcacagagtttctaactgtaaaatgctagaacttgtctttcaagcctaaagacttccttggggctaaatagtgaaaaaagccatttcacaaataagtaaatggtatttagaggcatatttggatttcctggtaaattccagtctgtgagcatcatgaatattagtttaatgttgcatgggctcatgttgaagttttaagagaagaactgccttgaagcttaggtttccttagctattaggctactgactttcttgcctaaaccagggttttttcattgaagaccaaaacttaccttctccttcagtttgtagtttggaaattggtagaagagctttgtaaacttcaaattaagtacaaactaagtgtcatagtcaaatttactaatcttaattacagtattgttcaactgattgctatcttctagctctttcctgccgaataatggtcttgtttcctgctctgttggtttagagctgacttctttcagctttggtaagcctgaaattatggggttatgtttaattcatattgtctgggtggactttcctctcttgcatttctgcttgaatagaagaatttttctctagagagtagtttgtcatccttactctgttgattcagatgactctttgtatgatctgagaggtatactgttctgctattctgagaagaagtatttcagaaagatgaattaagagtacagtggactgctcccacctggaaacttttatctatctcacctctggacctgataaattctttatcactcaggaccttgatgacgctgctctctgaaaccctccccagctctctctattaccgtgagaaacatcagaactttggttcccattgcatatcgcaggtacctctgctttcatgccatgctgtaatggagtgattgggtagcatgttttcatctctttccagattgaaaatctgtatttctccctgtatatcttcaacacctaatgcacatagaactttgtaggtacctggaaaatgcaccacagttttcttttctttttgcagacttttcacaagtattaccaacttacaaagaattaattttgtaggattctagaaagacaaatcaggaatggtgccatatacatcttttttgattccctgctctaaagaatattatcaggttaccttcctgcagagttttaaaagaattgcatatttcaagctgactttcaggatgtaaatataaccaaagcaactgatatgtaaaaaatatattcaatggcattcctagattttcttctagggtgttttattgttttgggttttacatttaagtctttaatccatcttgagttaatttttgtataggtataagaaaggggtccagttttaattttctgcgtatggctagccagttctcccagcaccatttattaaatagggaatcctttccctattgtttgtttttgtacggtttgtcaaagattagatggttgtagatgtgtggtcttatttctgagatcttcattctcttccactggtctatgtgtctgtttttgtaccatgcttttttggttactgtagccttgtagtatagtatgaaagatagcatgatgcctccaggtttgttctttttgcttaggattgtcttggctatacgagcttttttttggttctatatgaattttaaaatagtttcttctaattgtgtgaagaatgttaatggtagtttaatgggaatagcattgaatctgtgaattgctttgggcagtatggccattttcatgatattgattcttcctatccatgagcatgtaacgtttttcccttcgtttgtgtcctctctcatttccttgagtagtggtttgtagttctccttgaagagatccttcacttcttctgtattcctagatattttattctctctgtagctattgggaatgggagttcattcatgattttgctctctgcttgccttttgttggtgtatagggatcctggtgacttctgcacattgattttgtatcctgagactttaccgaagttgcttatcagcttaagaagcttttgggctgagatgatggggttttctagatataggatcatgttatcttcaaacaaagacaatttgacttcctctcttcctatttgagtacgctttatttctttctcttgcctgattgccctggccagaactcccaatactatattgaataagaatggtgagagagggcatccttgtcttgtgccagttttcacggggaatgcttccagcttttgcccattcagtatgatattatctgtgggtttctcataaaaagctcttattatttgagatacgttccttcaatacctagtttattgagagtttttaacatgaagcgatgttgaattgtatcgaaggccttttctgtgtctattgagataatcatgtggtttttgtctttagttctgtttatgtgatgaatgacgtttattgatttgcatatgttgaaccggccttgcatcctggggatgaagccaacttgactgtggtagataagcttttggatgtgctgctggatttggtttatcagtatttcattgagattttttgcgtcgaagttcatcagggatattggactgaagttttctttttgttgtcgtatctctgccaggttttggtatcaggatgatgctggcctcataaaatgagttagggaggagtccctccttttcaattgtttggaatagtttcagaagaaagggtatcagctcctctttgtacctctggtagaattcaactgtaaatccatctggtcctggactttttttcattagtaggctatttattactgcctcactttcataacttgttattgatctattcagggatccaacttcttcctgattcagtcttgggagtgtgtatgcatccaggaatttatccatttcttctagattttctagtttctttgcatagaggtgtttgtagtatttgctgttggttgtttgtacttctgtgagatcagtggtggtatcctgtttatcattttttattgtgtctgtttgattcttctcttatttttgacaaagctgacaaaaagaagcaatagggaaaggactctctattcaattaatcctactgtatatctggctagccatatgcagaaaattgaaactgttcctgtttcttaatccatatacgaaaatcaacttacgatggattaaagacttaaatgtaaaacccaaaattataaaaccctggaatagaatataggcaatatcattctggacataggaatgggcaaagattttatgagaaagacaccaaaagcaattacaacaaaagcaaaaattggcaaatgagatctaattaaactaaagagctctgcacagcaaaagaaactactgtcagagtgaacaggcaaccaacagaatgggagaaaattttttcaatctatccatatgacaaaggtctaacatccagaatctacaaggaacttaacaaatttacaagaaaaaaggagccccattaaaaagttggcaaagaacatgaacagacacttcccagaagatattcatgtggccaataaacatgaagaaaagctcaacatcactgaccattagagacgtgcatatcaaaatcacaatgagataccatctcatgtcacaatggtgattattaaaaagtcaaacaacatgctagtgaggttgtagagaaataagaacgcttttacactgttggtgggaatgtcaactaattcaaccactgtggaagacagtgtggtgattcctcaaggatttagaaccagaaatatcattactgcatatagacccaaaggaatagaaatcattctattacaaagatacatgcacatgtatgtttattacagcactattcacaatagcaaagacatggaatcaacccaaatgctcatcagtgatagactggaaaaagagaatgtggaacataaacaccatggaatactatgcagcaataaaaaggaatgagatcctgtccttttcagggacatggatggagttggaagctgttatcctcagcaaactaatgcaggaacagaaaaccaaccaccacatgttctcacttataagtgggagctgaacaatagaacacatgggcacagggaggggaataacacacactggggccagtcagggggtggggggtcaagctgagggagagcattagaaaaaatagctaatgcattctgggcttaacccatttatgcctagtgttccatttctggaatgctaagcatgtggaagttctttatatcctgctcaaggtcattgccaaggtctgatttttcacattcaacaaattgcaacctctggcataaatgggttaatacctaggtgatgagttgataggtgcaggaaaccaccatggcacatgtttatctatgtaagaaacctgcacatcctacacatgtaccctggaacttaaaaaatttaaaatatatatgtatatatatttaatatggaattttaaaaattactaatgagttcttttatctgagtaattttgcatcaacatgcttttattatggaagagaagattcagtgagtacaaaattgcagatacatgtgtcagaagatccctgaatataataaggcttagtattctgtgtcataattgcctgtttgtattcctctctggtctttaaacttcattagggcaaggatcaactccatcttactaaccatttgattccctatgtattacacgatatatgaccaataataagccttcaataaatacttgtaaaataaagaatgttatgtaatata

SEQ ID NO: 115010 - DNA, 733 bp, Homo sapiens
  Payload ID: 2451
  Gene Symbol: CTSC
  Gene Name: cathepsin C
  ENST ID: ENST00000527018
  CDS Start-End: 1-733
tcgtggtggactcaccgctagcccgcagcgctcggcttcctggaccacaagaaaaaaaagtagtggtgtaccttcagaagctggatacagcatatgatgaccttggcaattctggccatttcaccatcatttacaaccaaggctttgagattgtgttgaatgactacaagtggtttgccttttttaagtataaagaagagggcagcaaggtgaccacttactgcaacgagacaatgactgggtgggtgcatgatgtgttgggccggaactgggcttgtttcaccggaaagaaggtgggaactgcctctgagaatgtgtatgtcaacatagcacaccttaagaattctcaggaaaagtattctaataggctctacaagtatgatcacaactttgtgaaagctatcaatgccattcagaagtcttggactgcaactacatacatggaatatgagactcttaccctgggagatatgattaggagaagtggtggccacagtcgaaaaatcccaaggcccaaacctgcaccactgactgctgaaatacagcaaaagattttgcatttgccaacatcttgggactggagaaatgttcatggtatcaattttgtcagtcctgttcgaaaccaagcatcctgtggcagctgctactcatttgcttctatgggtatgctagaagcgagaatccgtatactaaccaacaattctcagaccccaatcctaagccctcaggaggt

SEQ ID NO: 115011 - DNA, 401 bp, Homo sapiens
  Payload ID: 2451
  Gene Symbol: CTSC
  Gene Name: cathepsin C
  ENST ID: ENST00000528020
  CDS Start-End: 1-110
aggatgtcactgattttatcagtcatttgttcatgcagctgggaactgtggggatatatgatttgccacatctgaggaacaaactggccatgaacagacgttggggctaagagacagagcagcctgcgacagtgtggacctacctgtagcagctagcaaaggcctctagcagctacagtcccttctggagtctttatttgcatgcaaaatgcaaaggagtcctggtgacctacctccaaggcagctgccctcctgaacactcccttggaaaacagtaaacatcattttggaatgtgaacaaccagagactacacaggagaaaggaaaaaaaaattctgaagatgcaaaatcttgggtggcttcaccgttcagttttttaataaaaggaacaatatacaaca

SEQ ID NO: 115012 - DNA, 747 bp, Homo sapiens
  Payload ID: 2451
  Gene Symbol: CTSC
  Gene Name: cathepsin C
  Uniprot ID: P53634
  ENST ID: ENST00000529974
  CDS Start-End: 62-487
gctagcccgcagcgctcggcttcctggtaattcttcacctcttttctcagctccctgcagcatgggtgctgggccctccttgctgctcgccgccctcctgctgcttctctccggcgacggcgccgtgcgctgcgacacacctgccaactgcacctatcttgacctgctgggcacctgggtcttccaggtgggctccagcggttcccagcgcgatgtcaactgctcggttatgggaccacaagaaaaaaaagtagtggtgtaccttcagaagctggatacagcatatgatgaccttggcaattctggccatttcaccatcatttacaaccaaggctttgagattgtgttgaatgactacaagtggtttgccttttttaaggatgtcactgattttatcagtcatttgttcatgcagctgggaactgtggggatatatgatttgccacatctgaggaacaaactggccatgaacagacgttggggctaagagacagagcagcctgcgacagtgtggacctacctgtagcagctagcaaaggcctctagcagctacagtcccttctggagtctttatttgcatgcaaaatgcaaaggagtcctggtgacctacctccaaggcagctgccctcctgaacactcccttggaaaacagtaaacatcattttggaatgtgaacaaccagagactacacaggagaaaggaaaaaaaaattctgaagatgcaaaatcttgggtggcttcaccgttc

SEQ ID NO: 115013 - DNA, 2123 bp, Homo sapiens
  Payload ID: 2452
  Gene Symbol: CTSD
  Gene Name: cathepsin D
  Uniprot ID: P07339
  ENST ID: ENST00000236671
  CDS Start-End: 134-1372
gcgcacgccggccgcgcccacgtgaccggtccgggtgcaaacacgcgggtcagctgatccggcccaactgcggcgtcatcccggctataagcgcacggcctcggcgaccctctccgacccggccgccgccgccatgcagccctccagccttctgccgctcgccctctgcctgctggctgcacccgcctccgcgctcgtcaggatcccgctgcacaagttcacgtccatccgccggaccatgtcggaggttgggggctctgtggaggacctgattgccaaaggccccgtctcaaagtactcccaggcggtgccagccgtgaccgaggggcccattcccgaggtgctcaagaactacatggacgcccagtactacggggagattggcatcgggacgcccccccagtgcttcacagtcgtcttcgacacgggctcctccaacctgtgggtcccctccatccactgcaaactgctggacatcgcttgctggatccaccacaagtacaacagcgacaagtccagcacctacgtgaagaatggtacctcgtttgacatccactatggctcgggcagcctctccgggtacctgagccaggacactgtgtcggtgccctgccagtcagcgtcgtcagcctctgccctgggcggtgtcaaagtggagaggcaggtctttggggaggccaccaagcagccaggcatcaccttcatcgcagccaagttcgatggcatcctgggcatggcctacccccgcatctccgtcaacaacgtgctgcccgtcttcgacaacctgatgcagcagaagctggtggaccagaacatcttctccttctacctgagcagggacccagatgcgcagcctgggggtgagctgatgctgggtggcacagactccaagtattacaagggttctctgtcctacctgaatgtcacccgcaaggcctactggcaggtccacctggaccaggtggaggtggccagcgggctgaccctgtgcaaggagggctgtgaggccattgtggacacaggcacttccctcatggtgggcccggtggatgaggtgcgcgagctgcagaaggccatcggggccgtgccgctgattcagggcgagtacatgatcccctgtgagaaggtgtccaccctgcccgcgatcacactgaagctgggaggcaaaggctacaagctgtccccagaggactacacgctcaaggtgtcgcaggccgggaagaccctctgcctgagcggcttcatgggcatggacatcccgccacccagcgggccactctggatcctgggcgacgtcttcatcggccgctactacactgtgtttgaccgtgacaacaacagggtgggcttcgccgaggctgcccgcctctagttcccaaggcgtccgcgcgccagcacagaaacagaggagagtcccagagcaggaggcccctggcccagcggcccctcccacacacacccacacactcgcccgcccactgtcctgggcgccctggaagccggcggcccaagcccgacttgctgttttgttctgtggttttcccctccctgggttcagaaatgctgcctgcctgtctgtctctccatctgtttggtgggggtagagctgatccagagcacagatctgtttcgtgcattggaagaccccacccaagcttggcagccgagctcgtgtatcctggggctcccttcatctccagggagtcccctccccggccctaccagcgcccgctgggctgagcccctaccccacaccaggccgtcctcccgggccctcccttggaaacctgccctgcctgagggcccctctgcccagcttgggcccagctgggctctgccaccctacctgttcagtgtcccgggcccgttgaggatgaggccgctagaggcctgaggatgagctggaaggagtgagaggggacaaaacccaccttgttggagcctgcagggtggtgctgggactgagccagtcccaggggcatgtattggcctggaggtggggttgggattgggggctggtgccagccttcctctgcagctgacctctgttgtcctccccttgggcggctgagagccccagctgacatggaaatacagttgttggcctccggcctcccctctgt

SEQ ID NO: 115014 - DNA, 907 bp, Homo sapiens
  Payload ID: 2452
  Gene Symbol: CTSD
  Gene Name: cathepsin D
  ENST ID: ENST00000367196
  CDS Start-End: 309-907
ttcacaccaaggggaaggccagtggccctgggggaggagcagggacccctctctctcttactcgcttcctgggtttagaactcaggaccccgatctcagtctggagctccctcctgcaccctggctggcggtgtgctgggtgacaggactctggaggggtaccctgagtgcagctgtcggaggaggcagggcggtggggggggcagcacagaagcctctaaggccccaggtgcagtcctggacctcgtggagccgcatggagtgaggagaggatcccgctgcacaagttcacgtccatccgccggaccatgtcggaggttgggggctctgtggaggacctgattgccaaaggccccgtctcaaagtactcccaggcggtgccagccgtgaccgaggggcccattcccgaggtgctcaagaactacatggacgcccagtactacggggagattggcatcgggacgcccccccagtgcttcacagtcgtcttcgacacgggctcctccaacctgtgggtcccctccatccactgcaaactgctggacatcgcttgctggatccaccacaagtacaacagcgacaagtccagcacctacgtgaagaatggtacctcgtttgacatccactatggctcgggcagcctctccgggtacctgagccaggacactgtgtcggtgccctgccagtcagcgtcgtcagcctctgccctgggcggtgtcaaagtggagaggcaggtctttggggaggccaccaagcagccaggcatcaccttcatcgcagccaagttcgatggcatcctgggcatggcctacccccgcatctccgtcaacaacgtgctgcccgtcttcgacaacctgatgcagcagaagctggtggaccagaacatcttctccttctacctgagcag

SEQ ID NO: 115015 - DNA, 690 bp, Homo sapiens
  Payload ID: 2452
  Gene Symbol: CTSD
  Gene Name: cathepsin D
  ENST ID: ENST00000429746
  CDS Start-End: 1-570
aatgtcacccgcaaggcctactggcaggtccacctggaccagagccctgaggggaggagagtgcagcccagccaggggaggggctcccagggaggggcactgggcccccagggcacactccagtcccggcaggggcttcacgccctgactccccgcagggtggaggtggccagcgggctgaccctgtgcaaggagggctgtgaggccattgtggacacaggcacttccctcatggtgggcccggtggatgaggtgcgcgagctgcagaaggccatcggggccgtgccgctgattcagggcgagtacatgatcccctgtgagaaggtgtccaccctgcccgcgatcacactgaagctgggaggcaaaggctacaagctgtccccagaggactacacgctcaaggtgtcgcaggccgggaagaccctctgcctgagcggcttcatgggcatggacatcccgccacccagcgggccactctggatcctgggcgacgtcttcatcggccgctactacactgtgtttgaccgtgacaacaacagggtgggcttcgccgaggctgcccgcctctagttcccaaggcgtccgcgcgccagcacagaaacagaggagagtcccagagcaggaggcccctggcccagcggcccctcccacacacacccacacactcgcccgcccactgtcctgggcgcc

SEQ ID NO: 115016 - DNA, 2006 bp, Homo sapiens
  Payload ID: 2452
  Gene Symbol: CTSD
  Gene Name: cathepsin D
  ENST ID: ENST00000433655
  CDS Start-End: 43-873
cgcacggcctcggcgaccctctccgacccggccgccgccgccatgcagccctccagccttctgccgctcgccctctgcctgctggctgcacccgcctccgcgctcgtcaggatcccgctgcacaagttcacgtccatccgccggaccatgtcggaggttgggggctctgtggaggacctgattgccaaaggccccgtctcaaagtactcccaggcggtgccagccgtgaccgaggggcccattcccgaggtgctcaagaactacatggacgcccagtactacggggagattggcatcgggacgcccccccagtgcttcacagtcgtcttcgacacgggctcctccaacctgtgggtcccctccatccactgcaaactgctggacatcgcttgctggatccaccacaagtacaacagcgacaagtccagcacctacgtgaagaatggtacctcgtttgacatccactatggctcgggcagcctctccgggtacctgagccaggacactgtgtcggtgccctgccagtcagcgtcgtcagcctctgccctgggcggtgtcaaagtggagaggcaggtctttggggaggccaccaagcagccaggcatcaccttcatcgcagccaagttcgatggcatcctgggcatggcctacccccgcatctccgtcaacaacgtgctgcccgtcttcgacaacctgatgcagcagaagctggtggaccagaacatcttctccttctacctgagcagggacccagatgcgcagcctgggggtgagctgatgctgggtggcacagactccaagtattacaagggttctctgtcctacctgaatgtcacccgcaaggcctactggcaggtccacctggaccagtgagtggccagcgggctgaccctgtgcaaggagggctgtgaggccattgtggacacaggcacttccctcatggtgggcccggtggatgaggtgcgcgagctgcagaaggccatcggggccgtgccgctgattcagggcgagtacatgatcccctgtgagaaggtgtccaccctgcccgcgatcacactgaagctgggaggcaaaggctacaagctgtccccagaggactacacgctcaaggtgtcgcaggccgggaagaccctctgcctgagcggcttcatgggcatggacatcccgccacccagcgggccactctggatcctgggcgacgtcttcatcggccgctactacactgtgtttgaccgtgacaacaacagggtgggcttcgccgaggctgcccgcctctagttcccaaggcgtccgcgcgccagcacagaaacagaggagagtcccagagcaggaggcccctggcccagcggcccctcccacacacacccacacactcgcccgcccactgtcctgggcgccctggaagccggcggcccaagcccgacttgctgttttgttctgtggttttcccctccctgggttcagaaatgctgcctgcctgtctgtctctccatctgtttggtgggggtagagctgatccagagcacagatctgtttcgtgcattggaagaccccacccaagcttggcagccgagctcgtgtatcctggggctcccttcatctccagggagtcccctccccggccctaccagcgcccgctgggctgagcccctaccccacaccaggccgtcctcccgggccctcccttggaaacctgccctgcctgagggcccctctgcccagcttgggcccagctgggctctgccaccctacctgttcagtgtcccgggcccgttgaggatgaggccgctagaggcctgaggatgagctggaaggagtgagaggggacaaaacccaccttgttggagcctgcagggtggtgctgggactgagccagtcccaggggcatgtattggcctggaggtggggttgggattgggggctggtgccagccttcctctgcagctgacctctgttgtcctccccttgggcggctgagagccccagctgacatggaaatacagttg

SEQ ID NO: 115017 - DNA, 946 bp, Homo sapiens
  Payload ID: 2452
  Gene Symbol: CTSD
  Gene Name: cathepsin D
  ENST ID: ENST00000438213
  CDS Start-End: 50-946
atgtgcagcattggcagcgtcggccggcaggcgggagggcctccctgatatgccccgacccgtggttgacaggatcccgctgcacaagttcacgtccatccgccggaccatgtcggaggttgggggctctgtggaggacctgattgccaaaggccccgtctcaaagtactcccaggcggtgccagccgtgaccgaggggcccattcccgaggtgctcaagaactacatggacgcccagtactacggggagattggcatcgggacgcccccccagtgcttcacagtcgtcttcgacacgggctcctccaacctgtgggtcccctccatccactgcaaactgctggacatcgcttgctggatccaccacaagtacaacagcgacaagtccagcacctacgtgaagaatggtacctcgtttgacatccactatggctcgggcagcctctccgggtacctgagccaggacactgtgtcggtgccctgccagtcagcgtcgtcagcctctgccctgggcggtgtcaaagtggagaggcaggtctttggggaggccaccaagcagccaggcatcaccttcatcgcagccaagttcgatggcatcctgggcatggcctacccccgcatctccgtcaacaacgtgctgcccgtcttcgacaacctgatgcagcagaagctggtggaccagaacatcttctccttctacctgagcagggacccagatgcgcagcctgggggtgagctgatgctgggtggcacagactccaagtattacaagggttctctgtcctacctgaatgtcacccgcaaggcctactggcaggtccacctggaccaggtggaggtggccagcgggctgaccctgtgcaaggagggctgtgaggccattgtggacacaggcacttccctcatggtgggcccggtggatgaggtgcgcgagctgcagaaggcc

SEQ ID NO: 115018 - DNA, 2228 bp, Homo sapiens
  Payload ID: 2453
  Gene Symbol: CTSE
  Gene Name: cathepsin E
  Uniprot ID: P14091
  ENST ID: ENST00000358184
  CDS Start-End: 119-1309
atcattcggccctcagactgggctgggcaggtctgagagttagggaaagtccgttcccactgccctcggggagagaagaaaggagggggcaagggagaagctgctggtcggactcacaatgaaaacgctccttcttttgctgctggtgctcctggagctgggagaggcccaaggatcccttcacagggtgcccctcaggaggcatccgtccctcaagaagaagctgcgggcacggagccagctctctgagttctggaaatcccataatttggacatgatccagttcaccgagtcctgctcaatggaccagagtgccaaggaacccctcatcaactacttggatatggaatacttcggcactatctccattggctccccaccacagaacttcactgtcatcttcgacactggctcctccaacctctgggtcccctctgtgtactgcactagcccagcctgcaagacgcacagcaggttccagccttcccagtccagcacatacagccagccaggtcaatctttctccattcagtatggaaccgggagcttgtccgggatcattggagccgaccaagtctctgtggaaggactaaccgtggttggccagcagtttggagaaagtgtcacagagccaggccagacctttgtggatgcagagtttgatggaattctgggcctgggatacccctccttggctgtgggaggagtgactccagtatttgacaacatgatggctcagaacctggtggacttgccgatgttttctgtctacatgagcagtaacccagaaggtggtgcggggagcgagctgatttttggaggctacgaccactcccatttctctgggagcctgaattgggtcccagtcaccaagcaagcttactggcagattgcactggataacatccaggtgggaggcactgttatgttctgctccgagggctgccaggccattgtggacacagggacttccctcatcactggcccttccgacaagattaagcagctgcaaaacgccattggggcagcccccgtggatggagaatatgctgtggagtgtgccaaccttaacgtcatgccggatgtcaccttcaccattaacggagtcccctataccctcagcccaactgcctacaccctactggacttcgtggatggaatgcagttctgcagcagtggctttcaaggacttgacatccaccctccagctgggcccctctggatcctgggggatgtcttcattcgacagttttactcagtctttgaccgtgggaataaccgtgtgggactggccccagcagtcccctaaggaggggccttgtgtctgtgcctgcctgtctgacagaccttgaatatgttaggctggggcattctttacacctacaaaaagttattttccagagaatgtagctgtttccagggttgcaacttgaattaagaccaaacagaacatgagaatacacacacacacacacatatacacacacacacacttcacacatacacaccactcccaccaccgtcatgatggaggaattacgttatacattcatattttgtattgatttttgattatgaaaatcaaaaattttcacatttgattatgaaaatctccaaacatatgcacaagcagagatcatggtataataaatccctttgcaactccactcagccctgacaacccatccacacacggccaggcctgtttatctacactgctgcccactcctctctccagctccacatgctgtacctggatcattctgaagcaaattccgagcattacatcattttgtccataaatatttctaacatccttaaatatacaatcggaattcaagcatctcccattgtcccacaaatgtttggctgtttttgtagttggattgtttgtattaggattcaagcaaggcccatatattgcatttatttgaaatgtctgtaagtctctttccatctacagagtttagcacatttgaacgttgctggttgaaatcccgaggtgtcatttgacatggttctctgaacttatctttcctataaaatggtagttagatctggaggtctgattttgtggcaaaaatacttcctaggtggtgctgggtacttcttgttgcatcctgtcaggaggcagataatgctggtgcctctctattggtaatgttaagactgctgggtgggtttggagttcttggctttaatcattcattacaaagttcagcatttta

SEQ ID NO: 115019 - DNA, 2071 bp, Homo sapiens
  Payload ID: 2453
  Gene Symbol: CTSE
  Gene Name: cathepsin E
  Uniprot ID: P14091
  ENST ID: ENST00000360218
  CDS Start-End: 105-1196
agactgggctgggcaggtctgagagttagggaaagtccgttcccactgccctcggggagagaagaaaggagggggcaagggagaagctgctggtcggactcacaatgaaaacgctccttcttttgctgctggtgctcctggagctgggagaggcccaaggatcccttcacagggtgcccctcaggaggcatccgtccctcaagaagaagctgcgggcacggagccagctctctgagttctggaaatcccataatttggacatgatccagttcaccgagtcctgctcaatggaccagagtgccaaggaacccctcatcaactacttggatatggaatacttcggcactatctccattggctccccaccacagaacttcactgtcatcttcgacactggctcctccaacctctgggtcccctctgtgtactgcactagcccagcctgcaagacgcacagcaggttccagccttcccagtccagcacatacagccagccaggtcaatctttctccattcagtatggaaccgggagcttgtccgggatcattggagccgaccaagtctctgtggaaggactaaccgtggttggccagcagtttggagaaagtgtcacagagccaggccagacctttgtggatgcagagtttgatggaattctgggcctgggatacccctccttggctgtgggaggagtgactccagtatttgacaacatgatggctcagaacctggtggacttgccgatgttttctgtctacatgagcagtaacccagaaggtggtgcggggagcgagctgatttttggaggctacgaccactcccatttctctgggagcctgaattgggtcccagtcaccaagcaagcttactggcagattgcactggataatatgctgtggagtgtgccaaccttaacgtcatgccggatgtcaccttcaccattaacggagtcccctataccctcagcccaactgcctacaccctactggacttcgtggatggaatgcagttctgcagcagtggctttcaaggacttgacatccaccctccagctgggcccctctggatcctgggggatgtcttcattcgacagttttactcagtctttgaccgtgggaataaccgtgtgggactggccccagcagtcccctaaggaggggccttgtgtctgtgcctgcctgtctgacagaccttgaatatgttaggctggggcattctttacacctacaaaaagttattttccagagaatgtagctgtttccagggttgcaacttgaattaagaccaaacagaacatgagaatacacacacacacacacatatacacacacacacacttcacacatacacaccactcccaccaccgtcatgatggaggaattacgttatacattcatattttgtattgatttttgattatgaaaatcaaaaattttcacatttgattatgaaaatctccaaacatatgcacaagcagagatcatggtataataaatccctttgcaactccactcagccctgacaacccatccacacacggccaggcctgtttatctacactgctgcccactcctctctccagctccacatgctgtacctggatcattctgaagcaaattccgagcattacatcattttgtccataaatatttctaacatccttaaatatacaatcggaattcaagcatctcccattgtcccacaaatgtttggctgtttttgtagttggattgtttgtattaggattcaagcaaggcccatatattgcatttatttgaaatgtctgtaagtctctttccatctacagagtttagcacatttgaacgttgctggttgaaatcccgaggtgtcatttgacatggttctctgaacttatctttcctataaaatggtagttagatctggaggtctgattttgtggcaaaaatacttcctaggtggtgctgggtacttcttgttgcatcctgtcaggaggcagataatgctggtgcctctctattggtaatgttaagactgctgggtgggtttggagttcttggctttaatcattcattacaaagttcagcatttt

SEQ ID NO: 115020 - DNA, 2035 bp, Homo sapiens
  Payload ID: 2454
  Gene Symbol: CTSF
  Gene Name: cathepsin F
  Uniprot ID: Q9UBX1
  ENST ID: ENST00000310325
  CDS Start-End: 111-1565
gtgccgtcgccccgctggagggaggactcaggccccgctggccgcgggctcggtacccggtgggtcggtggagcgtctgttgggtccgggccgccggcttcgccctcgccatggcgccctggctgcagctcctgtcgctgctggggctgctcccgggcgcagtggccgcccccgcccagccccgagccgccagctttcaggcctgggggccgccgtccccggagctgctggcgcccacccgcttcgcgctggagatgttcaaccgcggccgggctgcggggacgcgggccgtgctgggccttgtgcgcggccgcgtccgccgggcgggtcaggggtcgctgtactccctggaggccaccctggaggagccaccctgcaacgaccccatggtgtgccggctccccgtgtccaagaaaaccctgctctgcagcttccaagtcctggatgagctcggaagacacgtgctgctgcggaaggactgtggcccagtggacaccaaggttccaggtgctggggagcccaagtcagccttcactcagggctcagccatgatttcttctctgtcccaaaaccatccagacaacagaaacgagactttcagctcagtcatttccctgttgaatgaggatcccctgtcccaggacttgcctgtgaagatggcttcaatcttcaagaactttgtcattacctataaccggacatatgagtcaaaggaagaagcccggtggcgcctgtccgtctttgtcaataacatggtgcgagcacagaagatccaggccctggaccgtggcacagctcagtatggagtcaccaagttcagtgatctcacagaggaggagttccgcactatctacctgaatactctcctgaggaaagagcctggcaacaagatgaagcaagccaagtctgtgggtgacctcgccccacctgaatgggactggaggagtaagggggctgtcacaaaagtcaaagaccagggcatgtgtggctcctgctgggccttctcagtcacaggcaatgtggagggccagtggtttctcaaccaggggaccctgctctccctctctgaacaggagctcttggactgtgacaagatggacaaggcctgcatgggcggcttgccctccaatgcctactcggccataaagaatttgggagggctggagacagaggatgactacagctaccagggtcacatgcagtcctgcaacttctcagcagagaaggccaaggtctacatcaatgactccgtggagctgagccagaacgagcagaagctggcagcctggctggccaagagaggcccaatctccgtggccatcaatgcctttggcatgcagttttaccgccacgggatctcccgccctctccggcccctctgcagcccttggctcattgaccatgcggtgttgcttgtgggctacggcaaccgctctgacgttcccttttgggccatcaagaacagctggggcactgactggggtgagaagggttactactacttgcatcgtgggtccggggcctgtggcgtgaacaccatggccagctcggcggtggtggactgaagaggggcccccagctcgggacctggtgctgatcagagtggctgctgccccagcctgacatgtgtccaggcccctccccgggaggtacagctggcagagggaaaggcactgggtacctcagggtgagcagagggcactgggctggggcacagcccctgcttccctgcaccccattcccaccctgaagttctgcacctgcacctttgttgaattgtggtagcttaggaggatgtcggggtgaagggtggtatcttggcagttgaagctggggcaagaactctgggcttgggtaatgagcaggaagaaaattttctgatcttaagcccagctctgttctgcccccgctttcctctgtttgatactataaattttctggttcccttggatttagggatagtgtccctctccatgtccaggaaacttgtaaccacccttttctaacagcaataaagaggtgtccttgtcccgag

SEQ ID NO: 115021 - DNA, 846 bp, Homo sapiens
  Payload ID: 2454
  Gene Symbol: CTSF
  Gene Name: cathepsin F
  ENST ID: ENST00000524994
  CDS Start-End: 1-846
ccaaaaccatccagacaacagaaacgagactttcagctcagtcatttccctgttgaatgaggatcccctgtcccaggacttgcctgtgaagatggcttcaatcttcaagaactttgtcattacctataaccggacatatgagtcaaaggaagcccggtggcgcctgtccgtctttgtcaataacatggtgcgagcacagaagatccaggccctggaccgtggcacagctcagtatggagtcaccaagttcagtgatctcacagaggaggagttccgcactatctacctgaatactctcctgaggaaagagcctggcaacaagatgaagcaagccaagtctgtgggtgacctcgccccacctgaatgggactggaggagtaagggggctgtcacaaaagtcaaagaccagggcatgtgtggctcctgctgggccttctcagtcacaggcaatgtggagggccagtggtttctcaaccaggggaccctgctctccctctctgaacaggagctcttggactgtgacaagatggacaaggcctgcatgggcggcttgccctccaatgcctactcggccataaagaatttgggagggctggagacagaggatgactacagctaccagggtcacatgcagtcctgcaacttctcagcagagaaggccaaggtctacatcaatgactccgtggagctgagccagaacgagcagaagctggcagcctggctggccaagagaggcccaatctccgtggccatcaatgcctttggcatgcagttttaccgccacgggatctcccgccctctccggcccctctgcagcccttggctcattgaccatgcggtgttgct

SEQ ID NO: 115022 - DNA, 609 bp, Homo sapiens
  Payload ID: 2454
  Gene Symbol: CTSF
  Gene Name: cathepsin F
  ENST ID: ENST00000525733
  CDS Start-End: 1-247
ccgcactatctacctgaatactctcctgaggaaagagcctggcaacaagatgaagcaagccaagtctgtgggtgacctcgccccacctgaatgggactggaggagtaagggggctgtcacaaaagtcaaagaccagggcatgtgtggctcctgctgggccttctcagtcacaggcaatgtggagggccagtggtttctcaaccaggggaccctgctctccctctctgaacaggctcttggactgtgacaagatggacaaggcctgcatgggcggcttgccctccaatgcctactcggccataaagaatttgggagggctggagacagaggatgactacagctaccagggtcacatgcagtcctgcaacttctcagcagagaaggccaaggtctacatcaatgactccgtggagctgagccagaacgagcagaagctggcagcctggctggccaagagaggcccaatctccgtggccatcaatgcctttggcatgcagttttaccgccacgggatctcccgccctctccggcccctctgcagcccttggctcattgaccatgcggtgttgcttgtgggctacggcaaccgtgagttccgctgcctgtcct

SEQ ID NO: 115023 - DNA, 548 bp, Homo sapiens
  Payload ID: 2454
  Gene Symbol: CTSF
  Gene Name: cathepsin F
  ENST ID: ENST00000526010
  CDS Start-End: 188-548
tttaatctctccaagcctcgtttcctccactgtacgatggggatagcacctacttcagagattgctacgccgaataaaaggagctggcatatcatgcctaacatataacaagcacgtgatagaggcgggtcaggggtcgctgtactccctggaggccaccctggaggagccaccctgcaacgaccccatggtgtgccggctccccgtgtccaagaaaaccctgctctgcagcttccaagtcctggatgagctcggaagacacgtgctgctgcggaaggactgtggcccagtggacaccaaggttccaggtgctggggagcccaagtcagccttcactcagggctcagccatgatttcttctctgtcccaaaaccatccagacaacagaaacgagactttcagctcagtcatttccctgttgaatgaggatcccctgtcccaggacttgcctgtgaagatggcttcaatcttcaagaactttgtcattacctataaccggacatatgagtcaaaggaagaagcccggtggcgcctgtccgtctttgtca

SEQ ID NO: 115024 - DNA, 886 bp, Homo sapiens
  Payload ID: 2455
  Gene Symbol: CTSG
  Gene Name: cathepsin G
  Uniprot ID: P08311
  ENST ID: ENST00000216336
  CDS Start-End: 38-805
gcacagcagcaactgactgggcagcctttcaggaaagatgcagccactcctgcttctgctggcctttctcctacccactggggctgaggcaggggagatcatcggaggccgggagagcaggccccactcccgcccctacatggcgtatcttcagatccagagtccagcaggtcagagcagatgtggagggttcctggtgcgagaagactttgtgctgacagcagctcattgctggggaagcaatataaatgtcaccctgggcgcccacaatatccagagacgggaaaacacccagcaacacatcactgcgcgcagagccatccgccaccctcaatataatcagcggaccatccagaatgacatcatgttattgcagctgagcagaagagtcagacggaatcgaaacgtgaacccagtggctctgcctagagcccaggagggactgagacccgggacgctgtgcactgtggccggctggggcagggtcagcatgaggaggggaacagatacactccgagaggtgcagctgagagtgcagagggataggcagtgcctccgcatcttcggttcctacgacccccgaaggcagatttgtgtgggggaccggcgggaacggaaggctgccttcaagggggattccggaggccccctgctgtgtaacaatgtggcccacggcatcgtctcctatggaaagtcgtcaggggttcctccagaagtcttcaccagggtctcaagtttcctgccctggataaggacaacaatgagaagcttcaaactgctggatcagatggagacccccctgtgactgactcttcttctcggggacacaggccagctccacagtgttgccagagccttaataaacgtccacagagtataaataacc

SEQ ID NO: 115025 - DNA, 2190 bp, Homo sapiens
  Payload ID: 2456
  Gene Symbol: CTSH
  Gene Name: cathepsin H
  Uniprot ID: P09668
  ENST ID: ENST00000220166
  CDS Start-End: 111-1118
tcccgccgctcctccacgctcgtgccgctccccccccgcgctcccagttgacgctctgggccgccacctccgcggaccctgagcgcaagagccaagccgccagcgctgcgatgtgggccacgctgccgctgctctgcgccggggcctggctcctgggagtccccgtctgcggtgccgccgaactgtgcgtgaactccttagagaagtttcacttcaagtcatggatgtctaagcaccgtaagacctacagtacggaggagtaccaccacaggctgcagacgtttgccagcaactggaggaagataaacgcccacaacaatgggaaccacacatttaaaatggcactgaaccaattttcagacatgagctttgctgaaataaaacacaagtatctctggtcagagcctcagaattgctcagccaccaaaagtaactaccttcgaggtactggtccctacccaccttccgtggactggcggaaaaaaggaaattttgtctcacctgtgaaaaatcagggtgcctgcggcagttgctggactttctccaccactggggccctggagtctgcgatcgccatcgcaaccggaaagatgctgtccttggcggaacagcagctggtggactgcgcccaggacttcaataatcacggctgccaagggggtctccccagccaggctttcgagtatatcctgtacaacaaggggatcatgggtgaagacacctacccctaccagggcaaggatggttattgcaagttccaacctggaaaggccatcggctttgtcaaggatgtagccaacatcacaatctatgacgaggaagcgatggtggaggctgtggccctctacaaccctgtgagctttgcctttgaggtgactcaggacttcatgatgtatagaaccggcatctactccagtacttcctgccataaaactccagataaagtaaaccatgcagtactggctgttgggtatggagaaaaaaatgggatcccttactggatcgtgaaaaactcttggggtccccagtggggaatgaacgggtacttcctcatcgagcgcggaaagaacatgtgtggcctggctgcctgcgcctcctaccccatccctctggtgtgagccgtggcagccgcagcgcagactggcggagaaggagaggaacgggcagcctgggcctgggtggaaatcctgccctggaggaagttgtggggagatccactgggacccccaacattctgccctcacctctgtgcccagcctggaaacctacagacaaggaggagttccaccatgagctcacccgtgtctatgacgcaaagatcaccagccatgtgccttagtgtccttcttaacagactcaaaccacatggaccacgaatattctttctgtccagaagggctactttccacatatagagctccagggactgtcttttctgtattcgctgttcaataaacattgagtgagcacctccccagatggagcatgctggtcctgggccatgactcaaaccaggtctgtcctcgccactcagtctcccaggagggaggcatcagggggtgtccaggctctggctgggaggatggtgggggtgctggcggtattatccaccagatggggtatccaggatgaagagcaggcttaatttgagatcttgactatttgtcccaaacctgagtggagaggtggggaggaaggagaaaaacgggccaagctgcggcagaggcaggattcaaacccacaatgtcagcccagaagcctgtacttctctgtgtggcctccccagtctcagctgcctactcctactcagactctgccccccacctccacatgagactgcccaccccttcctcaccaaccccttatttatttcaaacgtgcccagatgctcctgtcgtttccacaccatcccttcccttatcttgccttttgagaaatcttgatctctgtttagagggcggccatgaagttgctgctgcttcctgaagcctccgggctctgggatgtctgtagaacaagctggagtccaccagctctttgtcctatggctcacagactttcttaatgataaaagctgtcatcttatttgggcttcctgaaaagctaaaggcttgagaatatttgaaaaatatatatgttcatgataaggcttatttagataatgcaaatatagtttaatttattagaaaa

SEQ ID NO: 115026 - DNA, 2101 bp, Homo sapiens
  Payload ID: 2456
  Gene Symbol: CTSH
  Gene Name: cathepsin H
  ENST ID: ENST00000533777
  CDS Start-End: 66-254
agttgacgctctgggccgccacctccgcggaccctgagcgcaagagccaagccgccagcgctgcgatgtgggccacgctgccgctgctctgcgccggggcctggctcctgggagtccccgtctgcggtgccgccgaactgtgcgtgaactccttagagaagtttcacttcaagtcatggatgtctaagaaaaccaaagcacactgtgtactggttgcagaatcagttggggaacaccagtgcatgtgcttttgaaaaatggtgatctttgctgtaaacttgacccagcaccagcagtggcgtccaggagtgccccacatgtggcagcaccgtaagacctacagtacggaggagtaccaccacaggctgcagacgtttgccagcaactggaggaagataaacgcccacaacaatgggaaccacacatttaaaatggcactgaaccaattttcagacatgagctttgctgaaataaaacacaagtatctctggtcagagcctcagaattgctcagccaccaaaagtaactaccttcgaggtactggtccctacccaccttccgtggactggcggaaaaaaggaaattttgtctcacctgtgaaaaatcagggtgcctgcggcagttgctggactttctccaccactggggccctggagtctgcgatcgccatcgcaaccggaaagatgctgtccttgcagcctcagttgtcttcatgagggaagagccgggacctatgcatccatcccctcgcccacaagagacggatgatgcccctgaaggaactatcctagcccctgcctctgtggagaaaggagggacagtgcacagccggcctggtgatgccatgaggaccctgggttgtggacaggtgggggtagggtctctggctgggcctgtttcccccatcctatacaccgctgtgggaccccacactctgcatcgtatgggcacacctacggggcaggggtttggacccaacagcccttgccccctctcaccttccctggctgcccctgcttactgagcccctcccgacatgtgccagctgctgggctggcactgcaggacatacagcaactgtccctgcccttggggagtttataatttggtcaccttgacacagcactgacggggcctcagatgtggctcagccagggaggcttagcgcctcacgccaaagccttgacggcttctcagctggcaggtcactgggttgtgtccttcttccaggcggaacagcagctggtggactgcgcccaggacttcaataatcacggctgccaagggggtctccccagccaggctttcgagtatatcctgtacaacaaggggatcatgggtgaagacacctacccctaccagggcaaggatggttattgcaagttccaacctggaaaggccatcggctttgtcaaggatgtagccaacatcacaatctatgacgaggaagcgatggtggaggctgtggccctctacaaccctgtgagctttgcctttgaggtgactcaggacttcatgatgtatagaaccggcatctactccagtacttcctgccataaaactccagataaagtaaaccatgcagtactggctgttgggtatggagaaaaaaatgggatcccttactggatcgtgaaaaactcttggggtccccagtggggaatgaacgggtacttcctcatcgagcgcggaaagaacatgtgtggcctggctgcctgcgcctcctaccccatccctctggtgtgagccgtggcagccgcagcgcagactggcggagaaggagaggaacgggcagcctgggcctgggtggaaatcctgccctggaggaagttgtggggagatccactgggacccccaacattctgccctcacctctgtgcccagcctggaaacctacagacaaggaggagttccaccatgagctcacccgtgtctatgacgcaaagatcaccagccatgtgccttagtgtccttcttaacagactcaaaccacatggaccacgaatattctttctgtccagaagggctactttccacatatagagctccagggactgtcttttctgtattcgctgttcaataaacattgagtgagcacctc

SEQ ID NO: 115027 - DNA, 857 bp, Homo sapiens
  Payload ID: 2456
  Gene Symbol: CTSH
  Gene Name: cathepsin H
  ENST ID: ENST00000529861
  CDS Start-End: 114-239
cgctcccgccgctcctccacgctcgtgccgctccccccccgcgctcccagttgacgctctgggccgccacctccgcggaccctgagcgcaagagccaagccgccagcgctgcgatgtgggccacgctgccgctgctctgcgccggggcctggctcctgggagtccccgtctgcggtgccgccgaactgtgcgtgaactccttaggtacgcagagggcgcgccgcccgagagggtgctagcaggccctagagtggacgctgggagaacttggccaggggcgcactgggctccggaggaacggggcagagctttccccgagaagtttcacttcaagtcatggatgtctaagcaccgtaagacctacagtacggaggagtaccaccacaggctgcagacgtttgccagcaactggaggaagataaacgcccacaacaatgggaaccacacatttaaaatggcactgaaccaattttcagacatgagctttgctgaaataaaacacaagtatctctggtcagagcctcagaattgctcagccaccaaaagtaactaccttcgaggtactggtccctacccaccttccgtggactggcggaaaaaaggaaattttgtctcacctgtgaaaaatcagggtgcctgcggcagttgctggactttctccaccactggggccctggagtctgcgatcgccatcgcaaccggaaagatgctgtccttggcggaacagcagctggtggactgcgcccaggacttcaataatcacggctgccaagggggtctccccagccaggctttcgagtatatcctgtacaacaaggggatcatgggtgaagacacctacccctaccagggcaagg

SEQ ID NO: 115028 - DNA, 1122 bp, Homo sapiens
  Payload ID: 2456
  Gene Symbol: CTSH
  Gene Name: cathepsin H
  ENST ID: ENST00000525807
  CDS Start-End: 82-438
ccccccccgcgctcccagttgacgctctgggccgccacctccgcggaccctgagcgcaagagccaagccgccagcgctgcgatgtgggccacgctgccgctgctctgcgccggggcctggctcctgggagtccccgtctgcggtgccgccgaactgtgcgtgaactccttagttgctggactttctccaccactggggccctggagtctgcgatcgccatcgcaaccggaaagatgctgtccttggcggaacagcagctggtggactgcgcccaggacttcaataatcacggctgccaagggggtctccccagccaggctttcgagtatatcctgtacaacaaggggatcatgggtgaagacacctacccctaccagggcaaggatggttattgcaagttccaacctggaaaggccatcggctttgtcaaggatgtagccaacatcacaatctatgacgaggaagcgatggtggaggctgtggccctctacaaccctgtgagctttgcctttgaggtgactcaggacttcatgatgtatagaaccggcatctactccagtacttcctgccataaaactccagataaagtaaaccatgcagtactggctgttgggtatggagaaaaaaatgggatcccttactggatcgtgaaaaactcttggggtccccagtggggaatgaacgggtacttcctcatcgagcgcggaaagaacatgtgtggcctggctgcctgcgcctcctaccccatccctctggtgtgagccgtggcagccgcagcgcagactggcggagaaggagaggaacgggcagcctgggcctgggtggaaatcctgccctggaggaagttgtggggagatccactgggacccccaacattctgccctcacctctgtgcccagcctggaaacctacagacaaggaggagttccaccatgagctcacccgtgtctatgacgcaaagatcaccagccatgtgccttagtgtccttcttaacagactcaaaccacatggaccacgaatattctttctgtccagaagggctactttccacatatagagctccagggactgtcttttctgtattcgctgttcaataaacattgagtgagcacctccccaga

SEQ ID NO: 115029 - DNA, 719 bp, Homo sapiens
  Payload ID: 2456
  Gene Symbol: CTSH
  Gene Name: cathepsin H
  ENST ID: ENST00000528741
  CDS Start-End: 318-719
attcatgcaggaggcattctgcatgcaggcagtgactgcagattccaggacctgtggttagcggactcctattgatgtttctgggaactctagacctggaagttcagagaagtttcacttcaagtcatggatgtctaaggaaaacaaaaaggtctccctctagggagctgcagcctgtttccatgacttgctactggcgtgttttgttttagcaccgtaagacctacagtacggaggagtaccaccacaggctgcagacgtttgccagcaactggaggaagataaacgcccacaacaatgggaaccacacatttaaaatggcactgaaccaattttcagacatgagctttgctgaaataaaacacaagtatctctggtcagagcctcagaattgctcagccaccaaaagtaactaccttcgaggtactggtccctacccaccttccgtggactggcggaaaaaaggaaattttgtctcacctgtgaaaaatcagggtgcctgcggcagttgctggactttctccaccactggggccctggagtctgcgatcgccatcgcaaccggaaagatgctgtccttggcggaacagcagctggtggactgcgcccaggacttcaataatcacggctgccaagggggtctccccagccaggctttcgagtatatcctgtacaacaaggggatcatgggtgaagacacctacccctaccagggcaag

SEQ ID NO: 115030 - DNA, 972 bp, Homo sapiens
  Payload ID: 2456
  Gene Symbol: CTSH
  Gene Name: cathepsin H
  ENST ID: ENST00000615999
  CDS Start-End: 1-972
atgtgggccacgctgccgctgctctgcgccgccgaactgtgcgtgaactccttagagaagtttcacttcaagtcatggatgtctaagcaccgtaagacctacagtacggaggagtaccaccacaggctgcagacgtttgccagcaactggaggaagataaacgcccacaacaatgggaaccacacatttaaaatggcactgaaccaattttcagacatgagctttgctgaaataaaacacaagtatctctggtcagagcctcagaattgctcagccaccaaaagtaactaccttcgaggtactggtccctacccaccttccgtggactggcggaaaaaaggaaattttgtctcacctgtgaaaaatcagggtgcctgcggcagttgctggactttctccaccactggggccctggagtctgcgatcgccatcgcaaccggaaagatgctgtccttggcggaacagcagctggtggactgcgcccaggacttcaataatcacggctgccaagggggtctccccagccaggctttcgagtatatcctgtacaacaaggggatcatgggtgaagacacctacccctaccagggcaaggatggttattgcaagttccaacctggaaaggccatcggctttgtcaaggatgtagccaacatcacaatctatgacgaggaagcgatggtggaggctgtggccctctacaaccctgtgagctttgcctttgaggtgactcaggacttcatgatgtatagaaccggcatctactccagtacttcctgccataaaactccagataaagtaaaccatgcagtactggctgttgggtatggagaaaaaaatgggatcccttactggatcgtgaaaaactcttggggtccccagtggggaatgaacgggtacttcctcatcgagcgcggaaagaacatgtgtggcctggctgcctgcgcctcctaccccatccctctggtgtga

SEQ ID NO: 115031 - DNA, 1692 bp, Homo sapiens
  Payload ID: 2457
  Gene Symbol: CTSK
  Gene Name: cathepsin K
  Uniprot ID: P43235
  ENST ID: ENST00000271651
  CDS Start-End: 112-1101
gatcactggagctgacttccgcaatcccgatggaataaatctagcacccctgatggtgtgcccacactttgctgccgaaacgaagccagacaacagatttccatcagcaggatgtgggggctcaaggttctgctgctacctgtggtgagctttgctctgtaccctgaggagatactggacacccactgggagctatggaagaagacccacaggaagcaatataacaacaaggtggatgaaatctctcggcgtttaatttgggaaaaaaacctgaagtatatttccatccataaccttgaggcttctcttggtgtccatacatatgaactggctatgaaccacctgggggacatgaccagtgaagaggtggttcagaagatgactggactcaaagtacccctgtctcattcccgcagtaatgacaccctttatatcccagaatgggaaggtagagccccagactctgtcgactatcgaaagaaaggatatgttactcctgtcaaaaatcagggtcagtgtggttcctgttgggcttttagctctgtgggtgccctggagggccaactcaagaagaaaactggcaaactcttaaatctgagtccccagaacctagtggattgtgtgtctgagaatgatggctgtggagggggctacatgaccaatgccttccaatatgtgcagaagaaccggggtattgactctgaagatgcctacccatatgtgggacaggaagagagttgtatgtacaacccaacaggcaaggcagctaaatgcagagggtacagagagatccccgaggggaatgagaaagccctgaagagggcagtggcccgagtgggacctgtctctgtggccattgatgcaagcctgacctccttccagttttacagcaaaggtgtgtattatgatgaaagctgcaatagcgataatctgaaccatgcagttttggcagtgggatatggaatccagaagggaaacaagcactggataattaaaaacagctggggagaaaactggggaaacaaaggatatatcctcatggctcgaaataagaacaacgcctgtggcattgccaacctggccagcttccccaagatgtgactccagccagccaaatccatcctgctcttccatttcttccacgatggtgcagtgtaacgatgcactttggaagggagttggtgtgctatttttgaagcagatgtggtgatactgagattgtctgttcagtttccccatttgtttgtgcttcaaatgatccttcctactttgcttctctccacccatgacctttttcactgtggccatcaggactttccctgacagctgtgtactcttaggctaagagatgtgactacagcctgcccctgactgtgttgtcccagggctgatgctgtacaggtacaggctggagattttcacataggttagattctcattcacgggactagttagctttaagcaccctagaggactagggtaatctgacttctcacttcctaagttcccttctatatcctcaaggtagaaatgtctatgttttctactccaattcataaatctattcataagtctttggtacaagtttacatgataaaaagaaatgtgatttgtcttcccttctttgcacttttgaaataaagtatttatctcctgtctacagtttaataaatagcatctagtacacattca

SEQ ID NO: 115032 - DNA, 785 bp, Homo sapiens
  Payload ID: 2457
  Gene Symbol: CTSK
  Gene Name: cathepsin K
  ENST ID: ENST00000443913
  CDS Start-End: 11-785
ggaagaagaaatgcataaggagaatgaggagatatacaatgtctcagaaaacaggaaacattgtcctattttcccttgtcctcttctgacaagatctgggaaagtaccagaatttaggcacgaaagagaagaacgcctcgaagaaatgatcaggaggcaaaacttagacggaaatctctcctttgtgatgtgggggctcaaggttctgctgctacctgtggtgagctttgctctgtaccctgaggagatactggacacccactgggagctatggaagaagacccacaggaagcaatataacaacaaggtggatgaaatctctcggcgtttaatttgggaaaaaaacctgaagtatatttccatccataaccttgaggcttctcttggtgtccatacatatgaactggctatgaaccacctgggggacatgaccagtgaagaggtggttcagaagatgactggactcaaagtacccctgtctcattcccgcagtaatgacaccctttatatcccagaatgggaaggtagagccccagactctgtcgactatcgaaagaaaggatatgttactcctgtcaaaaatcagggtcagtgtggttcctgttgggcttttagctctgtgggtgccctggagggccaactcaagaagaaaactggcaaactcttaaatctgagtccccagaacctagtggattgtgtgtctgagaatgatggctgtggagggggctacatgaccaatgccttccaatatgtgcagaagaaccggggtattgactctgaagatg

SEQ ID NO: 115033 - DNA, 933 bp, Homo sapiens
  Payload ID: 2458
  Gene Symbol: CTSL
  Gene Name: cathepsin L
  ENST ID: ENST00000342020
  CDS Start-End: 125-802
ttgagcggcatccgtggagtgcgcctgcgcagctacgaccgcagcaggaaagcgccgccggccaggcccagctgtggccggacagggactggaagagaggacgcggtcgagtaggttttaaaacatgaatcctacactcatccttgctgccttttgcctgggaattgcctcagctactctaacatttgatcacagtttagaggcacagtggaccaagtggaaggcgatgcacaacagattatacggcatgaatgaagaaggatggaggagagcagtgtgggagaagaacatgaagatgattgaactgcacaatcaggaatacagggaagggaaacacagcttcacaatggccatgaacgcctttggagacatgaccagtgaagaattcaggcaggtgatgaatggctttcaaaaccgtaagcccaggaaggggaaagtgttccaggaacctctgttttatgaggcccccagatctgtggattggagagagaaaggctacgtgactcctgtgaagaatcagggtcagtgtggttcttgttgggcttttagtgctactggtgctcttgaaggacagatgttccggaaaactgggaggcttatctcactgagtgagcagaatctggtagactgctctgggcctcaaggcaatgaaggctgcaatggtggcctaatggattatgctttccagtatgttcaggataatggaggcctggactctgaggaatcctatccatatgaggcaacagtaagtggagctccttgtcatcattccagctcagcttttggaaggtggacactttaagagataacagatacctttttcggaattcatatattagggctgggtggggtggctcacgcctgtaatcccagccctttaggaggctgagccaggcagatggcttaagctcaggagtttgagaccagcctggg

SEQ ID NO: 115034 - DNA, 2177 bp, Homo sapiens
  Payload ID: 2458
  Gene Symbol: CTSL
  Gene Name: cathepsin L
  Uniprot ID: P07711
  ENST ID: ENST00000343150
  CDS Start-End: 891-1892
agccagtctcctccctcctagggtctggtcttgacgatagcatctcgtgttttggggatgcctttccttaccagattcttctaaagcccagctgcacccacccttaagtgggagataaggcttctgcccgcgggctctgcgttcgtccacccggccccacgtttgctgtggactaaacaggagccactggactagagtacacttgactctcggctctgcggaccaaaaattccaggactaaggaatagcaaggttaggctgaaacagtccacacagggcttgcggtaaacgtcttttcaggagccactcgcccagtgcagtaagtcgtgtacttagttgactcgagcgctccagggagacgcccgaccctactctgcgccgccccggggcaccagctctgcttcctccaggtccactgaggcaggcacgcccagctctgggacagtcagtaaacaagccacgaaccgcgccagggatcagagcacccagagtccccgcccagctgccggcacagccaatcgcagcgcagccaggcggcggggcggtgccggccgaacccagacccgaggttttagaagcagagtcaggcgaagctgggccagaaccgcgacctccgcaaccttgagcggcatccgtggagtgcgcctgcgcagctacgaccgcagcaggaaagcgccgccggccaggcccagctgtggccggacagggactggaagagaggacgcggtcgagtaggtgtgcaccagccctggcaacgagagcgtctaccccgaactctgctggccttgaggtggggaagccggggagggcagttgaggaccccgcggaggcgcgtgactggttgagcgggcaggccagcctccgagccgggtggacacaggttttaaaacatgaatcctacactcatccttgctgccttttgcctgggaattgcctcagctactctaacatttgatcacagtttagaggcacagtggaccaagtggaaggcgatgcacaacagattatacggcatgaatgaagaaggatggaggagagcagtgtgggagaagaacatgaagatgattgaactgcacaatcaggaatacagggaagggaaacacagcttcacaatggccatgaacgcctttggagacatgaccagtgaagaattcaggcaggtgatgaatggctttcaaaaccgtaagcccaggaaggggaaagtgttccaggaacctctgttttatgaggcccccagatctgtggattggagagagaaaggctacgtgactcctgtgaagaatcagggtcagtgtggttcttgttgggcttttagtgctactggtgctcttgaaggacagatgttccggaaaactgggaggcttatctcactgagtgagcagaatctggtagactgctctgggcctcaaggcaatgaaggctgcaatggtggcctaatggattatgctttccagtatgttcaggataatggaggcctggactctgaggaatcctatccatatgaggcaacagaagaatcctgtaagtacaatcccaagtattctgttgctaatgacaccggctttgtggacatccctaagcaggagaaggccctgatgaaggcagttgcaactgtggggcccatttctgttgctattgatgcaggtcatgagtccttcctgttctataaagaaggcatttattttgagccagactgtagcagtgaagacatggatcatggtgtgctggtggttggctacggatttgaaagcacagaatcagataacaataaatattggctggtgaagaacagctggggtgaagaatggggcatgggtggctacgtaaagatggccaaagaccggagaaaccattgtggaattgcctcagcagccagctaccccactgtgtgagctggtggacggtgatgaggaaggacttgactggggatggcgcatgcatgggaggaattcatcttcagtctaccagcccccgctgtgtcggatacacactcgaatcattgaagatccgagtgtgatttgaattctgtgatattttcacactggtaaatgttacctctattttaattactgctataaataggtttatattattgattcacttactgactttgcattttcgtttttaaaaggatgtataaatttttacctgtttaaataaaatttaatttcaaatgt

SEQ ID NO: 115035 - DNA, 1436 bp, Homo sapiens
  Payload ID: 2458
  Gene Symbol: CTSL
  Gene Name: cathepsin L
  Uniprot ID: P07711
  ENST ID: ENST00000340342
  CDS Start-End: 156-1157
aagctgggccagaaccgcgacctccgcaaccttgagcggcatccgtggagtgcgcctgcgcagctacgaccgcagcaggaaagcgccgccggccaggcccagctgtggccggacagggactggaagagaggacgcggtcgagtaggttttaaaacatgaatcctacactcatccttgctgccttttgcctgggaattgcctcagctactctaacatttgatcacagtttagaggcacagtggaccaagtggaaggcgatgcacaacagattatacggcatgaatgaagaaggatggaggagagcagtgtgggagaagaacatgaagatgattgaactgcacaatcaggaatacagggaagggaaacacagcttcacaatggccatgaacgcctttggagacatgaccagtgaagaattcaggcaggtgatgaatggctttcaaaaccgtaagcccaggaaggggaaagtgttccaggaacctctgttttatgaggcccccagatctgtggattggagagagaaaggctacgtgactcctgtgaagaatcagggtcagtgtggttcttgttgggcttttagtgctactggtgctcttgaaggacagatgttccggaaaactgggaggcttatctcactgagtgagcagaatctggtagactgctctgggcctcaaggcaatgaaggctgcaatggtggcctaatggattatgctttccagtatgttcaggataatggaggcctggactctgaggaatcctatccatatgaggcaacagaagaatcctgtaagtacaatcccaagtattctgttgctaatgacaccggctttgtggacatccctaagcaggagaaggccctgatgaaggcagttgcaactgtggggcccatttctgttgctattgatgcaggtcatgagtccttcctgttctataaagaaggcatttattttgagccagactgtagcagtgaagacatggatcatggtgtgctggtggttggctacggatttgaaagcacagaatcagataacaataaatattggctggtgaagaacagctggggtgaagaatggggcatgggtggctacgtaaagatggccaaagaccggagaaaccattgtggaattgcctcagcagccagctaccccactgtgtgagctggtggacggtgatgaggaaggacttgactggggatggcgcatgcatgggaggaattcatcttcagtctaccagcccccgctgtgtcggatacacactcgaatcattgaagatccgagtgtgatttgaattctgtgatattttcacactggtaaatgttacctctattttaattactgctataaataggtttatattattgattcacttactgactttgcattttcgtttttaaaaggatgtataaatttttacctgtttaaataaaatttaatttc

SEQ ID NO: 115036 - DNA, 2954 bp, Homo sapiens
  Payload ID: 2459
  Gene Symbol: CTSO
  Gene Name: cathepsin O
  Uniprot ID: P43234
  ENST ID: ENST00000433477
  CDS Start-End: 71-1036
aggctgggaggagccgaggaaccgaaagagaaaacaggccgcgcgggcggcagaggagccgggcgccgcaatggacgtgcgggcgctgccgtggctgccgtggctgctgtggctgctgtgccggggcggcggcgatgcggactcccgcgcccccttcaccccgacctggccgcggagccgcgagcgtgaagccgccgccttccgggaaagtcttaatagacatcgatacttgaattctttatttcccagtgaaaactccaccgccttctatggaataaatcagttttcctatttgtttcctgaagagtttaaagccatttatttaagaagcaaaccttccaagtttcccagatactcagcagaagtacatatgtccatccccaatgtgtctttgccgttaagatttgactggagggacaagcaggttgtgacacaagtgagaaaccagcagatgtgtggaggatgctgggccttcagcgtggtgggggcagtggaatctgcttatgcaataaaggggaagcccctggaagacctaagtgtccagcaggtcattgactgttcgtataataattatggctgcaatggaggctctactctcaatgctttgaactggttaaacaagatgcaagtaaaactggtgaaagattcagaatatccttttaaagcacaaaatggtctgtgccattacttttctggttcacattctggattttcaatcaaaggttattctgcatatgacttcagtgaccaagaagatgaaatggcaaaagcacttcttacctttggccctttggtagtcatagtagatgcagtgagctggcaagattatctgggaggcattatacagcatcactgctctagtggagaagcaaatcatgcagttctcataactgggtttgataaaacaggaagcactccatattggattgtgcggaattcctggggaagttcttggggagtagatggttatgcccatgtcaaaatgggaagtaatgtttgtggtattgcagattccgtttcttctatatttgtgtgacatgttgggcagatcaagagacagctacaaaaatgaaggttttcataatgcaatgtaacatagtacttcaaagtattattcaacttcaagtttcagcaactacctacaaaagattctaaggcctagtagtatttaaactaagtttcagaatgttcccttcttgtagagagatggacaaccaaagtcagtgggacaaactccagcacagaagcctgcgaggaagcctatggaatagtttcctgtcctgagacgaaattcagattaggagatattttaggcccctgcaactggggaaggctactgtttgtttttgtttgcttattatttatttgtttgtttattgtgagatatttcaggtgggatcaaagaggtcataagaatttattttcttttgtggggtgtaactactagctttagattacccctatacacaagaatggccaacctaaaattatgtgtgtcttgtacagttagttatattagcagccctctgagatggcgtatctatcggaaggatttcaaacaccaattgctttacctgaacaaatggtgcttaccctttgaacagcagagtgaccacgtagaaggaaggaaaagggcaaaatcgcttcagttaaactgaaattaaatgaacaataaggcaactatataagtaacttctagtagcattgcctgagagacaaattattgtttgataattttcattgtgaataggaatccaatagatcatattgcttactttgttctttttatactatagaataatattttgttctctagtatatcaaaataccaaaatattatctcatattttctccctctttctcttactctttaccaagttttcctggtggcttggcttccctgactaaagaattaagtctcatttttactttccatttctattttcttaccacttggttggctccctttgtctctgtacctttaccaacattaggatctcacctctttcttcctcccttaattcataagcaccactcctatcaaagtcccatctcttaaccctgggtatcaaacaaactgtgagttttccagaatctgtttcccagttttcccctcagctttcctggtctcccatccgaactgcttctttgtgcacctcttgttctttctcttggctcccagtcttgattcctgtgatcactcttgcatcactaattgcacaagtgatttcaggtgcaattctgattagcctgcgtccacacagtgatcgatgatcctatgtgcctagaaaggacactgtgtgctgctcatgacctgcaacaggaaaaaagccatttcttgttagcagtgtaagaaccttagagcaaaggagttgaccttctgattgaatataagcacaaccatattaaatgaatcaatacaagaaaattatttctgatactatgtatgtacatatttcttctctaaaatgtatcattcttttctaatgtatatgatctaacaaaaatgaaacatgaaatgcagtagcaaccactaaaaaaaaaaattcaaggacatctaactttttctctcacttttgccctttgtttatccttccctgtgattagataaacaaaataaaaaacaaaatgctgtatttctcttcttacgccagtcagaaccaatccgaaaagaatgtgtgttgactcaggtttggagttatttcaggaagacagatattgaccttttaattgataaatattcttattatcctggaatgccagaaaagaactatgtcctgcttgtctagtttgtattcgctgactttctatgtgatatagatgcatttgtaatactctttttcaagtgctaaaggatttctaaaatttcaaactgattaatatgtttctgctgttctggattttgatgacatttacaataaaacaacctacatttgactttggtttaaaaagaa

SEQ ID NO: 115037 - DNA, 2954 bp, Homo sapiens; identical to SEQ ID NO: 115036
  Payload ID: 2459
  Gene Symbol: CTSO
  Gene Name: cathepsin O
  Uniprot ID: P43234
  ENST ID: ENST00000573499
  CDS Start-End: 71-1036

SEQ ID NO: 115038 - DNA, 4107 bp, Homo sapiens
  Payload ID: 2460
  Gene Symbol: CTSS
  Gene Name: cathepsin S
  Uniprot ID: P25774
  ENST ID: ENST00000368985
  CDS Start-End: 262-1257
gacaagggctcttcttgatggcttactgtatccactttgtccccaagaccatagggaaatgactagaggtgactgtactagctagattttaaatgaaactgaaatgaaagttcacttcctcattttgagtacctcatgtgacaagttccaatttcttttcaagtcaattgaactgaaatctccttgttgctttgaaatcttagaagagagcccactaattcaaggactcttactgtgggagcaactgctggttctatcacaatgaaacggctggtttgtgtgctcttggtgtgctcctctgcagtggcacagttgcataaagatcctaccctggatcaccactggcatctctggaagaaaacctatggcaaacaatacaaggaaaagaatgaagaagcagtacgacgtctcatctgggaaaagaatctaaagtttgtgatgcttcacaacctggagcattcaatgggaatgcactcatacgatctgggcatgaaccacctgggagacatgaccagtgaagaagtgatgtctttgatgagttccctgagagttcccagccagtggcagagaaatatcacatataagtcaaaccctaatcggatattgcctgattctgtggactggagagagaaagggtgtgttactgaagtgaaatatcaaggttcttgtggtgcttgctgggctttcagtgctgtgggggccctggaagcacagctgaagctgaaaacaggaaagctggtgtctctcagtgcccagaacctggtggattgctcaactgaaaaatatggaaacaaaggctgcaatggtggcttcatgacaacggctttccagtacatcattgataacaagggcatcgactcagacgcttcctatccctacaaagccatggatcagaaatgtcaatatgactcaaaatatcgtgctgccacatgttcaaagtacactgaacttccttatggcagagaagatgtcctgaaagaagctgtggccaataaaggcccagtgtctgttggtgtagatgcgcgtcatccttctttcttcctctacagaagtggtgtctactatgaaccatcctgtactcagaatgtgaatcatggtgtacttgtggttggctatggtgatcttaatgggaaagaatactggcttgtgaaaaacagctggggccacaactttggtgaagaaggatatattcggatggcaagaaataaaggaaatcattgtgggattgctagctttccctcttacccagaaatctagaggatctctcctttttataacaaatcaagaaatatgaagcactttctcttaacttaatttttcctgctgtatccagaagaaataattgtgtcatgattaatgtgtatttactgtactaattagaaaatatagtttgaggccgggcacggtggctcacgcctgtaatcccagtacttgggaggccaaggcaggcatatcaacttgaggccaggagttaaagagcagcctggctaacatggtgaaaccccatctctactaaaaatacaaaaaattagccgagcacggtggtgcatgcctgtaatcccagctacttgggaggctgaggcacgagattccttgaacccaagaggttgaggctatgttgagctgagatcacaccactgtactccagcctggatgacagagtggagactctgtttcaaaaaaacagaaaagaaaatatagtttgattcttcatttttttaaatttgcaaatctcaggataaagtttgctaagtaaattagtaatgtactatagatataactgtacaaaaattgttcaacctaaaacaatctgtaattgcttattgttttattgtatactctttgtctttttaagacccctaatagccttttgtaacttgatggcttaaaaatacttaataaatctgccatttcaaatttctatcattgccacataccattcttattcctaggcaactattaataatctatcctgagaatattaattgtggtattctggtgatggggtttagcaactttgatggaagaaaatattaggctataaatgtcctaaggactcagattgtatctttgtacagaagaggattcaaaacgccacgtgtagtggctcatgcctgtaatcccaacactttgggaggctgaagtaggaggatcgtcttgagcccaggagttcaagaccagcctggacaacatagtgagaccttgtctccacaaaaataaaaaagaaactatccaggagtggtggtgtgtgcctgtggtccctgctatgcagatgtctaagacaggaggatcacaagagcccaggaggttgagaatgcagtgagcttgtaattgcaccactgcactccagcctgggtgacagagcaagaccctgtcttaaaaaaagaggattcaacacatatttttatattatgttaaagtaaagaaatgcataaaagacaagcactttggaagaattattttaatgatcaacaatttaatgtattagtccaaattatttttacgtagtcatcaacaatttgaccagggcctttatttggcaaataactgagccaaccagaataaaataaccaatactccactgctcatatttttatctaattcagatggatcttccttacaactgctctagattagtagatgcatctaagcaggcagcaggaactttaaattttttaagttcatgtctatgacatgaacaatgtgtgggataatgtcattaatatatcctaaattaacctaaacgtatttcactaactctggctccttctccataaagcacattttaaggaacaagaattgctaaatataaaaacataaataataccataatacatggctatcatcaaaagtgtatagaatattatagtttaaaagtatttagttgattacttttcagttttgttttgttttttgagacggagtctcactctgttgcccaggctggagtgcagtggcaccatctcagttcactgcaacttctgcctcccgagttcaagcgattctcctgcctcagcctcccgagtagctggaattataggcgtgcaccaccacgcccagctaatttttgtatttttagtaaagacagggttttgccacattagccaggctggtctcaaactcctgacctcaggtgatccacccaccccagcctcccaaagtgctaagattacaggcgtgagccactgagcccagcctacttttcagtttttaacataatttttgttttatccacaacttttcaagtattgaaagtagaataaaaacatgggttcttagtctttagctatctgttaaagcctatgaatgccttcttaaaatcatgtttttaaatgcataaaatatataggattacaaaggaatctaattatatcgaaatacagttattaaaatgttaaaagataagtttgttatatattaatatgcatgcttctttataaatgcattaaataagagttaatagctatcctaaatttgaaatagtgataagcataatgaaaatagatgcaaaaaactaatgtgatatgaaaatatctgggtttttcttttgatgatgaagtattgctaatattaccgtggtttatgaactatgttcagaattgaagaaaatcctaactttcagttagaggttagtgacggggttcaggacaccctacacaaaatacagcactttgacatattgaatattttaagctgaaggcatttgaggaaattgcagaagcaggaaggtgactctgaccttctgcctgctgttctccccagaagcagccataaaacctgggaaggattttctgaccttcccctgaagtagatcataagactgtcatgtaagaggtgctctcctggcacccagagaaaaggagcatccttacctccaaaagcacagggacacaaagaggaatctaaacaaacaggcctctcagtttcccccagtttattacatttagcttgttcacactttgccctatgacatttctacatcactggctgctcttcatcaaacctactataaaaaacattcaagttcaactgtttctttgggcctttatttccttatggagcccctcgtgtcgtgtaaaacttatattaaataaatgtgcatgcttt

SEQ ID NO: 115039 - DNA, 1421 bp, Homo sapiens
  Payload ID: 2460
  Gene Symbol: CTSS
  Gene Name: cathepsin S
  Uniprot ID: P25774
  ENST ID: ENST00000448301
  CDS Start-End: 97-942
aattgaactgaaatctccttgttgctttgaaatcttagaagagagcccactaattcaaggactcttactgtgggagcaactgctggttctatcacaatgaaacggctggtttgtgtgctcttggtgtgctcctctgcagtggcacagttgcataaagatcctaccctggatcaccactggcatctctggaagaaaacctatggcaaacaatacaaggaaaagaatgaagaagcagtacgacgtctcatctgggaaaagaatctaaagtttgtgatgcttcacaacctggagcattcaatgggaatgcactcatacgatctgggcatgaaccacctgggagacatgggttcttgtggtgcttgctgggctttcagtgctgtgggggccctggaagcacagctgaagctgaaaacaggaaagctggtgtctctcagtgcccagaacctggtggattgctcaactgaaaaatatggaaacaaaggctgcaatggtggcttcatgacaacggctttccagtacatcattgataacaagggcatcgactcagacgcttcctatccctacaaagccatggatcagaaatgtcaatatgactcaaaatatcgtgctgccacatgttcaaagtacactgaacttccttatggcagagaagatgtcctgaaagaagctgtggccaataaaggcccagtgtctgttggtgtagatgcgcgtcatccttctttcttcctctacagaagtggtgtctactatgaaccatcctgtactcagaatgtgaatcatggtgtacttgtggttggctatggtgatcttaatgggaaagaatactggcttgtgaaaaacagctggggccacaactttggtgaagaaggatatattcggatggcaagaaataaaggaaatcattgtgggattgctagctttccctcttacccagaaatctagaggatctctcctttttataacaaatcaagaaatatgaagcactttctcttaacttaatttttcctgctgtatccagaagaaataattgtgtcatgattaatgtgtatttactgtactaattagaaaatatagtttgaggccgggcacggtggctcacgcctgtaatcccagtacttgggaggccaaggcaggcatatcaacttgaggccaggagttaaagagcagcctggctaacatggtgaaaccccatctctactaaaaatacaaaaaattagccgagcacggtggtgcatgcctgtaatcccagctacttgggaggctgaggcacgagattccttgaacccaagaggttgaggctatgttgagctgagatcacaccactgtactccagcctggatgacagagtggagactctgtttcaaaaaaacagaaaagaaaatatagtttgattcttcatttttttaaatttgcaaatctca

SEQ ID NO: 115040 - DNA, 673 bp, Homo sapiens
  Payload ID: 2460
  Gene Symbol: CTSS
  Gene Name: cathepsin S
  ENST ID: ENST00000472977
  CDS Start-End: 1-289
tgtcctgaaagaagctgtggccaataaaggcccagtgtctgttggtgtagatgcgcgtcatccttctttcttcctctacagaagtggtgtctactatgaaccatcctgtactcagaatgtgaatcatggtgtacttgtggttggctatggtgatcttaatgggaaagaatactggcttgtgaaaaacagctggggccacaactttggtgaagaaggatatattcggatggcaagaaataaaggaaatcattgtgggattgctagctttccctcttacccagaaatctagaggatctctcctttttataacaaatcaagaaatatgaagcactttctcttaacttaatttttcctgctgtatccagaagaaataattgtgtcatgattaatgtgtatttactgtactaattagaaaatataattacaggcgtgagccactgagcccagcctacttttcagtttttaacataatttttgttttatccacaacttttcaagtattgaaagtagaataaaaacatgggttcttagtctttagctatctgttaaagcctatgaatgccttcttaaaatcatgtttttaaatgcataaaatatataggattacaaaggaatctaattatatcgaaatacagttattaaaatgttaaaagataagtttgttatatattaa

SEQ ID NO: 115041 - DNA, 390 bp, Homo sapiens
  Payload ID: 2460
  Gene Symbol: CTSS
  Gene Name: cathepsin S
  ENST ID: ENST00000607427
  CDS Start-End: 1-17
cttacccagaaatctagaggatctctcctttttataacaaatcaagaaatatgaagcactttctcttaacttaatttttcctgctgtatccagaagaaataattgtgtcatgattaatgtgtatttactgtactaattagaaaatatagtttgagccactgagcccagcctacttttcagtttttaacataatttttgttttatccacaacttttcaagtattgaaagtagaataaaaacatgggttcttagtctttagctatctgttaaagcctatgaatgccttcttaaaatcatgtttttaaatgcataaaatatataggattacaaaggaatctaattatatcgaaatacagttattaaaatgttaaaagataagtttgttatata

SEQ ID NO: 115042 - DNA, 752 bp, Homo sapiens
  Payload ID: 2460
  Gene Symbol: CTSS
  Gene Name: cathepsin S
  ENST ID: ENST00000483930
  CDS Start-End: 1-354
atcattgataacaagggcatcgactcagacgcttcctatccctacaaagccatggatcagaaatgtcaatatgactcaaaatatcgtgctgccacatgttcaaagtacactgaacttccttatggcagagaagatgtcctgaaagaagctgtggccaataaaggcccagtgtctgttggtgtagatgcgcgtcatccttctttcttcctctacagaagtgatggagtcttgctctgttgccaggctggagtgaggtggcacgatctcagctcactgcaacctctgcctcctgggttcaagcaattctcctgcctcagcctcctgagtagctgggactacaggtgtctactatgaaccatcctgtactcagaatgtgaatcatggtgtacttgtggttggctatggtgatcttaatgggaaagaatactggcttgtgaaaaacagctggggccacaactttggtgaagaaggatatattcggatggcaagaaataaaggaaatcattgtgggattgctagctttccctcttacccagaaatctagaggatctctcctttttataacaaatcaagaaatatgaagcactttctcttaacttaatttttcctgctgtatccagaagaaataattgtgtcatgattaatgtgtatttactgtactaattagaaaatatagtttgaggccgggcacggtggctcacgcctgtaatcccagtacttgggaggccaaggcaggcatatcaacttgaggc

SEQ ID NO: 115043 - DNA, 1546 bp, Homo sapiens
  Payload ID: 2461
  Gene Symbol: CTSV
  Gene Name: cathepsin V
  Uniprot ID: O60911
  ENST ID: ENST00000259470
  CDS Start-End: 251-1255
ggtaggcgcgcccagacctgagacgggttgggactgggctgcgtcacgcgcgggctctaagcgcccggggccccgcccagtggccggcacagccaatcgcagcgcgggaaggcggtgggggcggggaaggccgcctggaaacttaaatcccgaggcgggcgaacctgcaccagaccgcggacgtctgtaatctcagaggcttgtttgctgagggtgcctgcgcagctgcgacggctgctggttttgaaacatgaatctttcgctcgtcctggctgccttttgcttgggaatagcctccgctgttccaaaatttgaccaaaatttggatacaaagtggtaccagtggaaggcaacacacagaagattatatggcgcgaatgaagaaggatggaggagagcagtgtgggaaaagaatatgaaaatgattgaactgcacaatggggaatacagccaagggaaacatggcttcacaatggccatgaatgcttttggtgacatgaccaatgaagaattcaggcagatgatgggttgctttcgaaaccagaaattcaggaaggggaaagtgttccgtgagcctctgtttcttgatcttcccaaatctgtggattggagaaagaaaggctacgtgacgccagtgaagaatcagaaacagtgtggttcttgttgggcttttagtgcgactggtgctcttgaaggacagatgttccggaaaactgggaaacttgtctcactgagcgagcagaatctggtggactgttcgcgtcctcaaggcaatcagggctgcaatggtggcttcatggctagggccttccagtatgtcaaggagaacggaggcctggactctgaggaatcctatccatatgtagcagtggatgaaatctgtaagtacagacctgagaattctgttgctaatgacactggcttcacagtggtcgcacctggaaaggagaaggccctgatgaaagcagtcgcaactgtggggcccatctccgttgctatggatgcaggccattcgtccttccagttctacaaatcaggcatttattttgaaccagactgcagcagcaaaaacctggatcatggtgttctggtggttggctacggctttgaaggagcaaattcgaataacagcaagtattggctcgtcaaaaacagctggggtccagaatggggctcgaatggctatgtaaaaatagccaaagacaagaacaaccactgtggaatcgccacagcagccagctaccccaatgtgtgagctgatggatggtgaggaggaaggacttaaggacagcatgtctggggaaattttatcttgaaactgaccaaacgcttattgtgtaagataaaccagttgaatcattgaggatccaagttgagattttaattctgtgacatttttacaagggtaaaatgttaccactactttaattattgttatacacagctttatgatatcaaagactcattgcttaattctaagacttttgaattttcattttttaaaaagatgtacaaaacagtttgaaataaattttaattcgtatat

SEQ ID NO: 115044 - DNA, 4322 bp, Homo sapiens
  Payload ID: 2461
  Gene Symbol: CTSV
  Gene Name: cathepsin V
  Uniprot ID: O60911
  ENST ID: ENST00000538255
  CDS Start-End: 48-1052
cttctaaagccctgatgcacccacccttaagtggaaggttttgaaacatgaatctttcgctcgtcctggctgccttttgcttgggaatagcctccgctgttccaaaatttgaccaaaatttggatacaaagtggtaccagtggaaggcaacacacagaagattatatggcgcgaatgaagaaggatggaggagagcagtgtgggaaaagaatatgaaaatgattgaactgcacaatggggaatacagccaagggaaacatggcttcacaatggccatgaatgcttttggtgacatgaccaatgaagaattcaggcagatgatgggttgctttcgaaaccagaaattcaggaaggggaaagtgttccgtgagcctctgtttcttgatcttcccaaatctgtggattggagaaagaaaggctacgtgacgccagtgaagaatcagaaacagtgtggttcttgttgggcttttagtgcgactggtgctcttgaaggacagatgttccggaaaactgggaaacttgtctcactgagcgagcagaatctggtggactgttcgcgtcctcaaggcaatcagggctgcaatggtggcttcatggctagggccttccagtatgtcaaggagaacggaggcctggactctgaggaatcctatccatatgtagcagtggatgaaatctgtaagtacagacctgagaattctgttgctaatgacactggcttcacagtggtcgcacctggaaaggagaaggccctgatgaaagcagtcgcaactgtggggcccatctccgttgctatggatgcaggccattcgtccttccagttctacaaatcaggcatttattttgaaccagactgcagcagcaaaaacctggatcatggtgttctggtggttggctacggctttgaaggagcaaattcgaataacagcaagtattggctcgtcaaaaacagctggggtccagaatggggctcgaatggctatgtaaaaatagccaaagacaagaacaaccactgtggaatcgccacagcagccagctaccccaatgtgtgagctgatggatggtgaggaggaaggacttaaggacagcatgtctggggaaattttatcttgaaactgaccaaacgcttattgtgtaagataaaccagttgaatcattgaggatccaagttgagattttaattctgtgacatttttacaagggtaaaatgttaccactactttaattattgttatacacagctttatgatatcaaagactcattgcttaattctaagacttttgaattttcattttttaaaaagatgtacaaaacagtttgaaataaattttaattcgtatataaaggtgggcctttttttaatgcattggctttttgtgtagtcaggaaatataattaagctctgaaataataacttcatgtgccaatggtatgttaggagaaagatgctagcagaaagctggcttcctggctcttgagtagttataaaaatacagactttatatcagctgcccagttactgtgtgttacccaactcctgaatctaccaaaatttgataaacaatttggaaggacaaacctacattttttttttttatgagacggagtctctctcactctgtcaccaaggctggagtgcagtagtgtgatctcagctcactgcaacctctgcctcccgggtttaagcaattctctgcctcagcctcccgagtagctgggattacaggcgcgtgccaccacgcctagtgtatttttagtagagagagggtttcaccatcttggccaggctggtcttgaactctcgacctcgtgatccacctgcctcagcctcccaaagtgttgggattacagatgtgagccactgcgcccagcccctaaattgttttagtaaagaagaaagcagttgactttttagaaaaggaaatgtcttcttcctttgacacataacctcaagatggttaggttacgtgataaaaagtgaagctgcttgttactggagcctctctgaattgctggtgaccactttgcagtctgaggaagacgcaggtgcaagtaagttaccaagggtattttgttttcattccaagtctctgatgacatattccacctagctcttctagaaaagcttatttgttaactagtgttagcaaaaataaatggtgtggttaacaaatctcaggcatttgacagtagctggagaaatttgttcaaggtccacaagagatgaggctgggctacaaaaagaggcctctggccgaagatggataagagatcacaagtgaaaggtcagaagtcactaggccagactctggctacctaatccctgaattaaaaataaactcaaaatggggggaaaaaggctaagcatatagttacacaggtagtaaatacaaataaaacgatatttttgcatatttaaaatactggaagaaagtacaccaaacttgtgggtgaattatgggtggttatttaactcgtttagtgaaaagcatgtatttttatgagcaggagaaaatagtaaagatatacccacattctgcaggctaaaggagagccctgtgtgtgttttaaaagcccatgtttccagtcaaataaaaaattaccggggatgagctggtgaaatttaatcgaaaggtgatccattgtgaatgcaatgggagggaaggggcatgtgggactgtgtatcccaaaaaccctttgatagcctatgtccacagccatctctggaaaatccagtctaccatattcagtcttgagttttctctgagaaaggattccttcgtctttgcagcagcaggctaagttggtactctccacagattcttggaacaacaacccaggctctaaggaaacatctaggcactaaattgaatgaaagagtgatggctttttattcaaataaaaaaatttcaaatctgtcaaaacagcacccctcggaaaactaaaatagagatatttcaagattttataattttcaaagacctttgaaatattttaaacttgtgaaaagttacaaacctgatgtgttgtctaaaagcgtttttcaaacaagccagtagacttgaaaaatctagtctgaagcacagacttaaccaatatttgctggggatatgcccccaaatctggccataaacaaaatctctgcagtactgtgacaggttcatgatggccatgacgccatgctgaaggtttaccggaatgagagcaaggaacacctggaccacccagggcgggaaaacggcttaaaggcgttcctaaactacaaacaatagcatgagcgatctgtgccttaaggacatgttcctgctgcagataactagccagaccccatgcctttgtttcgtttgggaaggaatacttttagttaatctataatctatagaaacaatgtttatcactggcttgctgtcaataaacatgggtaaatctctgttcggggctctcagctctgaaagctgtgagtcccctgatttcccactctgcatgctatatttctgggtgtgtgtctttaatttctctagcgcctctgggttagggtctccatgaccaagctggtctcggcaaatatttcctatactcgaacatctaaattgtttgttttcttacttgaattgcaaaggaagtaaggaagggtgagatagaaatcactgagcatattaagagggaggagtttgctgatgtgggagtgtagttatgacacttgggcatcatactagaggctatggacttagcaataaggaaacatccactcagccctatgtgtggttcatgtgtatgttttgcctatgaaagttgaaactgttttctaaatgttatttccttttgtaactgataaaatttctaaaaagcaaagaagaaacttttctgtattaaaaataacaaacattagtaaatgtatatatacagtcatgtgttgcttaatgatggggatacattctgagaaatgtgtcttgggtgatttcatcgtgacgtgaacatcatagagtacactgacacaaacctagatggtatagcctattacacacctaggctatatggtacagcctgttgctcctaagctacgcacctgtgcaacacatcactgtgctgagtactgtacacagttgtaacacagtggtaagtattcgtgtatctgaacagaaaagtacagtaaaaatataggatcataattttatgggaccactatcatatatgcagtcactgaccaaaacatcacacagcacatgacttgtgtgtatggatatctcaattgtaaacaatttcacaaatgttcattatctctttttaagtaagttaataagtaaaactattactaagctgc

SEQ ID NO: 115045 - DNA, 1300 bp, Homo sapiens
  Payload ID: 2462
  Gene Symbol: CTSW
  Gene Name: cathepsin W
  Uniprot ID: P56202
  ENST ID: ENST00000307886
  CDS Start-End: 47-1177
gatctgcgcggcttcctgcctccatgccactccagactgcaccggcatggcactgactgcccacccctcctgcctcctggccctgttggtggcaggcctagcccaaggcatcagaggcccccttagggcccaggacctaggtccccagccgctagagctgaaagaggccttcaagttgttccagatccagttcaaccggagttacctgagcccagaagagcatgctcaccgcctggacatctttgcccacaacctggcccaggctcagaggctgcaggaggaggacttgggcacagctgagtttggggtgactccattcagtgacctcacagaggaggagtttggccagctctatggctatcggagggcagctggaggggtccccagcatgggcagagaaataaggtctgaagagccagaggagtcagtacctttcagctgtgactggcggaaggtggccagcgccatctcacccatcaaggaccagaaaaactgcaactgctgctgggccatggcagcggcaggcaacatagagaccctgtggcgcatcagtttctgggattttgtggatgtctccgtgcaggaactgctggactgtggccgctgtggggatggctgccacggtggcttcgtctgggacgcgttcataactgtcctcaacaacagcggcctggccagtgaaaaggactacccgttccagggcaaagtcagagcccacaggtgccaccccaagaagtaccagaaggtggcctggatccaggacttcatcatgctgcagaacaacgagcacagaattgcgcagtacctggccacttatggccccatcaccgtgaccatcaacatgaagccccttcagctataccggaaaggtgtgatcaaggccacacccaccacctgtgacccccagcttgtggaccactctgtcctgctggtgggttttggcagcgtcaagtcagaggaggggatatgggcagagacagtctcatcgcagtctcagcctcagcctccacaccccaccccatactggatcctgaagaactcctggggggcccaatggggagagaagggctatttccggctgcaccgagggagcaatacctgtggcatcaccaagttcccgctcactgcccgtgtgcagaaaccggatatgaagccccgagtctcctgccctccctgaacccacctggccccctcagctctgtcctgttaggccaactgcctccttgccagccccacccccaggtttttgcccatcctcccaatctcaatacagcctgaataaaccaagacaagacctctg

SEQ ID NO: 115046 - DNA, 634 bp, Homo sapiens
  Payload ID: 2462
  Gene Symbol: CTSW
  Gene Name: cathepsin W
  ENST ID: ENST00000526034
  CDS Start-End: 1-634
gcactgactgcccacccctcctgcctcctggccctgttggtggcaggcctagcccaaggcatcagaggcccccttagggcccaggacctaggtccccagccgctagagctgaaagaggccttcaagttgttccagatccagttcaaccggagttacctgagcccagaagagcatgctcaccgcctggacatctttgcccacaacctggcccaggctcagaggctgcaggaggaggacttgggcacagctgagtttggggtgactccattcagtgacctcacagaggaggagtttggccagctctatggctatcggagggcagctggaggggtccccagcatgggcagagaaataaggtctgaagagccagaggagtcagtacctttcagctgtgactggcggaaggtggccagcgccatctcacccatcaaggaccagaaaaactgcaactgctgctgggccatggcagcggcaggcaacatagagaccctgtggcgcatcagtttctgggattttgtggatgtctccgtgcagggcggcctggccagtgaaaaggactacccgttccagggcaaagtcagagcccacaggtgccaccccaagaagtaccagaaggtggcctggatccaggact

SEQ ID NO: 115047 - DNA, 1341 bp, Homo sapiens
  Payload ID: 2462
  Gene Symbol: CTSW
  Gene Name: cathepsin W
  ENST ID: ENST00000528419
  CDS Start-End: 5-1099
cggcatggcactgactgcccacccctcctgcctcctggccctgttggtggcaggcctagcccaaggcatcagaggcccccttagggcccaggacctaggtccccagccgctagagctgaaagaggccttcaagttgttccagatccagttcaaccggagttacctgagcccagaagagcatgctcaccgcctggacatctttgcccacaacctggcccaggctcagaggctgcaggaggaggacttgggcacagctgagtttggggtgactccattcagtgacctcacagaggaggagtttggccagctctatggctatcggagggcagctggaggggtccccagcatgggcagagaaataaggtctgaagagccagaggagtcagtacctttcagctgtgactggcggaaggtggccagcgccatctcacccatcaaggaccagaaaaactgcaactgctgctgggccatggcagcggcaggcaacatagagaccctgtggcgcatcagtttctgggattttgtggatgtctccgtgcaggaactgctggactgtggccgctgtggggatggctgccacggtggcttcgtctgggacgcgttcataactgtcctcaacaacagcggcctggccagtgaaaaggactacccgttccagggcaaagtcagagcccacaggtgccaccccaagaagtaccagaaggtggcctggatccaggacttcatcatgctgcagaacaacgagcacagaattgcgcagtacctggccacttatggccccatcaccgtgaccatcaacatgaagccccttcagctataccggaaaggtgtgatcaaggccacacccaccacctgtgacccccagcttgtggaccactctgtcctgctggtgggttttggcagcgtcaagtcagaggaggggatatgggcagagacagtctcatcgcagtctcagcctcagcctccacaccccaccccatactggatcctgaagaactcctggggggcccaatggggagagaaggtgagtgtgatctattgggggagggggcaaggcagaacaggcctcttcccaccttcccgcccctatgtcccctaacctcctagggctatttccggctgcaccgagggagcaatacctgtggcatcaccaagttcccgctcactgcccgtgtgcagaaaccggatatgaagccccgagtctcctgccctccctgaacccacctggccccctcagctctgtcctgttaggccaactgcctccttgccagccccacccccaggtttttgcccatcctcccaatctcaatacagcctgaataaaccaagacaagacctctg

SEQ ID NO: 115048 - DNA, 1495 bp, Homo sapiens
  Payload ID: 2463
  Gene Symbol: CTSZ
  Gene Name: cathepsin Z
  Uniprot ID: Q9UBR2
  ENST ID: ENST00000217131
  CDS Start-End: 120-1031
ggggtcggccgggtgctgggccgaggccgaggccggggcgggatccagagcgggagccggcgcgggatctgggactcggagcgggatccggagcgggacccaggagccggcgcggggccatggcgaggcgcgggccagggtggcggccgcttctgctgctcgtgctgctggcgggcgcggcgcagggcggcctctacttccgccggggacagacctgctaccggcctctgcggggggacgggctggctccgctggggcgcagcacatacccccggcctcatgagtacctgtccccagcggatctgcccaagagctgggactggcgcaatgtggatggtgtcaactatgccagcatcacccggaaccagcacatcccccaatactgcggctcctgctgggcccacgccagcaccagcgctatggcggatcggatcaacatcaagaggaagggagcgtggccctccaccctcctgtccgtgcagaacgtcatcgactgcggtaacgctggctcctgtgaagggggtaatgacctgtccgtgtgggactacgcccaccagcacggcatccctgacgagacctgcaacaactaccaggccaaggaccaggagtgtgacaagtttaaccaatgtgggacatgcaatgaattcaaagagtgccacgccatccggaactacaccctctggagggtgggagactacggctccctctctgggagggagaagatgatggcagaaatctatgcaaatggtcccatcagctgtggaataatggcaacagaaagactggctaactacaccggaggcatctatgccgaataccaggacaccacatatataaaccatgtcgtttctgtggctgggtggggcatcagtgatgggactgagtactggattgtccggaattcatggggtgaaccatggggcgagagaggctggctgaggatcgtgaccagcacctataaggatgggaagggcgccagatacaaccttgccatcgaggagcactgtacatttggggaccccatcgtttaaggccatgtcactagaagcgcagtttaagaaaaggcatggtgacccatgaccagaggggatcctatggttatgtgtgccaggctggctggcaggaactggggtggctatcaatattggatggcgaggacagcgtggcactggctgcgagtgttcctgagagttgaaagtgggatgacttatgacacttgcacagcatggctctgcctcacaatgatgcagtcagccacctggtgaagaagtgacctgcgacacaggaaacgatgggacctcagtcttcttcagcagaggacttgatattttgtatttggcaactgtgggcaataatatggcatttaagaggtgaaagagttcagacttatcaccattcttatgtcactttagaatcaagggtgggggagggagggagggagttggcagtttcaaatcgcccaagtgatgaataaagtatctggctctgcacgaga

SEQ ID NO: 115049 - DNA, 2619 bp, Homo sapiens
  Payload ID: 2464
  Gene Symbol: CATSPER1
  Gene Name: cation channel, sperm associated 1
  Uniprot ID: Q8NEC5
  ENST ID: ENST00000312106
  CDS Start-End: 139-2481
acgagaatagtcaggcctttctggaagcccagtgccacagtctgcattgagcttggctcaggaaagaagggaaatccaggcggggcctgttgggcccaggtcttgagctcttttggctccagagttcccagcacagtcatggatcaaaactcagtgcctgaaaaggctcagaatgaggcagacaccaataacgcagataggttctttcgctctcactcatcacccccacaccacaggccaggccacagcagagctctccaccattacgagttgcaccatcacggcgtgccccaccaacgtggtgaatctcaccaccctccggagttccaagacttccacgaccaagccttgtcctcccatgtccaccaatctcaccaccacagcgaggcacggaatcacggcagagcccatggccccacaggctttggtctggctccctctcaaggcgccgtcccctcccaccgttcctacggtgaggactaccatgatgagctccaacgtgatggcaggaggcatcatgatgggtcccaatacggtgggttccatcagcagagtgactcccattaccatagggggtctcaccatggcagaccccaatatctcggtgagaatttatcccactattcctctggcgtgccccaccacggtgaggcttcccaccatggtgggtcctacctcccccatggacccaatccctacagtgagtccttccaccacagcgaggcttcccaccttagcgggctccaacacgatgagtcccagcatcaccaagtcccccaccgtggctggccccaccatcaccaagtccaccaccatggcaggtcccgtcatcatgaagcccaccagcatggaaagtctcctcatcacggagagaccatttcccctcattcctctgtggggtcctaccagcgtgggatatctgactatcacagcgagtaccaccaaggtgatcaccaccccagtgagtaccaccatggcgaccatccccaccacacacagcaccactaccaccagacccaccggcaccgagactaccatcagcaccaagaccaccacggcgcgtatcattccagttacctccatggcgactacgtccagagcacttcccaactctctatcccacacacatcccggagcctgattcacgatgcccccggccctgctgcttctcgtacaggagtcttcccctatcacgtagcacacccacggggctcggctcacagcatgactcggtcctccagcacaatccgctcacgtgtcacccagatgtccaaaaaagtccatacccaggatatctccaccaaacattcagaagactggggcaaagaagaagggcaatttcagaaacgcaaaaccggccggctccagcggacccgcaagaagggacactctaccaatctcttccagtggctgtgggaaaagctaaccttcctcattcagggcttccgggaaatgatccggaacctgacccaatccttggcctttgaaactttcatcttcttcgttgtctgcctcaacaccgtcatgctggtggcccagaccttcgctgaagtcgagatccggggcgagtggtacttcatggccttggactccatattcttctgcatctacgtggtggaagccctgctcaagatcatcgccctgggcctctcgtacttctttgacttctggaacaatttggacttcttcattatggccatggccgtgctggacttcttgctgatgcagacccactccttcgccatctaccaccaaagcctcttccggatcctcaaggtcttcaagagcctgcgggccctgagggcaatccgggtcctgcggaggctcagcttcctgaccagcgtccaggaagtgacagggaccctgggccagtccttgccgtccatcgcagccatcctcatcctcatgtttacctgcctcttcctcttctccgcggtcctccgggcactgttccgcaaatctgaccccaagcgcttccagaacatcttcaccaccatcttcaccctcttcaccttgctcacgctggatgactggtccctcatctacatggacagccgtgcccagggcgcctggtacatcattcccatcctcgtaatttacatcatcatccagtacttcatcttcctcaacctggtgattactgtcctggtggatagcttccagacggcgctgttcaaaggccttgagaaagcgaagcaggagagggccgcccggatccaagagaagctgctggaagactcactgacggagctcagagctgcagagcccaaagaggtggcgagtgaaggcaccatgctgaagcggctcatcgagaaaaagtttgggaccatgactgagaagcagcaggagctcctgttccattacctgcagctggtggcaagcgtggagcaggagcagcagaagttccgctcccaggcagccgtcatcgatgagattgtggacaccacatttgaggctggagaagaggacttcaggaattgaccccaggaggacaccagatacagacttcagcccctggcagtctgcccacctgggtgcactgggacgggtccccagatctgctggaatgattgtccgggccctgcagagcaggggccccaacagagtttttaaacccca

SEQ ID NO: 115050 - DNA, 1820 bp, Homo sapiens
  Payload ID: 2465
  Gene Symbol: CATSPER2
  Gene Name: cation channel, sperm associated 2
  Uniprot ID: Q96P56
  ENST ID: ENST00000321596
  CDS Start-End: 201-1793
gggctgtgggtaggggctagggccgggtcccggggtgagccgaaacctgggggtcgagcggggcggggaatggggcgcagtgaggctgggagccggccctgagctcgtcttgcataggggtagccaggctcggggcacctgagctggaggcggaagcgtgaaataaggactgagtgggcaaagagaacctgggctgagacatggccgcttaccaacaagaagagcagatgcagcttccccgagctgatgccattcgttcacgtctcatcgatactttctctctcattgagcatttgcaaggcttgagccaagctgtgccgcggcacactatcagggagttacttgatccttcccgccagaagaaacttgtattgggagatcaacaccagctagtgcgtttctctataaagcctcagcgtatagaacagatttcacatgcccagaggctgttgagcaggcttcatgtgcgctgcagtcagaggccacctctttctttgtgggccggatgggtccttgagtgtcctctcttcaaaaacttcatcatcttcctggtctttttgaatacgatcatattgatggttgaaatagaattgctggaatccacaaataccaaactatggccattgaagctgaccttggaggtggcagcttggtttatcttgcttattttcatcctggagatccttcttaagtggctatccaacttttctgttttctggaagagtgcctggaatgtctttgactttgttgttaccatgttgtccctgcttcccgaggttgtggtattggtaggggtaacaggccaatcggtgtggcttcagcttctgaggatctgccgggtgctgaggtctctcaaactccttgcacaattccgtcaaattcaaattattattttggtcctggtcagggccctcaagagcatgaccttcctcttgatgttgctgctcatcttcttctacatttttgctgtgactggtgtctacgtcttctcagagtacacccgttcacctcgtcaggacctggagtaccatgtgttcttctcggacctcccgaattccctggtaacagtgttcattctcttcaccttggatcattggtatgcactgcttcaggacgtctggaaggtgcctgaagtcagtcgcatcttcagcagcatctatttcatcctttggttgttgcttggctccattatctttcgaagtatcatagtagccatgatggttactaactttcagaatatcaggaaagagctgaatgaggagatggcgcgtcgggaggttcagctcaaagctgacatgttcaagcggcagatcatccagaggagaaaaaacatgtcacatgaagcactgacgtcaagccatagcaaaatagaggacagttcaagaggagctagtcaacaaagggaaagtttggacttatcagaagtgtctgaagtagagtctaattatggtgccactgaagaggatttaataacatctgcatcaaaaacagaagagaccttgtcaaaaaagagagagtaccagtcttcctcctgtgtctcctccacatcctcttcctattcttcctcttctgaatccagattttctgaatctattggtcgtttggactgggagactcttgtgcacgaaaatctgcccgggctaatggaaatggatcaggatgaccgtgtttggcccagagactcactcttccgatattttgagttgctagaaaagcttcagtataacctagaggaacgtaagaagttacaagagtttgcagtgcaggcactgatgaacttggaagacaagtaaagcaatggatggcttcaatatccttgg

SEQ ID NO: 115051 - DNA, 1758 bp, Homo sapiens
  Payload ID: 2465
  Gene Symbol: CATSPER2
  Gene Name: cation channel, sperm associated 2
  ENST ID: ENST00000381761
  CDS Start-End: 15-1619
gagcgttgctccgcatggtcctgggctcagacatggccgcttaccaacaagaagagcagatgcagcttccccgagctgatgccattcgttcacgtctcatcgatactttctctctcattgagcatttgcaaggcttgagccaagctgtgccgcggcacactatcagggagttacttgatccttcccgccagaagaaacttgtattgggagatcaacaccagctagtgcgtttctctataaagcctcagcgtatagaacagatttcacatgcccagaggctgttgagcaggcttcatgtgcgctgcagtcagaggccacctctttctttgtgggccggatgggtccttgagtgtcctctcttcaaaaacttcatcatcttcctggtctttttgaatacgatcatattgatggttgaaatagaattgctggaatccacaaataccaaactatggccattgaagctgaccttggaggtggcagcttggtttatcttgcttattttcatcctggagatccttcttaagtggctatccaacttttctgttttctggaagagtgcctggaatgtctttgactttgttgttaccatgttgtccctgcttcccgaggttgtggtattggtaggggtaacaggccaatcggtgtggcttcagcttctgaggatctgccgggtgctgaggtctctcaaactccttgcacaattccgtcaaattcaaattattattttggtcctggtcagggccctcaagagcatgaccttcctcttgatgttgctgctcatcttcttctacatttttgctgtgactggtgtctacgtcttctcagagtacacccgttcacctcgtcaggacctggagtaccatgtgttcttctcggacctcccgaattccctggtaacagtgttcattctcttcaccttggatcattggtatgcactgcttcaggacgtctggaaggtgcctgaagtcagtcgcatcttcagcagcatctatttcatcctttggttgttgcttggctccattatctttcgaagtatcatagtagccatgatggttactaactttcagaatatcaggaaagagctgaatgaggagatggcgcgtcgggaggttcagctcaaagctgacatgttcaagcggcagatcatccagaggagaaaaaacatgtcacatgaagcactgacgtcaagccatagcaaaatagaggacagaggagctagtcaacaaagggaaagtttggacttatcagaagtgtctgaagtagagtctaattatggtgccactgaagaggatttaataacatctgcatcaaaaacagaagagaccttgtcaaaaaagagagagtaccagtcttcctcctgtgtctcctccacatcctcttcctattcttcctcttctgaatccagattttctgaatctattggtcgtttggactgggagactcttgtgcacgaaaatctgcccgggctaatggaaatggatcaggatgaccgtgtttggcccagagactcactcttccgatattttgagttgctagaaaagcttcagtataacctagaggaacgtaagaagttacaagagtttgcagtgcaggcactgatgaacttggaagacaagtaaagcaatggatggcttcaatatccttgggcccagcaaaagataatgaagggaattgttggaaatagagaattgaaaatataaacattcagatagaacaatgtctgttcattaaaattaaaaagtataagtgtctaggcca

SEQ ID NO: 115052 - DNA, 3898 bp, Homo sapiens
  Payload ID: 2465
  Gene Symbol: CATSPER2
  Gene Name: cation channel, sperm associated 2
  Uniprot ID: Q96P56
  ENST ID: ENST00000396879
  CDS Start-End: 114-1700
gttgctccgcatggtcctgggctgtgggggtagccaggctcggggcacctgagctggaggcggaagcgtgaaataaggactgagtgggcaaagagaacctgggctgagcagacatggccgcttaccaacaagaagagcagatgcagcttccccgagctgatgccattcgttcacgtctcatcgatactttctctctcattgagcatttgcaaggcttgagccaagctgtgccgcggcacactatcagggagttacttgatccttcccgccagaagaaacttgtattgggagatcaacaccagctagtgcgtttctctataaagcctcagcgtatagaacagatttcacatgcccagaggctgttgagcaggcttcatgtgcgctgcagtcagaggccacctctttctttgtgggccggatgggtccttgagtgtcctctcttcaaaaacttcatcatcttcctggtctttttgaatacgatcatattgatggttgaaatagaattgctggaatccacaaataccaaactatggccattgaagctgaccttggaggtggcagcttggtttatcttgcttattttcatcctggagatccttcttaagtggctatccaacttttctgttttctggaagagtgcctggaatgtctttgactttgttgttaccatgttgtccctgcttcccgaggttgtggtattggtaggggtaacaggccaatcggtgtggcttcagcttctgaggatctgccgggtgctgaggtctctcaaactccttgcacaattccgtcaaattcaaattattattttggtcctggtcagggccctcaagagcatgaccttcctcttgatgttgctgctcatcttcttctacatttttgctgtgactggtgtctacgtcttctcagagtacacccgttcacctcgtcaggacctggagtaccatgtgttcttctcggacctcccgaattccctggtaacagtgttcattctcttcaccttggatcattggtatgcactgcttcaggacgtctggaaggtgcctgaagtcagtcgcatcttcagcagcatctatttcatcctttggttgttgcttggctccattatctttcgaagtatcatagtagccatgatggttactaactttcagaatatcaggaaagagctgaatgaggagatggcgcgtcgggaggttcagctcaaagctgacatgttcaagcggcagatcatccagaggagaaaaaacatgtcacatgaagcactgacgtcaagccatagcaaaatagaggacagaggagctagtcaacaaagggaaagtttggacttatcagaagtgtctgaagtagagtctaattatggtgccactgaagaggatttaataacatctgcatcaaaaacagaagagaccttgtcaaaaaagagagagtaccagtcttcctcctgtgtctcctccacatcctcttcctattcttcctcttctgaatccagattttctgaatctattggtcgtttggactgggagactcttgtgcacgaaaatctgcccgggctaatggaaatggatcaggatgaccgtgtttggcccagagactcactcttccgatattttgagttgctagaaaagcttcagtataacctagaggaacgtaagaagttacaagagtttgcagtgcaggcactgatgaacttggaagacaagtaaagcaatggatggcttcaatatccttgggcccagcaaaagataatgaagggaattgttggaaatagagaattgaaaatataaacattcagatagaacaatgtctgttcattaaaattaaaaagtataagtgtctaggccaggcgtggtgaaaccctgtctctactaaaaatacaaaaaaattagctgggtgtggtggcagatgcttgtaatcatagctacttgggagcctgaggcaggagaatcacttgaacctgggagtcagaggttgcagtgagccaagattgcaccactgcactccagcctgggcaacagagtgagactctgtataagtgtcttataaatactcctgatagctgctcagtagtgtgaccctgagataagggatattgaaaggcataaggtcaagtaaaagagttagttcaagctgagtgtggtgatgtgtgcctctagtcccagctatgggctgaggcaggattgtttgaggcagggagttcgaggctacagcaagctaggatcatatcactgcattccagcctgggcaacatagcgagaccctatctctaaaaaagaacaaaacaagttagctcagatgccagtggagtctgtgctccttagctttctaccctttccacagctcctgaatctgactcatttcttgactttatcattatagcttccacccttcctgcaacctctactgcctgattagagtcctaattttaccctctccctccctgatgcataggtaaaggcccctctgtggagtaaggagatcttcagagctgttagtgtaactaattgagaagtattgtttccattgcgtgttccactcatgttgcttctcttgtgaaccattaactttaattggatattatttttacctgtttctggaccggaagtctctttatttcattttgccatagctcagggcagtgttcaaatcagtaagtgttgtacaggtttttagtgttagaagggatttcagagttaatctatctcccatcaaagcaggaacaccttttagaacatcactgaaaggaggattatccaggtaatgcttaatgtttctagttatttgggatttattatctagaagggatcccattccatcgttagaagacttaagtctttagacatgtttattattaaaaattatatcacttattgagtgtttaacatgtatgaggttatttatatatttagtatatatatactgtatatagagtatgcatatttcataaaataatcatatatggaagatagcgtcacatttttagagatcagaaaactaaggcctaaagaaattaagtaagttaagtagcttgcccaagagcacataccaagtaagaggtagagctaaggttctaactcaggttaaaaattctgagttgagaaaaaaatcagttgaagccatttaaacaataaaatagcttactggagactggaaaattcaaaggtagtatagcttcaggattgatttaatgtaaaaattcactgttgttagatctgtggttttgtttctctggaattttcctgtctgcgctctcctccacgtgttcttgttattctcagactggcttcacttgggtagccagacaattttctgaagcgcctaggcttgcatacctatttccccatatgcaggggaagagagccggtgactcctttctcagtcaatgaacaaaatttttgagctttgggtcacaataatggttattcttggagtgaagatactgatggggaggaagcatgaagcatctggagtgctatagatatgttccatatcttgatctgcatggtggttacaccggtatatacagatgtaaaaattcaacaaaatgtacacttaaaatttgggcattaactgcaggtaagtcaacctccactcctctaaagatatcctgaccaccactctgattggaccaagaagttaggtcatatgcttacgtctgaacaaattgttgaggtaaggtggtggttgtgatgaaatcactaattaaggctttctcctgaactggaggtaaggtcagtaacacccaaccttaagtaagggctgctacccaagtggggaagagatggaagggggcaatagggtggtaattataaagtcctcacctaagagtatgtctggcaaaaaggccaagatggggaaaaggcaaatgaattgaatgtccagaataaacaaatctatgaagaca

SEQ ID NO: 115053 - DNA, 568 bp, Homo sapiens
  Payload ID: 2465
  Gene Symbol: CATSPER2
  Gene Name: cation channel, sperm associated 2
  ENST ID: ENST00000409481
  CDS Start-End: 376-568
gtactttctgagacttcatcctcgaggcctggtggctaccggctcttttcatcttcacggccacccacagaaatgaagcagagtggcctaggctcacagtgcacagggctgttcagcaccacagtgctgggtggctcctccagtgccccgaatcttcaggactacgcccgcagccatggcaaaaagctaccacctgccagtctgaagcaccgagatgaggtatctgccggtactgagatgtaagtgatcagctgaagggagaaactgtacaccatgtgacggacaaattgcctgcctcaagaaagcacttaggaccattctgcagccactcagtgaccttggctagaaaccaatggctgtgcggcgtgagcagacatggccgcttaccaacaagaagagcagatgcagcttccccgagctgatgccattcgttcacgtctcatcgatactttctctctcattgagcatttgcaaggcttgagccaagctgtgccgcggcacactatcagggagttacttgatccttcccgccagaagaaacttgtattgggagatcaacaccagctag

SEQ ID NO: 115054 - DNA, 457 bp, Homo sapiens
  Payload ID: 2465
  Gene Symbol: CATSPER2
  Gene Name: cation channel, sperm associated 2
  ENST ID: ENST00000450810
  CDS Start-End: 1-224
ccagattttctgaatctattggtcgtttggactgggagactcttgtgcacgaaaatctgcccgggctaatggaaatggatcaggatgaccgtgtttggcccagagactcactcttccgatattttgagttgctagaaaagcttcagtataacctagaggaacgtaagaagttacaagagtttgcaggaaaaaaaaaggccgggcacggtggctcacacctgtaatcccagcactttgggaggccgaggcgggcagatcacaaggtcaggagattaggatcatcctggccaacatgtgcaggcactgatgaacttggaagacaagtaaagcaatggatggcttcaatatccttgggcccagcaaaagataatgaagggaattgttggaaatagagaattgaaaatataaacattcagatagaacaatgtctgttcattaaaattaaaaagtataagtg

SEQ ID NO: 115055 - DNA, 1468 bp, Homo sapiens
  Payload ID: 2465
  Gene Symbol: CATSPER2
  Gene Name: cation channel, sperm associated 2
  Uniprot ID: Q96P56
  ENST ID: ENST00000433380
  CDS Start-End: 1-1245
atggccgcttaccaacaagaagagcagatgcagcttccccgagctgatgccattcgttcacgtctcatcgatactttctctctcattgagcatttgcaaggcttgagccaagctgtgccgcggcacactatcagggagttacttgatccttcccgccagaagaaacttgtattgggagatcaacaccagctagtgcgtttctctataaagcctcagcgtatagaacagatttcacatgcccagaggctgttgagcaggcttcatgtgcgctgcagtcagaggccacctctttctttgtgggccggatgggtccttgagtgtcctctcttcaaaaacttcatcatcttcctggtctttttgaatacgatcatattgatggttgaaatagaattgctggaatccacaaataccaaactatggccattgaagctgaccttggaggtggcagcttggtttatcttgcttattttcatcctggagatccttcttaagtggctatccaacttttctgttttctggaagagtgcctggaatgtctttgactttgttgttaccatgttgtccctgcttcccgaggttgtggtattggtaggggtaacaggccaatcggtgtggcttcagcttctgaggatctgccgggtgctgaggtctctcaaactccttgcacaattccgtcaaattcaaattattattttggtcctggtcagggccctcaagagcatgaccttcctcttgatgttgctgctcatcttcttctacatttttgctgtgactggtgtctacgtcttctcagagtacacccgttcacctcgtcaggacctggagtaccatgtgttcttctcggacctcccgaattccctggtaacagtgttcattctcttcaccttggatcattggtatgcactgcttcaggacgtctggaaggtgcctgaagtcagtcgcatcttcagcagcatctatttcatcctttggttgttgcttggctccattatctttcgaagtatcatagtagccatgatggttactaactttcagaatatcaggaaagagctgaatgaggagatggcgcgtcgggaggttcagctcaaagctgacatgttcaagcggcagatcatccagaggagaaaaaacatgtcacatgaagcactgacgtcaagccatagcaaaatagaggacaggtcgtttggactgggagactcttgtgcacgaaaatctgcccgggctaatggaaatggatcaggatgaccgtgtttggcccagagactcactcttccgatattttgagttgctagaaaagcttcagtataacctagaggaacgtaagaagttacaagagtttgcagtgcaggcactgatgaacttggaagacaagtaaagcaatggatggcttcaatatccttgggcccagcaaaagataatgaagggaattgttggaaatagagaattgaaaatataaacattcagatag

SEQ ID NO: 115056 - DNA, 252 bp, Homo sapiens
  Payload ID: 2465
  Gene Symbol: CATSPER2
  Gene Name: cation channel, sperm associated 2
  ENST ID: ENST00000432420
  CDS Start-End: 14-252
ggctgtggcagacatggccgcttaccaacaagaagagcagatgcagcttccccgagctgatgccattcgttcacgtctcatcgatactttctctctcattgagcatttgcaaggcttgagccaagctgtgccgcggcacactatcagggagttacttgatccttcccgccagaagaaacttgtattgggagatcaacaccagctagtgcgtttctctataaagcctcagcgtatagaacagatttcacatgc

SEQ ID NO: 115057 - DNA, 462 bp, Homo sapiens
  Payload ID: 2465
  Gene Symbol: CATSPER2
  Gene Name: cation channel, sperm associated 2
  ENST ID: ENST00000419262
  CDS Start-End: 1-40
actgacgtcaagccatagcaaaatagaggacagatcctaagttaaggatcttgagatgagatcatcctagattatccagttcaagaggagctagtcaacaaagggaaagtttggacttatcagaagtgtctgaagtagagtctaattatggtgccactgaagaggatttaataacatctgcatcaaaaacagaagagaccttgtcaaaaaagagagagtaccagtcttcctcctgtgtctcctccacatcctcttcctattcttcctcttctgaatccagattttctgaatctattggtcgtttggactgggagactcttgtgcacgaaaatctgcccgggctaatggaaatggatcaggatgaccgtgtttggcccagagactcactcttccgatattttgagttgctagaaaagcttcagtataacctagaggaacgtaagaagttacaagagtttgcag

SEQ ID NO: 115058 - DNA, 1367 bp, Homo sapiens
  Payload ID: 2466
  Gene Symbol: CATSPER3
  Gene Name: cation channel, sperm associated 3
  Uniprot ID: Q86XQ3
  ENST ID: ENST00000282611
  CDS Start-End: 87-1283
cagaatccagacgctaaggaaaatccctaagcagagattttctgttggatgctaaaagcaaggaataaaagttgaaaatttggaaaatgtctcaacaccgtcaccagcgccactcgagagtcatttctagttcaccagttgacactacatcggtgggattttgcccaacattcaagaaatttaagaggaacgatgatgaatgtcgggcatttgtgaagagagtcataatgagccgtttctttaagataattatgattagcactgtcacatcgaatgcgttttttatggccttgtggaccagttatgacataaggtaccgcttgttcagacttcttgagttctcggagatcttctttgtgtccatctgcacatctgagttgtccatgaaggtctatgtggaccccatcaactactggaagaacggctacaacctgctggatgtgatcattatcatcgttatgtttttaccctatgccctccgccagctcatgggcaaacagttcacttacctgtatatcgctgatggcatgcagtccctgcgcatcctcaagcttatcggctatagccagggcatccggacgctgatcaccgccgtggggcagacagtctacaccgtggcctctgtgctcctcctgctcttcctcctcatgtacatcttcgctatcttgggcttctgcctgtttggatctccagacaatggtgaccatgataactgggggaacctggctgcagcttttttcaccctcttcagcttggccacggttgatggctggacagacctgcagaagcagttggacaatcgggaatttgctttgagccgggcattcaccatcatcttcatcttgctcgcctctttcatcttcctcaacatgttcgtgggtgtgatgatcatgcacacagaggactccatcagaaagtttgagcgagagctgatgttggagcagcaggagatgctcatgggagagaagcaggtgattctgcagcggcagcaggaggagatcagcaggctgatgcacatacagaaaaatgctgactgcacaagtttcagtgagctggtggagaactttaagaagaccttgagccacactgacccaatggtcttggatgattttggcactagcttacccttcatcgatatctacttttccactctggactaccaggacacaactgtccacaagcttcaagagctgtactatgagatcgtgcatgtgctgagcctaatgctggaagacttgccccaggagaagccccagtccttggaaaaggtggatgagaagtagctgggcatggggcacccatgtgccgagagccttgcagaccatgacaggtccctattaaacacaggctttctgagttgtcctctc

SEQ ID NO: 115059 - DNA, 1516 bp, Homo sapiens
  Payload ID: 2467
  Gene Symbol: CATSPER4
  Gene Name: cation channel, sperm associated 4
  ENST ID: ENST00000338855
  CDS Start-End: 68-1516
accacgagggggagtgagaccacttggagtgaagattctttgaggagaaggaagagactgagcaaacatgagggataatgaaaaggcctggtggcagcaatggacctcccatacaggcctcgaggggtggggcgggactcaggaggaccgtatggggtttggaggggcagtagctgcactgaggggccgcccctctcccctgcagagtaccattcacgagtcctacggtcggccagaggagcaagtgctcatcaaccgccaggaaatcacgaacaaagcggacgcctgggacatgcaggagttcatcactcacatgtacatcaagcagctgctccgacaccccgccttccaactgctgctggccctgctgctggtgatcaatgccatcaccatcgctctccgtaccaactcctacctggaccagaaacactatgagttgttctctaccatagatgacattgtgctgaccatccttctttgtgaggttctccttggctggctcaatggcttctggattttctggaaggacggctggaacatcctcaacttcattatcgtctttatcttgctcttgcggttcttcattaatgaaatcaatattccctccatcaactacactctcagggcgcttcgtctggtgcatgtgtgcatggcggtggagcccctcgcccggatcatccgcgtcatcctgcagtcggtgcctgacatggccaatatcatggtcctcatcctcttcttcatgctggttttttccgtgtttggagtaacactctttggtgcattcgtgcccaagcatttccagaacatacaggttgcgctgtacaccctcttcatctgcatcacccaggacggctgggtggacatctacagtgacttccagacagagaagagggaatatgcaatggagattgggggtgccatctactttaccatcttcatcaccatcggtgccttcattggcatcaacctgttcgtcatcgtggtgaccaccaacctggagcaaatgatgaaggcaggagagcagggacaacagcaacgaataacctttagtgagacaggcgcagaggaagaggaggagaatgaccagctgccactggtgcattgtgtggtcgcccgctcggagaaatctggtctcctccaggaaccccttgcgggaggccccctgtcgaacctctcagaaaacacgtgtgacaacttttgcttggtgcttgaggcaatacaggagaacctgaggcagtacaaggagatccgagatgaactcaacatgattgtggaggaggtgcgcgcaatccgcttcaaccaggagcaggagtcagaggtgttgaacaggcgctcgtcgacgagcgggtcgttggagactacgtcatccaaggacatccgccagatgtctcaacagcaagacttgctcagtgcgctcgttagcatggaaaaggtgtgccttccttctcctacccaatgggtactcgccctgacactctgctcagcccagcccagccgggcctctggaccatttgtc

SEQ ID NO: 115060 - DNA, 1912 bp, Homo sapiens
  Payload ID: 2467
  Gene Symbol: CATSPER4
  Gene Name: cation channel, sperm associated 4
  Uniprot ID: Q7RTX7
  ENST ID: ENST00000456354
  CDS Start-End: 68-1486
accacgagggggagtgagaccacttggagtgaagattctttgaggagaaggaagagactgagcaaacatgagggataatgaaaaggcctggtggcagcaatggacctcccatacaggcctcgaggggtggggcgggactcaggaggaccgtatggggtttggaggggcagtagctgcactgaggggccgcccctctcccctgcagagtaccattcacgagtcctacggtcggccagaggagcaagtgctcatcaaccgccaggaaatcacgaacaaagcggacgcctgggacatgcaggagttcatcactcacatgtacatcaagcagctgctccgacaccccgccttccaactgctgctggccctgctgctggtgatcaatgccatcaccatcgctctccgtaccaactcctacctggaccagaaacactatgagttgttctctaccatagatgacattgtgctgaccatccttctttgtgaggttctccttggctggctcaatggcttctggattttctggaaggacggctggaacatcctcaacttcattatcgtctttatcttgctcttgcggttcttcattaatgaaatcaatattccctccatcaactacactctcagggcgcttcgtctggtgcatgtgtgcatggcggtggagcccctcgcccggatcatccgcgtcatcctgcagtcggtgcctgacatggccaatatcatggtcctcatcctcttcttcatgctggttttttccgtgtttggagtaacactctttggtgcattcgtgcccaagcatttccagaacatacaggttgcgctgtacaccctcttcatctgcatcacccaggacggctgggtggacatctacagtgacttccagacagagaagagggaatatgcaatggagattgggggtgccatctactttaccatcttcatcaccatcggtgccttcattggcatcaacctgttcgtcatcgtggtgaccaccaacctggagcaaatgatgaaggcaggagagcagggacaacagcaacgaataacctttagtgagacaggcgcagaggaagaggaggagaatgaccagctgccactggtgcattgtgtggtcgcccgctcggagaaatctggtctcctccaggaaccccttgcgggaggccccctgtcgaacctctcagaaaacacgtgtgacaacttttgcttggtgcttgaggcaatacaggagaacctgaggcagtacaaggagatccgagatgaactcaacatgattgtggaggaggtgcgcgcaatccgcttcaaccaggagcaggagtcagaggtgttgaacaggcgctcgtcgacgagcgggtcgttggagactacgtcatccaaggacatccgccagatgtctcaacagcaagacttgctcagtgcgctcgttagcatggaaaaggttcatgactctagctcacaaatactccttaaaaaacacaagagcagccactgagaggccaggatgggagccaaggggcctgcacacacacacccagccgctgcgtcttcctgtgtccttagtgtggcttggcagagcctggccagagcccatcctctcccttatacctgggcagaggccaggggctgtgaaggtggcagcacctgcaggtctggtgcctgtgagccccaggtccggtggagcaaggagagaggaggatgctggatgatgagagtgggaaccctagcagcaaggatgagcacagaagggggtgctggccaacgcagccaggatttgacctaaggatggggatccctggccccctgctcttgcccagagctggtggggggcctcagtgggccccagaaccaagaagagaaaggcaaggccagtggggccagacatctgtgtgttgacaataaagttttgtgttggaatcaa

SEQ ID NO: 115061 - DNA, 1831 bp, Homo sapiens
  Payload ID: 2467
  Gene Symbol: CATSPER4
  Gene Name: cation channel, sperm associated 4
  Uniprot ID: Q7RTX7
  ENST ID: ENST00000518899
  CDS Start-End: 1-1155
atgagggataatgaaaaggcctggtggcagcaatggacctcccatacaggcctcgaggggtggggcgggactcaggaggaccgtatggggtttggaggggcagtagctgcactgaggggccgcccctctcccctgcagagtaccattcacgagtcctacggtcggccagaggagcaagtgctcatcaaccgccaggaaatcacgaacaaagcggacgcctgggacatgcaggagttcatcactcacatgtacatcaagcagctgctccgacaccccgccttccaactgctgctggccctgctgctggtgatcaatgccatcaccatcgctctccgtaccaactcctacctggaccagaaacactatgagttgttctctaccatagatgacattgtgctgaccatccttctttgtgaggttctccttggctggctcaatggcttctggattttctggaaggacggctggaacatcctcaacttcattatcgtctttatcttgctcttgcggttcttcattaatgaaatcaatattccctccatcaactacactctcagggcgcttcgtctggtgcatgtgtgcatggcggtggagcccctcgcccggatcatccgcgtcatcctgcagtcggtgcctgacatggccaatatcatggtcctcatcctcttcttcatgctgcatttccagaacatacaggttgcgctgtacaccctcttcatctgcatcacccaggacggctgggtggacatctacagtgacttccagacagagaagagggaatatgcaatggagattgggggtgccatctactttaccatcttcatcaccatcggtgccttcattggcatcaacctgttcgtcatcgtggtgaccaccaacctggagcaaatgatgaaggcaggagagcagggacaacagcaacgaataacctttagtgagacaggcgcagaggaagaggaggagaatgaccagctgccactggtgcattgtgtggtcgcccgctcggagaaatctggtctcctccaggaaccccttgcgggaggccccctgtcgaacctctcagaaaacacgtgtgacaacttttgcttggtgcttgaggcaatacaggagaacctgaggcagtacaaggagatccgagatgaactcaacatgtaggggagggtactggggctgcccccaagtcatgattgtggaggaggtgcgcgcaatccgcttcaaccaggagcaggagtcagaggtgttgaacaggcgctcgtcgacgagcgggtcgttggagactacgtcatccaaggacatccgccagatgtctcaacagcaagacttgctcagtgcgctcgttagcatggaaaaggttcatgactctagctcacaaatactccttaaaaaacacaagagcagccactgagaggccaggatgggagccaaggggcctgcacacacacacccagccgctgcgtcttcctgtgtccttagtgtggcttggcagagcctggccagagcccatcctctcccttatacctgggcagaggccaggggctgtgaaggtggcagcacctgcaggtctggtgcctgtgagccccaggtccggtggagcaaggagagaggaggatgctggatgatgagagtgggaaccctagcagcaaggatgagcacagaagggggtgctggccaacgcagccaggatttgacctaaggatggggatccctggccccctgctcttgcccagagctggtggggggcctcagtgggccccagaaccaagaagagaaaggcaaggccagtggggccagacatctgtgtgttgacaataaagttttgtgttggaatcaa

SEQ ID NO: 115062 - DNA, 1404 bp, Homo sapiens
  Payload ID: 2467
  Gene Symbol: CATSPER4
  Gene Name: cation channel, sperm associated 4
  ENST ID: ENST00000611853
  CDS Start-End: 33-1154
atgagggataatgaaaaggcctggtggcagcaatggacctcccatacaggcctcgaggggtgggcgggactcaggaggaccgtatggggtttggaggggcagtagctgcactgaggggccgcccctctcccctgcagagtaccattcacgagtcctacggtcggccagaggagcaagtgctcatcaaccgccaggaaatcacgaacaaagcggacgcctgggacatgcaggagttcatcactcacatgtacatcaagcagctgctccgacaccccgccttccaactgctgctggccctgctgctggtgatcaatgccatcaccatcgctctccgtaccaactcctacctggaccagaaacactatgagttgttctctaccatagatgacattgtgctgaccatccttctttgtgaggttctccttggctggctcaatggcttctggattttctggaaggacggctggaacatcctcaacttcattatcgtctttatcttgctcttgcggttcttcattaatgaaatcaatattccctccatcaactacactctcagggcgcttcgtctggtgcatgtgtgcatggcggtggagcccctcgcccggatcatccgcgtcatcctgcagtcggtgcctgacatggccaatatcatggtcctcatcctcttcttcatgctgcatttccagaacatacaggttgcgctgtacaccctcttcatctgcatcacccaggacggctgggtggacatctacagtgacttccagacagagaagagggaatatgcaatggagattgggggtgccatctactttaccatcttcatcaccatcggtgccttcattggcatcaacctgttcgtcatcgtggtgaccaccaacctggagcaaatgatgaaggcaggagagcagggacaacagcaacgaataacctttagtgagacaggcgcagaggaagaggaggagaatgaccagctgccactggtgcattgtgtggtcgcccgctcggagaaatctggtctcctccaggaaccccttgcgggaggccccctgtcgaacctctcagaaaacacgtgtgacaacttttgcttggtgcttgaggcaatacaggagaacctgaggcagtacaaggagatccgagatgaactcaacatgtaggggagggtactggggctgcccccaagtcatgattgtggaggaggtgcgcgcaatccgcttcaaccaggagcaggagtcagaggtgttgaacaggcgctcgtcgacgagcgggtcgttggagactacgtcatccaaggacatccgccagatgtctcaacagcaagacttgctcagtgcgctcgttagcatggaaaaggttcatgactctagctcacaaatactccttaaaaaacacaagagcagccactga

SEQ ID NO: 115063 - DNA, 3623 bp, Homo sapiens
  Payload ID: 2468
  Gene Symbol: CATSPERB
  Gene Name: catsper channel auxiliary subunit beta
  Uniprot ID: Q9H7T0
  ENST ID: ENST00000256343
  CDS Start-End: 158-3508
gctgattggctgttaccaaaggtgactagagtgctaagccagtcaacagggaaaacttggctcctgactttgggtctttcttctcagtctatatggaagaaaactgagaaaaaatataaaaaagaagaacacaactagttgcgcatctcctaaagagatggaatcgccacttatatatgtttcagttttgcttttgaacatatttgaattttcatcaggaatagtatataataaagatgatacagagaaacgctttgcatgttctaacaaagggttccctcaagagaatgaaataatcaagttgtatcttttcttagaaaacttgaaaatccagtgtttcttccaaactgaaaatgaaattgcatcaaaagcaatgctaagtgtgttcacatcaggaggacttgctcccagcttgggaatcatgaatagtacatataatggcatcttccactttaatttaacgttgttcagtgatcggattttgtggttggttgatattcctagagaaaacatcacacaaagcacagatattgcagctgtagaagaatggttagtaagaatcactttacatcatggactaaatatttatgctactgaaggaactctattggatgttattcgagaaccgattcttcagtggactcctggggatgtgattccagaaagtgaaatcagtaaattatatccacatgtggtagatctcaaagtgacaaaatgcccctgtgccaatgatgtggcattactaggcttcattgtggatacaatagttgatggtgtttacataggcataacctttggtggattctggcatgattatgataccacatggtttaacatgacacagactatctattcccaacttcaagaagaatatgaagacctttcattggtggatatggttttaacgaatcattttttagttatcctcacctctttgggcctttttgtaagtgaagatcttcgttatccatcacgccacagcttatcgttttccagggcagacttttgtggttttgaaagggttgactatgtgaaaggaaaactgtggtataatgaaagatgttttgctaacagagagcactttgaagttgattatgttacagttacctttgagagaaacagaaccctaagtgagtcaagctcttgtttttatagtcaggaaccatttcttgaatgggtaccctgcttacctcacatttttaaaggaataaaaatttttccaactgtgctaacatttcttgttgaccaagagcgtggtactggagtttacctcttctataacaaggtcaggaaaactgccattgcctctgtgagcaccctgagaaataatgaaccaaattcacaatcaaaatttccaatttttcggtttccttcatcattctcttctcccgttggaatggtatttcatccccgaagccactttttgtatgcttatggcaatcagatatggctttcagttgatggcggcaacacctttcaattaatagctaactttcatgatgatatcataaagaagacttttcatagtttttatacatcagctattacttttgtttctcaacgtggaaaggtttactcgacaaaggcaggaatgggaagatacagtgcagtcggaagtgttactgagagaattttcacattatactatgatcacttgggattcctacataagctgactctgggtcgctttgaagctagtggaccacccacagcctttggaaattctagaaatctttttggacagcctccagatatgggctttgagactgcgcttgccccacagcacacctccttagatgaaattatcttttttgcatatgtacctgagaacgaaccccaggaaacgatctacagcaagaagttcggcaatatacactatggaaaagtgatacactctgggaaaactggaagagcttacataagaaaggtattgcaacatacgactcctaaaggatttttgtcctcagttattgcagaaatgaaagagccctttggattagaagaagtgaatgagagctcttgtttgtctagttcccttttgattaataaagctggaaatgtctataaactcactcttgattcacaagttgttcaggccttgtttgaagatacagatatagagaagactgtagtgcttcccgggtacagcagcttcctcatcacaagcattttagataataagaatgcattagccattgctaccatgcctgaaagtgcacccaacaatatgacctttctaaagagcacatggttcttatacaactttgggcaaaggaatggacgaacatggaaaatatattcaaaaccatgtaattattggtttcaacatgatgattcaccatccctcaacatcgtgaaatacattgatctgggaaactcttatgttttaaaagctaaggtcatacggaatgcaaaaggttttcgaatgcttgaaataccactactgactgtgtttgttggaaaccctaatttgttggaagttacagctgaagtgacttttgatgatactgacagttatgtaataacaatttctgcagctagcaaagttttacatcagggttcaacttcactggcatttattatgtggtcagcctctactgagtgctttgttacgacaatggtgccaacactgaaaagcagctgtagttatctcagatctatgcatcacattcctagcaaatttatcccatttgaagactggattagtggagttcataaagacagtcagggttttaacctcatcaaaactttgccgataaactacaggcctccatctaatatgggaattgctattccactcacagataatttttatcatgcagatcctagcaaacccataccaagaaacatgtttcacatgtcaaagaaaaccggtaaattcaaacagtgtgctaatgtttccactcgggaggagtgtaactgcacaaaggatcagaagttttcacatgctgttgctttctcggattgcagggaaaaagttcctcgctttaagtttccaattacacaatatccagtttctttggaaattatcaacgaggatggacgtgtcccattgcaatctccatatctggttactgtgactgaagtgaacatgaggcacaactggaaactgaaacacactgtgccagaaaatattaaaagaatgaaacaattagtagaaccaattcttggtgctgcagtgtataatccttcaggtctcaacttaagcataaagggctctgaacttttccactttagagtgaccgtcatttcaggagtaactttttgtaacttaattgaagaatttcagatttatgttgatgaggcaccattgccattcccaggacacacgcttattgccgtggcaacagcggtagtgctagggggattaatttttatagcatttatgtttcaactgcaaggcatccatccgtggaggacattccaaagatggattagaagaaaccaagagaagttttcaagtatctctctcagtgagctgattcatagatcaaagtctgaagagtgaacacatggtgatcataatttctctttattttctagttttatcagccaattcctagaacaatatatttaaatgttaaatatgcaagctacataaaatcctaaagaattgtcattat

SEQ ID NO: 115064 - DNA, 582 bp, Homo sapiens
  Payload ID: 2468
  Gene Symbol: CATSPERB
  Gene Name: catsper channel auxiliary subunit beta
  ENST ID: ENST00000553329
  CDS Start-End: 131-582
agagtgctaagccagtcaacagggaaaacttggctcctgactttgggtctttcttctcagtctatatggaagaaaactgagaaaaaatataaaaaagaagaacacaactagttgcgcatctcctaaagagatggaatcgccacttatatatgtttcagttttgcttttgaacatatttgaattttcatcaggaatagtatataataaagatgatacagagaaacgctttgcatgttctaacaaagggttccctcaagagaatgaaataatcaagttgtatcttttcttagaaaacttgttcagtgatcggattttgtggttggttgatattcctagagaaaacatcacacaaagcacagatattgcagctgtagaagaatggttagtaagaatcactttacatcatggactaaatatttatgctactgaaggaactctattggatgttattcgagaaccgattcttcagtggactcctggggatgtgattccagaaagtgaaatcagtaaattatatccacatgtggtagatctcaaagtgacaaaatgcccctgtgccaatgatgtggcattactaggctt

SEQ ID NO: 115065 - DNA, 430 bp, Homo sapiens
  Payload ID: 2468
  Gene Symbol: CATSPERB
  Gene Name: catsper channel auxiliary subunit beta
  ENST ID: ENST00000553676
  CDS Start-End: 210-430
acgcaaggagaaggaaatcataatgatgtcatgtgatcaaaggaaaccatggaagggttcacgctgatagctgatagcttttacagtgctcattcctaacagtggatttactttagagacaggattttgccatgtttgccaggttggccttgaactcctgacctcaggtgatccacctgcctcgacctcccaaagtgcttggattacagatggaatcgccacttatatatgtttcagttttgcttttgaacatatttgaattttcatcaggaatagtatataataaagatgatacagagaaacgctttgcatgttctaacaaagggttccctcaagagaatgaaataatcaagttgtatcttttcttagaaaacttgaaaatccagtgtttcttccaaactgaaaatgaaattgcatcaaaagcaatgct

SEQ ID NO: 115066 - DNA, 2229 bp, Homo sapiens
  Payload ID: 2468
  Gene Symbol: CATSPERB
  Gene Name: catsper channel auxiliary subunit beta
  ENST ID: ENST00000557036
  CDS Start-End: 1-204
aatgaaccaaattcacaatcaaaatttccaatttttcggtttccttcatcattctcttctcccgttggaatggtatttcatccccgaagccactttttgtatgcttatggcaatcaggaatgggaagatacagtgcagtcggaagtgttactgagagaattttcacattatactatgatcacttgggattcctacataagctgactctgggtcgctttgaagctagtggaccacccacagcctttggaaattctagaaatctttttggacagcctccagatatgggctttgagactgcgcttgccccacagcacacctccttagatgaaattatcttttttgcatatgtacctgagaacgaaccccaggaaacgatctacagcaagaagttcggcaatatacactatggaaaagtgatacactctgggaaaactggaagagcttacataagaaaggtattgcaacatacgactcctaaaggatttttgtcctcagttattgcagaaatgaaagagccctttggattagaagaagtgaatgagagctcttgtttgtctagttcccttttgattaataaagctggaaatgtctataaactcactcttgattcacaagttgttcaggccttgtttgaagatacagatatagagaagactgtagtgcttcccgggtacagcagcttcctcatcacaagcattttagataataagaatgcattagccattgctaccatgcctgaaagtgcacccaacaatatgacctttctaaagagcacatggttcttatacaactttgggcaaaggaatggacgaacatggaaaatatattcaaaaccatgtaattattggtttcaacatgatgattcaccatccctcaacatcgtgaaatacattgatctgggaaactcttatgttttaaaagctaaggtcatacggaatgcaaaaggttttcgaatgcttgaaataccactactgactgtgtttgttggaaaccctaatttgttggaagttacagctgaagtgacttttgatgatactgacagttatgtaataacaatttctgcagctagcaaagttttacatcagggttcaacttcactggcatttattatgtggtcagcctctactgagtgctttgttacgacaatggtgccaacactgaaaagcagctgtagttatctcagatctatgcatcacattcctagcaaatttatcccatttgaagactggattagtggagttcataaagacagtcagggttttaacctcatcaaaactttgccgataaactacaggcctccatctaatatgggaattgctattccactcacagataatttttatcatgcagatcctagcaaacccataccaagaaacatgtttcacatgtcaaagaaaaccggtaaattcaaacagtgtgctaatgtttccactcgggaggagtgtaactgcacaaaggatcagaagttttcacatgctgttgctttctcggattgcagggaaaaagttcctcgctttaagtttccaattacacaatatccagtttctttggaaattatcaacgaggatggacgtgtcccattgcaatctccatatctggttactgtgactgaagtgaacatgaggcacaactggaaactgaaacacactgtgccagaaaatattaaaagaatgaaacaattagtagaaccaattcttggtgctgcagtgtataatccttcaggtctcaacttaagcataaagggctctgaacttttccactttagagtgaccgtcatttcaggagtaactttttgtaacttaattgaagaatttcagatttatgttgatgaggcaccattgccattcccaggacacacgcttattgccgtggcaacagcggtagtgctagggggattaatttttatagcatttatgtttcaactgcaaggcatccatccgtggaggacattccaaagatggattagaagaaaccaagagaagttttcaagtatctctctcagtgagctgattcatagatcaaagtctgaagagtgaacacatggtgatcataatttctctttattttctagttttatcagccaattcctagaacaatatatttaaatgttaaatatgcaagctacataaaatcctaaagaattgtcattataattcaaattgctacttgtcaatatattcaccatttccttttcttattttgaatacatagaaaatgtcttatgccagg

SEQ ID NO: 115067 - DNA, 491 bp, Homo sapiens
  Payload ID: 2468
  Gene Symbol: CATSPERB
  Gene Name: catsper channel auxiliary subunit beta
  ENST ID: ENST00000556661
  CDS Start-End: 270-491
acgcaaggagaaggaaatcataatgatgtcatgtgatcaaaggaaaccatggaagggttcacgctgatagctgatagcttttacagtgctcattcctaacagtggatttacttgcagaactccgttagagaagatttaatccggattccaccgctgctccactgctgctgtcctctgttcttttccacacaacctctacctgacttcactttggtgtggactctggagttgatccctctggtttcatatgcttcttttcctacttatatatggaatcgccacttatatatgtttcagttttgcttttgaacatatttgaattttcatcaggaatagtatataataaagatgatacagagaaacgctttgcatgttctaacaaagggttccctcaagagaatgaaataatcaagttgtatcttttcttagaaaacttgaaaatccagtgtttcttccaaactgaaaatgaaattgcatcaaaagcaatgcta

SEQ ID NO: 115068 - DNA, 432 bp, Homo sapiens
  Payload ID: 2468
  Gene Symbol: CATSPERB
  Gene Name: catsper channel auxiliary subunit beta
  ENST ID: ENST00000554560
  CDS Start-End: 133-432
tcttgacctttacccacttacgcaaggagaaggaaatcataatgatgtcatgtgatcaaaggaaaccatggaagggttcacgctgatagctgatagcttttacagtgctcattcctaacagtggatttacttatggaatcgccacttatatatgtttcagttttgcttttgaacatatttgaattttcatcaggaatagtatataataaagatgatacagagaaacgctttgcatgttctaacaaagggttccctcaagagaatgaaataatcaagttgtatcttttcttagaaaacttgaaaatccagtgtttcttccaaactgaaaatgaaattgcatcaaaagcaatgctaagtgtgttcacatcaggaggacttgctcccagcttgggaatcatgaatagtacatataatggcatcttccactttaat

SEQ ID NO: 115069 - DNA, 3623 bp, Homo sapiens
  Payload ID: 2468
  Gene Symbol: CATSPERB
  Gene Name: catsper channel auxiliary subunit beta
  Uniprot ID: Q9H7T0
  ENST ID: ENST00000619027
  CDS Start-End: 158-3508
gctgattggctgttaccaaaggtgactagagtgctaagccagtcaacagggaaaacttggctcctgactttgggtctttcttctcagtctatatggaagaaaactgagaaaaaatataaaaaagaagaacacaactagttgcgcatctcctaaagagatggaatcgccacttatatatgtttcagttttgcttttgaacatatttgaattttcatcaggaatagtatataataaagatgatacagagaaacgctttgcatgttctaacaaagggttccctcaagagaatgaaataatcaagttgtatcttttcttagaaaacttgaaaatccagtgtttcttccaaactgaaaatgaaattgcatcaaaagcaatgctaagtgtgttcacatcaggaggacttgctcccagcttgggaatcatgaatagtacatataatggcatcttccactttaatttaacgttgttcagtgatcggattttgtggttggttgatattcctagagaaaacatcacacaaagcacagatattgcagctgtagaagaatggttagtaagaatcactttacatcatggactaaatatttatgctactgaaggaactctattggatgttattcgagaaccgattcttcagtggactcctggggatgtgattccagaaagtgaaatcagtaaattatatccacatgtggtagatctcaaagtgacaaaatgcccctgtgccaatgatgtggcattactaggcttcattgtggatacaatagttgatggtgtttacataggcataacctttggtggattctggcatgattatgataccacatggtttaacatgacacagactatctattcccaacttcaagaagaatatgaagacctttcattggtggatatggttttaacgaatcattttttagttatcctcacctctttgggcctttttgtaagtgaagatcttcgttatccatcacgccacagcttatcgttttccagggcagacttttgtggttttgaaagggttgactatgtgaaaggaaaactgtggtataatgaaagatgttttgctaacagagagcactttgaagttgattatgttacagttacctttgagagaaacagaaccctaagtgagtcaagctcttgtttttatagtcaggaaccatttcttgaatgggtaccctgcttacctcacatttttaaaggaataaaaatttttccaactgtgctaacatttcttgttgaccaagagcgtggtactggagtttacctcttctataacaaggtcaggaaaactgccattgcctctgtgagcaccctgagaaataatgaaccaaattcacaatcaaaatttccaatttttcggtttccttcatcattctcttctcccgttggaatggtatttcatccccgaagccactttttgtatgcttatggcaatcagatatggctttcagttgatggcggcaacacctttcaattaatagctaactttcatgatgatatcataaagaagacttttcatagtttttatacatcagctattacttttgtttctcaacgtggaaaggtttactcgacaaaggcaggaatgggaagatacagtgcagtcggaagtgttactgagagaattttcacattatactatgatcacttgggattcctacataagctgactctgggtcgctttgaagctagtggaccacccacagcctttggaaattctagaaatctttttggacagcctccagatatgggctttgagactgcgcttgccccacagcacacctccttagatgaaattatcttttttgcatatgtacctgagaacgaaccccaggaaacgatctacagcaagaagttcggcaatatacactatggaaaagtgatacactctgggaaaactggaagagcttacataagaaaggtattgcaacatacgactcctaaaggatttttgtcctcagttattgcagaaatgaaagagccctttggattagaagaagtgaatgagagctcttgtttgtctagttcccttttgattaataaagctggaaatgtctataaactcactcttgattcacaagttgttcaggccttgtttgaagatacagatatagagaagactgtagtgcttcccgggtacagcagcttcctcatcacaagcattttagataataagaatgcattagccattgctaccatgcctgaaagtgcacccaacaatatgacctttctaaagagcacatggttcttatacaactttgggcaaaggaatggacgaacatggaaaatatattcaaaaccatgtaattattggtttcaacatgatgattcaccatccctcaacattgtgaaatacattgatctgggaaactcttatgttttaaaagctaaggtcatacggaatgcaaaaggttttcgaatgcttgaaataccactactgactgtgtttgttggaaaccctaatttgttggaagttacagctgaagtcacttttgatgatactgacagttatgtaataacaatttctgcagctagcaaagttttacatcagggttcaacttcactggcatttattatgtggtcagcctctactgagtgctttgttacgacaatggtgccaacactgaaaagcagctgtagttatctcagatctatgcatcacattcctagcaaatttatcccatttgaagactggattagtggagttcataaagacagtcagggttttaacctcatcaaaactttgccgataaactacaggcctccatctaatatgggaattgctattccactcacagataatttttatcatgcagatcctagcaaacccataccaagaaacatgtttcacatgtcaaagaaaaccggtaaattcaaacagtgtgctaatgtttccactcgggaggagtgtaactgcacaaaggatcagaagttttcacatgctgttgctttctcggattgcagggaaaaagttcctcgctttaagtttccaattacacaatatccagtttctttggaaattatcaacgaggatggacgtgtcccattgcaatctccatatctggttactgtgactgaagtgaacatgaggcacaactggaaactgaaacacactgtgccagaaaatattaaaagaatgaaacaattagtagaaccaattcttggtgctgcagtgtataatccttcaggtctcaacttaagcataaagggctctgaacttttccactttagagtgaccgtcatttcaggagtaactttttgtaacttaattgaagaatttcagatttatgttgatgaggcaccattgccattcccaggacacacgcttattgccgtggcaacagcggtagtgctagggggattaatttttatagcatttatgtttcaactgcaaggcatccatccgtggaggacattccaaagatggattagaagaaaccaagagaagttttcaagtatctctctcagtgagctgattcatagatcaaagtctgaagagtgaacacatggtgatcataatttctctttattttctagttttatcagccaattcctagaacaatatatttaaatgttaaatatgcaagctacataaaatcctaaagaattgtcattat

SEQ ID NO: 115070 - DNA, 430 bp, Homo sapiens; identical to SEQ ID NO: 115065
  Payload ID: 2468
  Gene Symbol: CATSPERB
  Gene Name: catsper channel auxiliary subunit beta
  ENST ID: ENST00000631383
  CDS Start-End: 210-430

SEQ ID NO: 115071 - DNA, 2229 bp, Homo sapiens
  Payload ID: 2468
  Gene Symbol: CATSPERB
  Gene Name: catsper channel auxiliary subunit beta
  ENST ID: ENST00000633011
  CDS Start-End: 1-204
aatgaaccaaattcacaatcaaaatttccaatttttcggtttccttcatcattctcttctcccgttggaatggtatttcatccccgaagccactttttgtatgcttatggcaatcaggaatgggaagatacagtgcagtcggaagtgttactgagagaattttcacattatactatgatcacttgggattcctacataagctgactctgggtcgctttgaagctagtggaccacccacagcctttggaaattctagaaatctttttggacagcctccagatatgggctttgagactgcgcttgccccacagcacacctccttagatgaaattatcttttttgcatatgtacctgagaacgaaccccaggaaacgatctacagcaagaagttcggcaatatacactatggaaaagtgatacactctgggaaaactggaagagcttacataagaaaggtattgcaacatacgactcctaaaggatttttgtcctcagttattgcagaaatgaaagagccctttggattagaagaagtgaatgagagctcttgtttgtctagttcccttttgattaataaagctggaaatgtctataaactcactcttgattcacaagttgttcaggccttgtttgaagatacagatatagagaagactgtagtgcttcccgggtacagcagcttcctcatcacaagcattttagataataagaatgcattagccattgctaccatgcctgaaagtgcacccaacaatatgacctttctaaagagcacatggttcttatacaactttgggcaaaggaatggacgaacatggaaaatatattcaaaaccatgtaattattggtttcaacatgatgattcaccatccctcaacattgtgaaatacattgatctgggaaactcttatgttttaaaagctaaggtcatacggaatgcaaaaggttttcgaatgcttgaaataccactactgactgtgtttgttggaaaccctaatttgttggaagttacagctgaagtcacttttgatgatactgacagttatgtaataacaatttctgcagctagcaaagttttacatcagggttcaacttcactggcatttattatgtggtcagcctctactgagtgctttgttacgacaatggtgccaacactgaaaagcagctgtagttatctcagatctatgcatcacattcctagcaaatttatcccatttgaagactggattagtggagttcataaagacagtcagggttttaacctcatcaaaactttgccgataaactacaggcctccatctaatatgggaattgctattccactcacagataatttttatcatgcagatcctagcaaacccataccaagaaacatgtttcacatgtcaaagaaaaccggtaaattcaaacagtgtgctaatgtttccactcgggaggagtgtaactgcacaaaggatcagaagttttcacatgctgttgctttctcggattgcagggaaaaagttcctcgctttaagtttccaattacacaatatccagtttctttggaaattatcaacgaggatggacgtgtcccattgcaatctccatatctggttactgtgactgaagtgaacatgaggcacaactggaaactgaaacacactgtgccagaaaatattaaaagaatgaaacaattagtagaaccaattcttggtgctgcagtgtataatccttcaggtctcaacttaagcataaagggctctgaacttttccactttagagtgaccgtcatttcaggagtaactttttgtaacttaattgaagaatttcagatttatgttgatgaggcaccattgccattcccaggacacacgcttattgccgtggcaacagcggtagtgctagggggattaatttttatagcatttatgtttcaactgcaaggcatccatccgtggaggacattccaaagatggattagaagaaaccaagagaagttttcaagtatctctctcagtgagctgattcatagatcaaagtctgaagagtgaacacatggtgatcataatttctctttattttctagttttatcagccaattcctagaacaatatatttaaatgttaaatatgcaagctacataaaatcctaaagaattgtcattataattcaaattgctacttgtcaatatattcaccatttccttttcttattttgaatacatagaaaatgtcttatgccagg

SEQ ID NO: 115072 - DNA, 582 bp, Homo sapiens; identical to SEQ ID NO: 115064
  Payload ID: 2468
  Gene Symbol: CATSPERB
  Gene Name: catsper channel auxiliary subunit beta
  ENST ID: ENST00000631902
  CDS Start-End: 131-582

SEQ ID NO: 115073 - DNA, 491 bp, Homo sapiens; identical to SEQ ID NO: 115067
  Payload ID: 2468
  Gene Symbol: CATSPERB
  Gene Name: catsper channel auxiliary subunit beta
  ENST ID: ENST00000632189
  CDS Start-End: 270-491

SEQ ID NO: 115074 - DNA, 432 bp, Homo sapiens; identical to SEQ ID NO: 115068
  Payload ID: 2468
  Gene Symbol: CATSPERB
  Gene Name: catsper channel auxiliary subunit beta
  ENST ID: ENST00000631777
  CDS Start-End: 133-432

SEQ ID NO: 115075 - DNA, 2516 bp, Homo sapiens
  Payload ID: 2469
  Gene Symbol: CATSPERD
  Gene Name: catsper channel auxiliary subunit delta
  Uniprot ID: Q86XM0
  ENST ID: ENST00000381624
  CDS Start-End: 62-2458
gattgtgcagcgactccccgtggcggttgaggggcagtggtggcggcggaagcccaagtcgatgctgatgttgatgctggtggcggctgtgaccatgtggctccgaccgctggtcacagctcagctctgtcgttctcgcacagtgaggacaggaaaagtgtttaatctgatacaggacgttcaaggggaccgcctgtattttcatcctacaacaacacgcttgattaaacatccttgcgagaaaaatatagcactatatctagggaaacaagtttttttcacaatggataactttgagactagtctccttccatttaccatccctacatcaatgcaggtcggcgtaccagaagtgacatcagcacattttgctggttcgttattgctgttagtagtggatcaaaaagtctatatttatgattatgaaaataattcttggagcatgtctttaggtataaaacaccctgttacacatgtctctggtgataattgttgttatactggaagtttgttttgtgtgcatgtcagtaatttggtttttgcatatttccgtggagatcagatatcccagacttatatatattattcaaatactgggggattcagtttttggaagtatcactatgacagacaggcagaaatcattgggtctttaggcggaatcttccactttttttctttgtcacaggttgcgatgcttgtagtgaatcaagggaagggcatgttcaagtactcagatcaccccctcaaccggagtttcgggctgtcttttgactataatgggactctagacatcctcatcgcccccggccagagaggcatcctgctcctatggtttgagaacagcctgttgttttcccataatgcaggtcagctcgtcgacaccgtccgggtgaaaaaaggagaccagaccttgttttcttccatttttgaagccaagatcaccatccacaacattgctgtcactgaaaatgaactggcagttataactcgggaggataatttgtattatggcaatctgggcatcgtgccaagttccataatcaaatttgcagaccaatacatctggtcagaagacgtggccctgatgttcaggagcccagggactctggaaatactgaccccactgcgtgacacagcctttccagcttttgatttccagaagtgcctcgtgaatatccaggcgcttctcatggaccctgaactccacgttggaaagtgcaagatagagtttctgacaggagaatttatatacaggatgtataccattgacatgcacagccagctggaattgactgcttcgttgataccccagccaggcacatccctgattcctctggtgatggtgagcaacccccactccctggggttccaggccaccttctacgagaacggttacacatcagatgggaacaccaagtacaaactggatattttcctaaaacagcagcagcactggggcaggaccgactccaacttcacttccagtttaaagaaagccaccatgtctaccttaactgtggacatagcaaacaaggaaatttcatgtgtggatatcaagccactgtcgacactgatttcagttggctgcgacctggataaaaagatcgtcatccagaacaaagtttccgcctgttccatgggcatcctggaccccttgaccctgcaagacaattacagcttcatcatcgagaaggaattctacgaccccggcttccaggggcagcagtcctccgaggacctgcacgtgttttactcctaccagcagctgggctgtcctctcctcgtctactatgacaccctatggaagcccgtggtggagctgtggcgaaaagacagtttccaggaggtcatcgacgccgagtatgtgttactggaggtgaacgggcagttctcatactcctattccctgacggcccagtcggccatgtgtacctcccagccgcagaactggaccaccatgataaaggaattcggggggcccttcttctggaacagagagaactatgtgagctgccacgaccccaacaacaatgcccctttgaggtggccagacgtccagtatcagatcttgggcggccggacagcaaaccagatcattttcggccacaatggcttttatgtcttctacatttcgatcgtggatccgtactacagctactgtcaactggagaccatctttagcatctacgtgtatggagcattccccgtgcagctggtctctgctggagtcgtcatcctactgatcatctccagcatcctggggtccgtttggctggcctacaagacccccaagctgctacgcacagcacgcggccgcaggatcaagaagtgtgcgacacagctgtgtaggagatgcaagacggtctgccagttcagggcctcagccacagccagggcaggcacagagcccccgggacgccaccgcactcctcacggaggcaggtctgaccactgaggccggtccacagggtcccaaccccttgtcttcaaataaagtataatgtaacatagca

SEQ ID NO: 115076 - DNA, 3501 bp, Homo sapiens
  Payload ID: 2470
  Gene Symbol: CATSPERG
  Gene Name: catsper channel auxiliary subunit gamma
  ENST ID: ENST00000312265
  CDS Start-End: 73-951
aagaggggcgggactggtgcggccgagtgacagttgaccggttttaaccaagtgactggttctagccacgttatgtgcggcccagccatgttccctgccggtcctccgtggcccagagtccgagtcgtgcaggtgctgtgggccctgctggcagtgctcctggcgtcgtggaggctgtgggcgatcaaggatttccaggaatgcacctggcaggttgtcctgaacgagtttaagagggtaggcgagagtggtgtgagcgacagcttctttgagcaagagcccgtggacacagtgagcagcttgtttcacatgctggtggactcacccatcgacccgagcgagaaatacctgggcttcccttactacctgaagatcaactactcctgcgaggaaaagtccccagtcaacttctaccgctggaagatagagcagctgcagatccagatggaggctgcccccttccgcagcaaagagccatgcatggcagaagaagtgtgtagcatgagctggtacacgcccatgcccatcaagaaaggcagtgtggtcatgcgtgtggacatcagcagcaatggcctggggaccttcattccagataaaaggttccagatgaatatcaacggcttcctgaagagagaccgggacaataacatccaattcactgtgggagaggagctcttcaacctgatgccccagtactttgtgggtgtctcatcgaggcccttgtggcacactgtggaccagtcacctgtgcttatcctgggaggcattcccaatgagaagtacgtcctgatgactgacaccagcttcaaggacttctctctcgtggaggcacctataccacactctatgagagaaaccgcggcagtggcagttggattcgtgtcctggccagcgagtgcatcaagaagctgtgccctgtgtatttccatagcaatggctctgagtacataatggccctcaccacgggcaagcatgagggttatgtacacttcgggaccatcagagatggccaggtgtcctttgagatgctgcccaggcagtggtctgtgtgcgagcagataggagttaccacctgctccataatttggtctgaatacatcgcgggtgagtatactctactgctgctggtggagagtggatatggtaatgcaagtaaacgtttccaggtggtcagctacaacacagctagtgatgacctggaacttctctaccacatcccagaattcatccctgaagctcgaggattggagttcctgatgatcctagggacagagtcctacaccagcactgcaatggcccccaagggcatcttctgtaacccgtacaacaatctgatcttcatctggggcaacttcctcctgcagagctctaacaaggaaaacttcatctacctggcagacttccccaaggaactgtccatcaaatacatggccagatcgttccgtggggctgtggctattgtcacagagacggaggagatctggtacctcctggagggcagctaccgggtctaccagctgttcccttccaagggctggcaggtgcacatcagcttaaagctgatgcaacagtcctctctctacgcatccaatgagaccatgctgaccctcttctacgaagacagcaaactgtaccagctggtgtaccttatgaacaaccagaagggccagctggtcaagaggctcgtgcccgtggagcagcttctgatgtatcaacagcacaccagccactatgacttggagcggaaagggggctacttgatgctctccttcatcgacttctgccccttctcggtgatgcgcctgcggagcctgcccagtccgcagagatacacgcgccaggagcgctaccgggcgcggccgccgcgcgtcctggagcgctcgggcttccacaacgagaactcgctcgccatctaccagggcctggtctactacctgctgtggctgcactccgtgtacgacaagccgtacgcggacccggtgcacgaccccacctggcgctggtgggcgaacaacaaacaagaccaggattactacttcttcttggcgagcaattggcgaagcgcgggcggcgtgtccatagaaatggacagctacgaaaagatctacaacctcgagtccgcgtacgagctgccggagcgcattttcctggacaagggcactgagtacagcttcgccatcttcctgtcggcgcagggccactcgttccggacgcagtcagaactcggcaccgccttccagctgcatagccaggtggacgtgggcgtggtgctggccgaccccggctgcatcgaggcctcggtgaagcaggaggtcctgattaatcgcaactcggtgctattttcgattacgctcaaggataaaaagctttgctatgaccaaggcattagtggacatcaccttatggagacttccatgacggtcaatgtggtgggttcatccgggctctgcttccaggaaacacacctggggccccatatgcaaggcaacctgatggtgccagtgttcattggctgccccccaggcaagcgcctggccttcgacatcacctacacgctggaatacagccgcctgaagaacaaacactactttgactgcgttaacgtgaacccggagatgccctgctttctcttccgggacattttctaccccttcttcttgattcaagatttggtgacaggagactccggcagtttccagggcagctatgttctgctggtggtgggtggcgggcccacactggacagcctcaaggactacagtgaggacgaaatctaccgcttcaacagccccctggacaagaccaacagccttatctggaccacgaggaccacaaggaccaccaaagactcagcctttcacatcatgtcccacgagagcccaggcatcgagtggctctgtctggagaatgccccatgctatgacaatgttccccaaggcatctttgcccctgaattcttcttcaaggtgttggtgagcaatagaggagtggacacgagcacctactgcaactaccagctcaccttcctgctgcacatccacgggctgccactcagtcccaagcgggcccttttcatcatcatggtgtcagctagcgtgtttgtgggcctggtgatcttctacatcgccttctgcctcctgtggcccctcgtggtgaagggctgcacgatgatccggtggaagataaacaacctcattgcctcagaatcctactacacctacgcctccatttccggaatctcgagcatgccgtctctgagacattccaggatgggctccatgttcagctccaggatgacagaggacagggctgaacccaaggaagccgtggagagacagttgatgacctgagtgtcccacctgccccagcccccagttactgtcacgcctctcttatgaggcccatcttgaagatgcaacctgtcacccagcccaggcctctctttctgttttgcttgatgtttacttctcgttcagactcaaataaagccttttttcagga
